United States Patent Application Publication US 2018/0126003 A1 - sequence listing, part 95

SEQ ID NO: 172220 - DNA, 873 bp, Artificial Sequence
  derived and/or modified sequence
atgagcctgaagctgcaggccagcaacgtgaccaacaagaacgaccccaagagcatcaacagcagagtgttcatcggcaacctgaacaccgccctggtgaagaagagcgacgtggagaccatcttcagcaagtacggcagagtggccggctgcagcgtgcacaagggctacgccttcgtgcagtacagcaacgagagacacgccagagccgccgtgctgggcgagaacggcagagtgctggccggccagaccctggacatcaacatggccggcgagcccaagcccgacagacccaagggcctgaagagagccgccagcgccatctacagactgttcgactacagaggcagactgagccccgtgcccgtgcccagagccgtgcccgtgaagagacccagagtgaccgtgcccctggtgagaagagtgaagaccaacgtgcccgtgaagctgttcgccagaagcaccgccgtgaccaccagcagcgccaagatcaagctgaagagcagcgagctgcaggccatcaagaccgagctgacccagatcaagagcaacatcgacgccctgctgagcagactggagcagatcgccgccgagcagaaggccaaccccgacggcaagaagaagggcgacggcggcggcgccggcggcggcggcggcggcggcggcagcggcggcggcggcagcggcggcggcggcggcggcggcagcagcagaccccccgccccccaggagaacaccaccagcgaggccggcctgccccagggcgaggccagaaccagagacgacggcgacgaggagggcctgctgacccacagcgaggaggagctggagcacagccaggacaccgacgccgacgacggcgccctgcagtag

SEQ ID NO: 172221 - DNA, 270 bp, Artificial Sequence
  derived and/or modified sequence
atgagcctgaagctgcaggccagcaacgtgaccaacaagaacgaccccaagagcatcaacagcagagtgttcatcggcaacctgaacaccgccctggtgaagaagagcgacgtggagaccatcttcagcaagtacggcagagtggccggctgcagcgtgcacaagggctacgccttcgtgcagtacagcaacgagagacacgccagagccgccgtgctgggcgagaacggcagagtgctggccggccagaccctggacatcaacatgtag

SEQ ID NO: 172222 - DNA, 714 bp, Artificial Sequence
  derived and/or modified sequence
atgagcctgaagctgcaggccagcaacgtgaccaacaagaacgaccccaagagcatcaacagcagagtgttcatcggcaacctgaacaccgccctggtgaagaagagcgacgtggagaccatcttcagcaagtacggcagagtggccggctgcagcgtgcacaagggctacgccttcgtgcagtacagcaacgagagacacgccagagccgccgtgctgggcgagaacggcagagtgctggccggccagaccctggacatcaacatggccggcgagcccaagcccgacagacccaagggcctgaagagagccgccagcgccatctacagactgttcgactacagaggcagactgagccccgtgcccgtgcccagagccgtgcccgtgaagagacccagagtgaccgtgcccctggtgagaagagtgaagaccaacgtgcccgtgaagctgttcgccagaagcaccgccgtgaccaccagcagcgccaagatcaagctgaagagcagcgagctgcaggccatcaagaccgagctgacccagatcaagagcaacatcgacgccctgctgagcagactggagcagatcgccgccgagcagaaggccaaccccgacggcaagaagaagggcgacggcggcggcgccggcggcggcggcggcggcggcggcagcggcggcggcggcagcggcggcggcggcggcggcggcagcagctag

SEQ ID NO: 172223 - protein, 340 aa, Artificial Sequence
  derived and/or modified sequence
METSALKQQEQPAATKIRNLPWVEKYRPQTLNDLISHQDILSTIQKFINEDRLPHLLLYGPPGTGKTSTILACAKQLYKDKEFGSMVLELNASDDRGIDIIRGPILSFASTRTIFKKGFKLVILDEADAMTQDAQNALRRVIEKFTENTRFCLICNYLSKIIPALQSRCTRFRFGPLTPELMVPRLEHVVEEEKVDISEDGMKALVTLSSGDMRRALNILQSTNMAFGKVTEETVYTCTGHPLKSDIANILDWMLNQDFTTAYRNITELKTLKGLALHDILTEIHLFVHRVDFPSSVRIHLLTKMADIEYRLSVGTNEKIQLSSLIAAFQVTRDLIVAEA

SEQ ID NO: 172224 - DNA, 1023 bp, Artificial Sequence
  derived and/or modified sequence
atggagactagcgctttaaaacaacaggagcaacccgccgcaactaaaatacgcaaccttccctgggttgaaaagtataggccccaaacgctgaacgatcttatcagtcaccaggatatattgtcaaccatccagaaatttatcaacgaggatagactgccccatctcttgttgtacggcccccccggaacaggcaaaacttcaaccatactggcttgcgctaagcagctctacaaagataaggagtttggctccatggtgctggaactcaatgcatctgacgaccggggtatagatataatccgcggacccatattgtcgtttgcaagcacacggactatctttaaaaagggcttcaagctggtgatcctggacgaagccgatgccatgactcaagatgcacagaatgcgcttcggcgagtcatcgagaagtttaccgaaaacacccgattctgtctgatctgtaattatctgagtaagatcatccccgctctacagtcccgctgtactcgtttccgattcggccctttgactccggaactcatggtgcctaggctggagcacgtcgtcgaagaggagaaggtcgatattagcgaggacggcatgaaggcccttgtcactctgagctccggtgatatgagaagggccctaaacatccttcaatctaccaacatggcatttgggaaggtgacagaagagacagtgtatacttgtaccgggcaccccctaaaatccgacattgctaatattcttgactggatgctgaatcaagattttaccacagcttaccggaacatcacagagctgaagactttgaagggccttgccctccacgacattctgaccgagattcatctttttgtccacagggtcgacttcccctcttctgtacgcatccacttgcttacaaaaatggccgacatcgaatacaggctctccgtcggcaccaacgagaagatccagctctcatccctcatcgccgcatttcaggtgacgagagatctaatcgtggctgaagcctag

SEQ ID NO: 172225 - DNA, 1023 bp, Artificial Sequence
  derived and/or modified sequence
atggagaccagcgccctgaagcagcaggagcagcctgctgccaccaagatccggaacctgccctgggtggagaagtaccggccccagaccctgaatgacctgatcagccaccaggacatcctgagcaccatccagaagttcatcaatgaagatcggctgccccacctgctgctgtatggccccccaggcaccgggaagaccagcaccatcctggcctgtgccaagcagctgtacaaggacaaggagtttggctccatggtgctggagctgaatgccagtgatgaccggggcatcgacatcatccggggccccatcctgagctttgccagcaccaggaccatcttcaagaagggcttcaagctggtgatcctggatgaagcagatgccatgacccaggatgcccagaatgccctgcggcgggtcatcgagaagttcacagagaacacccgcttctgcctgatctgcaactacctgagcaagatcatcccagccctgcagagccgctgcacccgcttccgcttcggccccctgaccccagagctgatggtgccccggctggagcacgtggtggaggaggagaaggtggacatcagtgaagatggcatgaaggccctggtgaccctgagcagcggggacatgaggcgggccctgaacatcctgcagagcaccaacatggccttcggcaaggtgacagaggagaccgtgtacacctgcaccggccaccccctgaagagtgacatcgccaacatcctggactggatgctgaaccaggacttcaccacagcctacagaaacatcacagagctgaagaccctgaagggcctggccctgcatgacatcctgacagagatccacctgtttgtgcaccgggtggacttccccagctctgtgcgcatccacctgctgaccaagatggctgacatcgagtaccgcctgtctgtgggcaccaatgagaagatccagctgagcagcctgattgctgccttccaggtgacccgggacctgattgtggccgaggcctag

SEQ ID NO: 172226 - DNA, 1023 bp, Artificial Sequence
  derived and/or modified sequence
atggagaccagcgccctgaagcagcaggagcagcccgccgccaccaaaattcgaaatcttccctgggtcgagaaatacagacctcagacgcttaacgacctgatctcccaccaggacattctcagtacaattcaaaagttcattaacgaagataggttaccgcatctgctcttgtacggacctcccgggacagggaagacctctacgatccttgcgtgtgctaaacaactctacaaggataaagagtttgggagtatggtgctggagctgaacgcttctgatgatcgggggatcgatattattcgagggcccattctgtccttcgcctccacacgtactatatttaaaaagggcttcaagctcgtaattctcgacgaggccgacgccatgacccaggatgctcagaacgccctgcggcgggtaattgaaaaatttactgaaaataccagattttgcctgatctgcaactacctgtctaagatcatcccggctcttcagagccggtgcactcggttccgtttcgggccccttacacccgaattgatggtccccagattggagcatgtggtcgaggaagaaaaagtggacattagcgaggatggaatgaaagcccttgtgaccttgagctctggagatatgcgccgggccttaaacattttgcagtcgactaacatggccttcggaaaagtgacagaggagaccgtgtatacatgtacagggcacccattaaaaagtgacatagcgaacattctggactggatgcttaaccaggactttactactgcctacaggaacattaccgaactgaaaacattgaaaggcctggccctgcatgatatcctaacagaaatacatctgttcgtgcatcgcgttgacttccccagttccgtgagaattcacctcttaactaaaatggctgacatagaatatcggctctctgtaggcacaaacgagaagatacaactgagctccttgattgctgcttttcaggtaacgcgagatcttattgtggccgaggcatag

SEQ ID NO: 172227 - DNA, 1023 bp, Artificial Sequence
  derived and/or modified sequence
atggaaacatccgccctcaagcagcaggaacagcctgccgcaacaaaaattcgaaatcttccgtgggtggagaaatatcgaccccagacactcaatgatctgatcagccatcaggatatcctctcaactattcagaagtttatcaatgaagaccggttgccgcatctccttctttatggaccgcctgggactggcaagacgtccaccatacttgcctgcgccaagcagctgtacaaggataaggagttcgggtctatggtccttgaattaaacgcctcagacgaccggggaatcgacatcattcgaggtccgatcttgagtttcgccagcacccggactatcttcaaaaaggggttcaaactagttattctcgatgaggctgatgccatgacccaggatgctcagaacgcactgaggagggtcatagagaagttcacggagaatacgcgcttttgccttatatgcaactatctgtctaagatcatccctgccttgcagagtcggtgcactcggtttcggtttggaccactgacacctgaactaatggtccccagattggagcatgtggtagaggaggagaaagtggacatctccgaggacggcatgaaagctctcgtcaccctgagttccggggacatgcggagggctctaaacatccttcagtcaactaacatggcctttggcaaggttaccgaggaaactgtgtacacttgcacaggccaccccttgaaaagcgacattgccaatattctggattggatgttgaatcaagattttacgactgcctaccggaacattactgagctgaagactttaaaaggtctggctctgcatgacatcctgacggagattcacctcttcgtccatagggtggatttccctagctccgtcaggatacacctgttaaccaagatggccgatattgagtaccggctgagcgtcggcacaaacgagaagattcagttatcttcactgatcgccgcatttcaagttacccgcgatctgatcgtggctgaagcctag

SEQ ID NO: 172228 - DNA, 2229 bp, Artificial Sequence
  derived and/or modified sequence
gagagttgcttttgcgcgcgaactgtaagtgccagggtctcagggtcaggtcgcggctggtcactgtgcaggcgcttgggtgacgcgacgatctcagcggatctggtcaccttcgtctccccgccatggagacctcagcactcaagcagcaggagcagcccgcggcgaccaagatcaggaacctgccctgagacagggtctcgctctgtcgcccatgctggagcgcagtggtgtgatcacagctcagtgtaacctcaaacattggggttcaagccattctcctgcctcagcctccgaagaactgggacttttagagggttgaaaaataccggccacagaccctgaatgatctcatttctcatcaggacattctgagtaccattcagaagtttatcaatgaagaccgactgccacacttgcttctctacggtcccccagggacaggcaagacatctaccatcctagcctgtgcgaaacagctatataaagacaaagaatttggctccatggtcttggagctgaatgcttcagatgaccgaggaatagacatcattcgaggaccgatcctgagctttgctagcacaaggacaatatttaagaaaggctttaagctagtgatcttggatgaagcagacgccatgactcaggacgcccagaatgccttgagaagagtaattgagaaattcacagaaaataccagattctgcctcatctgtaactatctgtcaaagatcatccctgccttgcagtcccgctgcacgaggtttcggttcggtcccctgactcctgaactcatggttccccgcctggaacatgtcgtggaagaagagaaagttgatataagtgaagatggaatgaaagcactagtcactctttccagtggagacatgcgtagggctctgaacattttgcagagcaccaatatggcctttgggaaggtgacagaggagactgtctacacctgcaccgggcacccgctcaagtcagacattgccaacatcctggactggatgttgaatcaagatttcaccacagcctacagaaatattacagagttgaaaactctgaaggggttggcactgcatgatatcctgacagagatacacttgtttgtgcatagagttgactttccatcttcagttcgaatacatttattgaccaaaatggcagacattgagtacaggctttctgttggcaccaacgagaagatccagctgagctccctcattgctgcatttcaagtcaccagagacctgattgttgcagaggcctagatgctctgagggccattcacaattctcagggctcagcagtgatgggagaacagaggacagttccaggataaactgctgcctggggctgtgggatgaatcagtcaccccgaatcttggaaaaacccccttccaggagaggatgggcaggcatttaaaaagtaccatttttgtggttgtttggagcagggatgtacaaaataattttaatgtattaactcatactgcctgtcttttataggggaaaaaaataaccttttttattttaaagttataaggtttttaccttttagttgcttggatgacagggaattagcctaccccattttggtctggaacagaagactttcaaatttaatatggtccaagtgtcttcctactcaaggtaaacattatctccaaaattacatttatgattctaatatttggcattgtgtctgtatctaatttaaacagatgttaatggacgtctggccgaaactattatacttttataagatgagctgaatcctcttactttaaaaactggtctttttatttaccctctgtggtagaagagtcaccagcaggttccaaattgatgtgtatgataggaaaaaaaccttaattttaaatataatatagagccttaaactatgccactgggtggcagaggctgtataaaacgcacttgttttcatgcaggagcggggcaagtaaggttgagcctgactgtaaacctagaactgcggaaggactgggacttttgtacaaatttcacatttattttacagcaatcatgctgcatttgtgttagtgttctttataataaaaaacaaagcagcctcctggctggctgtgttacaagtgactcttccttagacagctagaaagatgctgactttgtcaaacttgcatttatatgaaaaccttctgtctctaatatcacagaataaactttctttagatgctgttcttt

SEQ ID NO: 172229 - DNA, 1655 bp, Artificial Sequence
  derived and/or modified sequence
gcttttgcgcgcgaactgtaagtgccagggtctcagggtcaggtcgcggctggtcactgtgcaggcgcttgggtgacgcgacgatctcagcggatctggtcaccttcgtctccccgccatggagacctcagcactcaagcagcaggagcagcccgcggcgaccaagatcaggaacctgccctgggttgaaaaataccggccacagaccctgaatgatctcatttctcatcaggacattctgagtaccattcagaagtttatcaatgaagaccgactgccacacttgcttctctacggtcccccagggacaggcaagacatctaccatcctagcctgtgcgaaacagctatataaagacaaagaatttggctccatggtcttggagctgaatgcttcagatgaccgaggaatagacatcattcgaggaccgatcctgagctttgctagcacaaggacaatatttaagaaaggctttaagctagtgatcttggatgaagcagacgccatgactcaggacgcccagaatgccttgagaagagtaattgagaaattcacagaaaataccagattctgcctcatctgtaactatctgtcaaagatcatccctgccttgcagtcccgctgcacgaggtttcggttcggtcccctgactcctgaactcatggttccccgcctggaacatgtcgtggaagaagagaaagttgatataagtgaagatggaatgaaagcactagtcactctttccagtggagacatgcgtagggctctgaacattttgcagagcaccaatatggcctttgggaaggtgacagaggagactgtctacacctgcaccgggcacccgctcaagtcagacattgccaacatcctggactggatgttgaatcaagatttcaccacagcctacagaaatattacagagttgaaaactctgaaggggttggcactgcatgatatcctgacagagatacacttgtttgtgcatagagttgactttccatcttcagttcgaatacatttattgaccaaaatggcagacattgagtacaggctttctgttggcaccaacgagaagatccagctgagctccctcattgctgcatttcaagtcaccagagacctgattgttgcagaggcctagatgctctgagggccattcacaattctcagggctcagcagtgatgggagaacagaggacagttccaggataaactgctgcctggggctgtgggatgaatcagtcaccccgaatcttggaaaaacccccttccaggagaggatgggcaggcatttaaaaagtaccatttttgtggttgtttggagcagggatgtacaaaataattttaatgtattaactcatactgcctgtcttttataggggaaaaaaataaccttttttattttaaagttataaggtttttaccttttagttgcttggatgacagggaattagcctaccccattttggtctggaacagaagactttcaaatttaatatggtccaagtgtcttcctactcaaggtaaacattatctccaaaattacatttatgattctaatatttggcattgtgtctgtatctaatttaaacagatgttaatggacgtctggccgaaactattatacttttataagatgagctgaatcctcttac

SEQ ID NO: 172230 - DNA, 1023 bp, Artificial Sequence
  derived and/or modified sequence
atggagaccagcgccctgaagcagcaggagcagcccgccgccaccaagatcagaaacctgccctgggtggagaagtacagaccccagaccctgaacgacctgatcagccaccaggacatcctgagcaccatccagaagttcatcaacgaggacagactgccccacctgctgctgtacggcccccccggcaccggcaagaccagcaccatcctggcctgcgccaagcagctgtacaaggacaaggagttcggcagcatggtgctggagctgaacgccagcgacgacagaggcatcgacatcatcagaggccccatcctgagcttcgccagcaccagaaccatcttcaagaagggcttcaagctggtgatcctggacgaggccgacgccatgacccaggacgcccagaacgccctgagaagagtgatcgagaagttcaccgagaacaccagattctgcctgatctgcaactacctgagcaagatcatccccgccctgcagagcagatgcaccagattcagattcggccccctgacccccgagctgatggtgcccagactggagcacgtggtggaggaggagaaggtggacatcagcgaggacggcatgaaggccctggtgaccctgagcagcggcgacatgagaagagccctgaacatcctgcagagcaccaacatggccttcggcaaggtgaccgaggagaccgtgtacacctgcaccggccaccccctgaagagcgacatcgccaacatcctggactggatgctgaaccaggacttcaccaccgcctacagaaacatcaccgagctgaagaccctgaagggcctggccctgcacgacatcctgaccgagatccacctgttcgtgcacagagtggacttccccagcagcgtgagaatccacctgctgaccaagatggccgacatcgagtacagactgagcgtgggcaccaacgagaagatccagctgagcagcctgatcgccgccttccaggtgaccagagacctgatcgtggccgaggcctag

SEQ ID NO: 172231 - protein, 726 aa, Artificial Sequence
  derived and/or modified sequence
MSTATTVAPAGIPATPGPVNPPPPEVSNPSKPGRKTNQLQYMQNVVVKTLWKHQFAWPFYQPVDAIKLNLPDYHKIIKNPMDMGTIKKRLENNYYWSASECMQDFNTMFTNCYIYNKPTDDIVLMAQALEKIFLQKVAQMPQEEVELLPPAPKGKGRKPAAGAQSAGTQQVAAVSSVSPATPFQSVPPTVSQTPVIAATPVPTITANVTSVPVPPAAAPPPPATPIVPVVPPTPPVVKKKGVKRKADTTTPTTSAITASRSESPPPLSDPKQAKVVARRESGGRPIKPPKKDLEDGEVPQHAGKKGKLSEHLRYCDSILREMLSKKHAAYAWPFYKPVDAEALELHDYHDIIKHPMDLSTVKRKMDGREYPDAQGFAADVRLMFSNCYKYNPPDHEVVAMARKLQDVFEMRFAKMPDEPVEAPALPAPAAPMVSKGAESSRSSEESSSDSGSSDSEEERATRLAELQEQLKAVHEQLAALSQAPVNKPKKKKEKKEKEKKKKDKEKEKEKHKVKAEEEKKAKVAPPAKQAQQKKAPAKKANSTTTAGRQLKKGGKQASASYDSEEEEEGLPMSYDEKRQLSLDINRLPGEKLGRVVHIIQSREPSLRDSNPDEIEIDFETLKPTTLRELERYVKSCLQKKQRKPFSASGKKQAAKSKEELAQEKKKELEKRLQDVSGQLSSSKKPARKEKPGSAPSGGPSRLSSSSSSESGSSSSSGSSSDSSDSE

SEQ ID NO: 172232 - protein, 74 aa, Artificial Sequence
  derived and/or modified sequence
MSTATTVAPAGIPATPGPVNPPPPEVSNPSKPGRKTNQLQYMQNVVVKTLWKHQFAWPFYQPVDAIKLNLPDYH

SEQ ID NO: 172233 - protein, 405 aa, Artificial Sequence
  derived and/or modified sequence
MLSKKHAAYAWPFYKPVDAEALELHDYHDIIKHPMDLSTVKRKMDGREYPDAQGFAADVRLMFSNCYKYNPPDHEVVAMARKLQDVFEMRFAKMPDEPVEAPALPAPAAPMVSKGAESSRSSEESSSDSGSSDSEEERATRLAELQEQLKAVHEQLAALSQAPVNKPKKKKEKKEKEKKKKDKEKEKEKHKVKAEEEKKAKVAPPAKQAQQKKAPAKKANSTTTAGRQLKKGGKQASASYDSEEEEEGLPMSYDEKRQLSLDINRLPGEKLGRVVHIIQSREPSLRDSNPDEIEIDFETLKPTTLRELERYVKSCLQKKQRKPFSASGKKQAAKSKEELAQEKKKELEKRLQDVSGQLSSSKKPARKEKPGSAPSGGPSRLSSSSSSESGSSSSSGSSSDSSDSE

SEQ ID NO: 172234 - DNA, 5673 bp, Artificial Sequence
  derived and/or modified sequence
tgccggggccggcgagccaaagaggagccggccgcgcgggccgggaggggacggccgccggagccgcgaggccaactgtcgcctggttgggcccggaaatgggacgtcgcgctttctcagggagcgtagaagcagccagggcctctccaagccgctgctgtgacagaaagtgagtgagctgccggaggatgtccaccgccacgacagtcgcccccgcggggatcccggcgaccccgggccctgtgaacccaccccccccggaggtctccaaccccagcaagcccggccgcaagaccaaccagctgcagtacatgcagaatgtggtggtgaagacgctctggaaacaccagttcgcctggcccttctaccagcccgtggacgcaatcaaattgaacctgccggattatcataaaataattaaaaacccaatggatatggggactattaagaagagactagaaaataattattattggagtgcaagcgaatgtatgcaggacttcaacaccatgtttacaaattgttacatttataacaagcccacagatgacatagtgctaatggcccaagctttagagaaaatttttctacaaaaagtggcccagatgccccaagaggaagttgaattattaccccctgctccaaagggcaaaggtcggaagccggctgcgggagcccagagcgcaggtacacagcaagtggcggccgtgtcctctgtctccccagcgaccccctttcagagcgtgccccccaccgtctcccagacgcccgtcatcgctgccacccctgtaccaaccatcactgcaaacgtcacgtcggtcccagtccccccagctgccgccccacctcctcctgccacacccatcgtccccgtggtccctcctacgccgcctgtcgtcaagaaaaagggcgtgaagcggaaagcagacacaaccactcccacgacgtcggccatcactgccagccggagtgagtcgcccccgccgttgtcagaccccaagcaggccaaagtggtggcccggcgggagagtggtggccgccccatcaagcctcccaagaaggacctggaggacggcgaggtgccccagcacgcaggcaagaagggcaagctgtcggagcacctacgctactgcgacagcatcctcagggagatgctatccaagaagcacgcggcctacgcctggcccttctacaagccagtggatgccgaggccctggagctgcacgactaccacgacatcatcaagcacccgatggacctcagcaccgtgaaaaggaagatggatggccgagagtacccagacgcacagggctttgctgctgatgtccggctgatgttctcgaattgctacaaatacaatcccccagaccacgaggttgtggccatggcccggaagctccaggacgtgtttgagatgaggtttgccaagatgccagatgagcccgtggaggcaccggcgctgcctgcccccgcggcccccatggtgagcaagggcgctgagagcagccgtagcagtgaggagagctcttcggactcaggcagctcggactcggaggaggagcgggccaccaggctggcggagctgcaggagcagctgaaggccgtgcacgagcagctggccgccctgtctcaggccccagtaaacaaaccaaagaagaagaaggagaagaaggagaaggagaagaagaagaaggacaaggagaaggagaaggagaagcacaaagtgaaggccgaggaagagaagaaggccaaggtggctccgcctgccaagcaggctcagcagaagaaggctcctgccaagaaggccaacagcacgaccacggccggcagacagctgaagaaaggcggcaagcaggcatctgcctcctacgactcagaggaagaggaggagggcctgcccatgagctacgatgaaaagcgccagcttagcctggacatcaaccggctgcccggggagaagctgggccgggtagtgcacatcatccaatctcgggagccctcgctcagggactccaaccccgacgagatagaaattgactttgagactctgaaacccaccactttgcgggaactggagagatatgtcaagtcttgtttacagaaaaagcaaaggaaaccgttctcagcaagcgggaagaaacaggcagccaagtcgaaagaggagctagctcaggaaaagaagaaggagctggaaaagcgtctgcaggatgtcagcgggcagctgagcagcagcaagaagcccgcccggaaagagaagcccggctcagcaccctcagggggcccgtccaggctcagcagcagcagctcctccgagtctgggagcagcagctccagcgggtccagctctgacagcagtgactcagaatgaactggcttcggacagaacaggacagatggatgtcgcacacgccgagactctgccgtacccctctgtggttcatattactacttctgttccatggtgtgcaggtctgcttcttaattcagtgttatgatatcttccagtttttgctttcataggtcagagatctatcttgtgtgtgcgttagacttgatgagaaggtgtgaactctgcagaaagtctcttcttcatcactgaattcagtcacttggagatgacaacttcaaatgctaacccgatgaccccagaaaaccgtgtgagattcgtaccgaagaaccttgtggaatccctttgcttaggcccaacctggtcgatagctcgagaaagaattttttccaaggaaatgtctcggatatgggtactgtatttgaaagctgttagctttgtcaacacgcattgtccttgtcatttgggccccgagctctgaccctcgtgtctgacgcggccacctctttctggaggggctgaggacagatgtgcctgcttgtggagaccaggctgggcctaagcgaagggtcatcgcagccccagcccggagcgtggagcccttggggggtggtcgggtgggatgtgcgttctccgctcgtggtgatgtcaggagctcctcggagggaacagagcggctgtgtatgcagcctgcaggtttccatacactgaagcttttacctcaactttaaaaaaaaaaaaagaagaaaagatttaaaaaaaaaaaaaaaggagactttttttgtaaggttcggcaattttctacggaagtccagcccgctgtgagtccccgcctggctagcgctgcccctgctgctgctgccgcgccacccttgggaaccacttcccgagcttatgtgtatataaatagttatttattaacatcattggtcatttttaaaaaaaagaaaataagaaaaaaccgcagaagaaatgcattcacacagtcgcagagatgcaggccttgccagtggtgtgccgggcgcgggtcctgtctggcggcggcctgtcgtctccaggtgctaactcctgccaccgcgcggtgctcacccacgtctgttcgcgcgctcgcccctgggtttgttgggttttttggtttttttctttgtggtttttttttttttttttttttgtatgaaacttggaggcttacaggtatagacagctttcagctacagcacattctaattttttattttgtttagttcttttgtattcacttctggtctctttaagactgttttaaaagaaatcaatttagggaaccccagttatataatataaactttgtaatctgagagaaaaaatgtatagtaaatctaagtcttgatttttaactttctattgtaaaaaataataatatacagagtttaatagaaggtgatgttttggttttgttttcccagaggctgccatatggtctttgagtacggggatgtcccaaactggcccaccaatgagcatggcggctccggccaggaatgccagagttagcctcccaggcttgcgggtggacatgcctgctccctgccagcctccagtggcctggccaggccctcccgagcctgtctgccctccccaggggtggaggagtctctgggccccaggaggattccctcccggagactcgcacggtgctccctgctcacgcgttgtcacagttagtccggaaatgactgaaaccaggcattctcccggacctcagcgtgggggagcctccaggcagacgctgggtatggagctgtggtgtggtctgtcctgtatggtggccagtgctttctgccagcatttctggatggatatagggactatcattagtatcctaatacacggtgattttaaaacaaccataaaattgattcagagtccactgacccttacagatgtaggtatacccttactggagagggaactctgatgaggagatgctggtaaattatcattttttaaattgctggtgagtctgacacttggtgagttttcagccagtttgttaaacttttaattaagttttgtttataataaaaatataaatggatttgaaagtttccattttttaaagttaccctcgttttcaaaggtattttctaaacagatctttaatggactatttaaaccgaatttaaggaattcacacacgacagttgacaggtcttcacgcaggctggttggtaacgtgctgccagcacagggctgggtgatacgtacaccctaagccgggggtgcctggggctggggggcgctccttgcaatgcccctccagccacagggcagtgaggtgctgcctgtgtgagccgtcgggggagcggccggctgtgggggcagcgcagcaggagcatcgtggggcctttccttctcggctggttctctgtgacggtggcgtcggctcgcctctgctcctttcatctagaaagaagccactgaccctgacagcccacggcgggtacactgagcagctgcattggtgctgtcacttttttaaggctttctgtccagacttcaacactggtttcttttcagagtttcgaaggattaatgacttcctcagcgcccttgctggcgggctgagggtgacagtcacgtccgtttcttctgtattagaaggctgcggtgattcaattagattgtcccactgctgagacctgtagggcagcttctaacatgcttttttcaaggggagaggagtagtgacaagtcgtgtgtcggaattggatttgagaacactctgaatgacccctggaggccgagggggcaggcttcgggcgtgaactgaactccagacccctctttgtgttgggcagtgtcatcttgcttacaaactgtaagacacatttttttgtgtgtttgtttttgttgttgttcttttgcagcactcacgcctctgacagtcttttgggaaagagtaacacccacatacagaatttgtcacatccagagtagcactgttccttaatactggcataatgcttccaggaagtttttcttttttatatttaaaatgttacttttctgtatgatgtgcatgcaagtttaccgtaacttttcttaaactttttagtgccgtttctagtatattcctgtaaatgtcagttactgaaaatgagtccaatgtaagtagtttagcttgtttattgcaatgctggcctcaacacaacagaataaaaatggtagaaagtactctttgatgtttctggtaatcatggacccttctcctggggcatttgttttgttttcataataaaaagcaaaaaaaaaaaaaaaaaaaaaaaaaaaaaaaaaaaaaaaa

SEQ ID NO: 172235 - DNA, 2181 bp, Artificial Sequence
  derived and/or modified sequence
atgtccactgctacgacagtggctcctgctggcatccctgccacccccggccctgtgaacccccctccgccagaggtaagcaaccccagcaaacctggtagaaagactaaccagcttcagtatatgcaaaacgttgtcgtcaagactctctggaaacaccaatttgcttggccattctatcagccagttgacgccatcaaactcaacctccctgattaccacaagatcattaagaaccccatggacatggggactattaaaaaaagactggaaaacaactattactggtccgctagcgagtgcatgcaagattttaacaccatgttcacgaattgctatatttacaataagcccaccgacgacattgttctcatggcccaggccctggaaaagatcttcctccaaaaggttgcccagatgccccaagaggaggtggaactattgccacctgcacccaaaggcaagggccggaaaccagcagcaggtgcacagtctgcaggcacccagcaagtggctgcagttagctcagtatcccctgctacccctttccagtcggtgcccccaaccgtgagtcagacgcccgttattgccgcaacacctgtgccaaccattactgccaatgtcacttccgtccctgtcccgcccgctgccgcgccgccccctcccgcaacccccatagtgcctgtggtgcccccgacccctccggtggttaagaagaagggagttaaacgaaaggcagacacaacaacccccaccacctccgccatcacggcttcccgaagtgaaagtccgcctcctctgtccgaccccaagcaggctaaggttgtggcccggagggagtcgggaggacgcccaataaaaccccctaaaaaagacctcgaggacggagaggtgccccagcacgccgggaagaaaggcaagctgagtgagcacctacgatattgtgattccatattgcgagagatgctctcaaaaaagcatgcagcgtatgcttggcctttttacaaacccgttgatgccgaagcattggagctccacgactatcacgatattataaagcatcctatggacctgagtacggtgaagagaaagatggacggaagggaatacccagacgcccaggggtttgctgcagacgtgagattaatgttttctaactgttataagtataaccctccagaccacgaggtggtggccatggcccggaaacttcaggacgtgttcgagatgaggttcgctaaaatgccagacgagcccgtggaagcacctgcactccccgctcccgcagcgccaatggtcagtaaaggcgctgagtcttcacgctcgtcggaagagagcagctccgattccggcagctccgactctgaggaggagcgggcgaccagactcgccgagctgcaagaacagcttaaggcggtacatgagcagctggccgcgctgtctcaagcaccagtgaacaaacccaaaaagaagaaagagaaaaaggagaaggaaaagaaaaagaaggacaaggagaaagagaaagagaagcacaaggtcaaagctgaagaagagaagaaagcgaaagtcgctcccccagccaagcaagctcagcaaaaaaaggcacccgccaaaaaggcaaatagcaccaccactgcaggccgacagctgaagaagggaggaaaacaggctagtgccagctacgatagcgaggaggaagaagagggcctgccaatgtcatatgacgagaagaggcagctgagtctggatataaacaggctgcctggcgagaaactgggtcgagtggtgcatatcatacagtcccgcgaaccttccttacgagacagcaatcccgacgaaattgagattgatttcgagacattgaagcccacaacactgcgagagctggagcgctatgtcaagagctgccttcagaagaaacaaaggaaaccattctctgcgtctggaaagaaacaggccgctaagagcaaggaggagctggcccaggagaaaaagaaagaactcgagaagcggctgcaggacgtgtcgggtcaactgtcctcctcaaaaaagccagcgcgcaaggagaaacctggaagcgccccgtccggaggtccctctcggctgagtagcagctcttcctccgagtctggaagcagctcttcctccgggagctcctccgacagttccgattctgaatag

SEQ ID NO: 172236 - DNA, 63 bp, Artificial Sequence
  derived and/or modified sequence
atgagtactgccaccacagtggctccagccgggattccagctacccccggcccggtgaattag

SEQ ID NO: 172237 - DNA, 1218 bp, Artificial Sequence
  derived and/or modified sequence
atgctgagtaaaaagcacgcggcttatgcatggcctttctacaagccagttgatgcagaagcccttgagctgcatgactaccacgacataatcaaacaccctatggacttaagtaccgtgaaaaggaagatggatggaagagagtatcctgacgcacagggcttcgctgccgatgtgcggcttatgttcagcaattgttacaaatataacccgccagaccatgaggtcgtggctatggcccgcaaattacaagatgtctttgagatgcgtttcgccaagatgccagacgaacccgtggaggctccggctcttcccgcacctgctgcccctatggtgagcaaaggagccgaatcctcgcgatcctccgaagagagctctagtgattctggttcctctgactctgaggaggaacgcgcgactaggctggctgagctgcaggagcagctgaaggcagtgcacgagcaactggccgcactgtctcaggcacccgtgaacaaacctaaaaagaagaaggagaagaaggaaaaagagaaaaaaaaaaaggataaagaaaaggaaaaggaaaagcacaaggtgaaagcggaagaggaaaagaaggctaaggttgcaccccccgccaaacaggcacagcagaagaaggcaccagccaaaaaagctaactcaaccaccaccgccggccggcaactaaagaagggcggcaaacaggcttctgccagctatgacagtgaagaggaggaagaaggattaccaatgagttacgatgaaaaaagacagctgagtctcgacatcaataggctacctggagagaaacttgggagggtggtgcatatcatccagagccgtgaaccttctcttcgggatagtaatcccgacgaaatagagattgattttgagactctcaagcccaccacactccgagaattagaaaggtacgtaaaaagctgtttgcaaaagaagcagcgcaagccctttagcgcctctggtaagaagcaggcggccaagagcaaggaagaattggctcaggagaagaagaaggagcttgagaagcgcctccaagatgtctctggccaactgtctagttcaaaaaagccggcccggaaagagaagcctgggtctgccccctcagggggccccagtcgcctgtcttcttccagcagcagtgagtccggctcctcatcttcttcgggatcgagcagcgactctagcgattccgaatag

SEQ ID NO: 172238 - DNA, 2181 bp, Artificial Sequence
  derived and/or modified sequence
atgagcacagccaccaccgtggccccagctggcatcccagccaccccaggccctgtgaaccccccacctcctgaggtgagcaaccccagcaagccaggcaggaagaccaaccagctgcagtacatgcagaatgtggtggtgaagaccctgtggaagcaccagtttgcctggcccttctaccagcctgtggatgccatcaagctgaacctgcctgactaccacaagatcatcaagaaccccatggacatgggcaccatcaagaagaggctggagaacaactactactggagcgccagcgagtgcatgcaggacttcaacaccatgttcaccaactgctacatctacaacaagcccacagatgacatcgtgctgatggcccaggccctggagaagatcttcctgcagaaggtggcccagatgccccaggaggaggtggagctgctgcccccagcccccaagggcaaaggaaggaagccagctgctggggcccagagcgctggcacccagcaggtggccgctgtgtcctctgtgtccccagccacccccttccagagcgtgcccccaacagtgtcccagacccctgtgattgctgccacccctgtgcccaccatcacagccaacgtgacctctgtgcctgtgcccccagctgctgcccctcctcctccagccacccccatcgtgcctgtggtgccccccaccccacctgtggtgaagaagaagggcgtgaagaggaaggctgacaccaccacccccaccaccagcgccatcacagccagccgctctgagagccccccacccctgagtgaccccaagcaggccaaggtggtggcccggcgggagagcggcggccggcccatcaagccacccaagaaggacctggaggatggagaggtgccccagcacgccggcaagaagggcaagctgtctgagcacctgcgctactgtgacagcatcctgcgggagatgctgagcaagaagcacgccgcctatgcctggcccttctacaagcctgtggatgctgaggccctggagctgcatgactaccatgacatcatcaagcaccccatggacctgagcacagtgaagaggaagatggatggccgggagtacccagatgcccagggctttgctgctgatgtgcggctgatgttcagcaactgctacaagtacaaccccccagaccacgaggtggtggccatggccaggaagctgcaggatgtgtttgagatgagatttgccaagatgccagatgagcctgtggaggccccagccctgcctgccccagctgcccccatggtgtccaaaggagctgagagcagccgcagcagcgaggagagcagcagtgacagcggcagcagtgacagcgaggaggagcgggccacccggctggccgagctgcaggagcagctgaaggctgtgcatgagcagctggccgccctgagccaggcccctgtgaacaagcccaagaagaagaaggagaagaaggagaaggagaagaagaagaaggacaaggagaaggagaaggagaagcacaaggtgaaggccgaggaggagaagaaggccaaggtggcccccccagccaagcaggcccagcagaagaaggccccagccaagaaggccaacagcaccaccacagctggccggcagctgaagaagggcggcaagcaggccagcgccagctatgattctgaggaggaggaggagggcctgcccatgtcctatgatgagaagaggcagctgagcctggacatcaaccggctgcccggggagaagctgggccgggtggtgcacatcatccagagccgggagcccagcctgcgggacagcaacccagatgaaattgaaattgactttgagaccctgaagcccaccaccctgcgggagctggagcgctacgtgaagagctgcctgcagaagaagcagaggaagcccttcagcgccagcggcaagaagcaggccgccaagagcaaggaggagctggcccaggagaagaagaaggagctggagaagaggctgcaggatgtgtctggccagctgagcagcagcaagaagccagccaggaaggagaagccaggcagcgcccccagcggcggccccagccggctgagcagcagcagcagcagcgagagcggcagcagcagcagcagcggcagcagcagtgacagcagtgacagcgagtag

SEQ ID NO: 172239 - DNA, 63 bp, Artificial Sequence
  derived and/or modified sequence
atgagcacagccaccaccgtggccccagctggcatcccagccaccccaggccctgtgaactag

SEQ ID NO: 172240 - DNA, 1218 bp, Artificial Sequence
  derived and/or modified sequence
atgctgagcaagaagcatgctgcctatgcctggcccttctacaagcctgtggatgctgaggccctggagctgcatgactaccatgacatcatcaagcaccccatggacctgagcacagtgaagaggaagatggatggccgggagtacccagatgcccagggctttgctgctgatgtgcggctgatgttcagcaactgctacaagtacaaccccccagaccacgaggtggtggccatggccaggaagctgcaggatgtgtttgagatgagatttgccaagatgccagatgagcctgtggaggccccagccctgcctgccccagctgcccccatggtgtccaaaggagctgagagcagccgcagcagcgaggagagcagcagtgacagcggcagcagtgacagcgaggaggagcgggccacccggctggccgagctgcaggagcagctgaaggctgtgcatgagcagctggccgccctgagccaggcccctgtgaacaagcccaagaagaagaaggagaagaaggagaaggagaagaagaagaaggacaaggagaaggagaaggagaagcacaaggtgaaggccgaggaggagaagaaggccaaggtggcccccccagccaagcaggcccagcagaagaaggccccagccaagaaggccaacagcaccaccacagctggccggcagctgaagaagggcggcaagcaggccagcgccagctatgacagcgaggaggaggaggagggcctgcccatgtcctatgatgagaagaggcagctgagcctggacatcaaccggctgcctggagagaagctgggccgggtggtgcacatcatccagagccgggagcccagcctgcgggacagcaacccagatgaaattgaaattgactttgagaccctgaagcccaccaccctgcgggagctggagagatatgtgaagagctgcctgcagaagaagcagaggaagcccttcagcgccagcggcaagaagcaggccgccaagagcaaggaggagctggcccaggagaagaagaaggagctggagaagaggctgcaggatgtgtctggccagctgagcagcagcaagaagccagccaggaaggagaagccaggcagcgcccccagcggcggccccagccggctgagcagcagcagcagcagcgagagcggcagcagcagcagcagcggcagcagcagtgacagcagtgacagcgagtag

SEQ ID NO: 172241 - DNA, 2181 bp, Artificial Sequence
  derived and/or modified sequence
atgagcaccgccaccaccgtggcccccgccggcatccccgccaccccgggcccagttaatccacctccaccagaggtttctaatccaagcaaacccggtcgaaagaccaaccagttacagtacatgcagaacgttgtagtgaagaccctctggaaacaccaattcgcttggccgttctaccagcctgtagatgcgattaaattgaatcttccagactatcacaagatcataaagaatcctatggacatgggcactattaaaaagcgactggagaacaattattattggtccgcatctgagtgtatgcaagatttcaacactatgtttaccaactgttacatctataataagcccactgacgatatcgtgttgatggcacaggctctcgagaagatttttctgcagaaagtagcccagatgccccaggaggaggtggaactcctgcccccagctccgaaaggcaaaggaaggaagcccgcagctggcgctcaatcagcaggcacacagcaagtggctgctgtaagctctgtgtctccagcaacaccttttcagtctgtgcctcccacagtatcacagaccccagtgattgccgccactccggttcccacgattactgccaacgttactagcgtgccggtaccacctgctgcagcccctcctccacctgcaacaccgatcgtcccggtggtgccaccaacaccccctgtggtgaaaaagaagggcgtgaagcgcaaggctgacacaaccactccaacaacatccgcgatcacagctagcagatcggaaagcccgccaccactcagcgacccgaaacaagccaaggttgtggctaggcgagagagcgggggccggcctattaaacctccgaaaaaggacctggaagacggcgaagtaccccagcacgctgggaaaaagggcaagctaagtgagcacctcagatactgtgactcaattctcagggagatgctgagcaaaaaacacgccgcatatgcctggcccttttacaagcccgtggacgcagaggccctggagttgcatgattatcacgatattatcaaacatcccatggacttatccaccgttaagagaaagatggacggccgcgaataccctgatgcccagggatttgccgccgatgtaaggctcatgttctctaattgttacaagtataacccacccgaccacgaggtcgtggcgatggcgagaaagttacaagacgtctttgagatgcggtttgccaagatgccagacgaacctgtagaagcaccagcactcccagcacccgccgcccccatggtgagcaaaggggctgagagctcgagaagctcagaagagtcctcgtccgattctggttcctccgacagtgaggaggagcgggcaacaaggctcgctgaattgcaggagcaactaaaagcagtgcacgagcagctcgcggcactttctcaagcccccgtcaataaacccaagaaaaagaaggagaaaaaagaaaaggaaaaaaagaagaaggataaagaaaaggagaaggagaaacacaaggtaaaggccgaagaagaaaaaaaggccaaggtggccccaccagctaagcaggcccagcagaagaaagcaccggcgaagaaggctaatagtaccaccactgccgggagacaattgaaaaagggaggcaaacaggcttctgcatcttacgactctgaagaggaggaggagggtttgcctatgtcctatgacgagaagagacaattatctttagacataaaccgactgcccggagagaaactgggcagggtggtgcatatcatccagtctagggaaccttctttacgagactctaaccctgacgagatcgagatcgattttgagacattaaagcctacaacattacgggagttggaaagatacgtgaagtcatgtctgcagaagaaacagcgaaaaccattctctgctagcgggaagaagcaagccgctaaatctaaggaagagctcgcccaagaaaaaaagaaggaactcgagaagcgccttcaggacgtgtcgggccaactttctagctcaaagaaacccgctcggaaagaaaagcccggctcagcaccatcaggaggtccttccaggcttagctcgagtagctcttcagagtcgggctctagtagctccagtggctccagtagcgacagctctgatagcgagtag

SEQ ID NO: 172242 - DNA, 63 bp, Artificial Sequence
  derived and/or modified sequence
atgagcaccgccaccaccgtggcccccgccggcatccccgccacccctgggcctgttaactag

SEQ ID NO: 172243 - DNA, 1218 bp, Artificial Sequence
  derived and/or modified sequence
atgctgagcaagaagcacgccgcctacgcctggcccttctacaagcccgtcgacgccgaggccctggagttacacgactatcacgacatcataaaacacccaatggatctaagtaccgttaagagaaagatggatgggagagagtatccagatgcacaaggtttcgctgcggacgttcggctaatgttttcaaactgttataagtataatccacctgaccatgaggtggttgcaatggcgaggaaattacaggacgttttcgagatgcgcttcgcaaagatgccagacgaacccgtggaagccccagctcttccagcccctgcggcccccatggtgtccaagggggcggagagctcccgctctagcgaggaaagcagctctgacagtggctcctcagacagcgaagaggagcgggcgacacggctggcagaactgcaggaacagttgaaagcagttcacgagcagctggctgctttgtcccaagcaccagtaaataagcctaagaagaaaaaggaaaaaaaagagaaagagaagaagaagaaagacaaggagaaggagaaggagaaacacaaggtgaaagccgaagaagagaagaaggccaaggtggctccccccgctaaacaggctcaacagaaaaaggcccccgcgaagaaggccaactctactaccaccgccggtaggcagctaaagaaaggtgggaaacaggcctcggcgtcttatgatagcgaggaagaggaagaagggctcccaatgtcctatgatgaaaagcgacagctgtcacttgacataaaccgcctacccggggagaagttagggcgcgtggtgcacattatccaatctcgggagccctctctcagagacagcaacccggacgagattgagattgactttgagaccctaaaacccacaaccctgcgggaactagagcggtacgttaagagctgcctgcagaagaagcagagaaagccattcagtgcatccggaaaaaaacaggctgcaaagtccaaagaggagcttgcccaggagaaaaaaaaggagcttgagaaacgcctccaggatgtctccggacagctgagcagctccaaaaaacccgccagaaaagagaaaccgggctcagcacccagcggtggtccctcaagactgagcagcagcagctccagtgaatctggctcttcctccagctctggatcatcttctgactcctctgattccgagtag

SEQ ID NO: 172244 - DNA, 2181 bp, Artificial Sequence
  derived and/or modified sequence
atgtctactgccactaccgtagcccctgcgggtattcctgctacacccggacctgtgaatccaccccctccagaggtgtctaacccttcaaagcccggacgtaagacaaatcaactccagtatatgcagaacgtggtcgttaaaacactgtggaagcaccagttcgcctggcccttctaccagccagtggatgctataaagttgaacctccccgactatcacaagataatcaaaaaccctatggatatgggtacgataaagaagagactcgaaaataattactattggtctgcatccgaatgcatgcaggacttcaatactatgttcacaaactgctatatatacaacaagcctacagatgacattgtcctgatggcccaggcactcgaaaagatcttcctccagaaggtagcgcagatgccgcaagaggaagttgaactgctaccccctgcaccaaagggcaaaggacgcaagcctgctgccggagcccagagtgctggcacccaacaggtggcggcagtgtcatcagtgagcccagccacgccgttccagtctgtaccgccaaccgtgtcacaaactcccgtgattgctgcaacacccgtcccaacaattacggctaacgtcactagcgtgccagtgccacctgccgcagcccctccacccccagcaaccccaattgtgcctgtcgtgcctccgactcctcccgttgtgaagaagaagggcgtgaaacgcaaagctgatacgactactcccaccacatcagcaatcactgcaagcagaagcgagtctcctccacccctctccgatcctaagcaggccaaggtggtggccagacgggaatccggaggcagaccaattaaaccccctaagaaagacttggaggatggagaggtacctcagcacgcaggaaaaaaaggcaagttgtcagagcacctgaggtattgcgactctatactcagggaaatgctttctaaaaaacatgctgcatatgcatggccattctacaaacccgttgacgcagaagctctagaactacatgactatcacgatatcatcaagcacccaatggacctgtccaccgtcaagaggaagatggatgggagggaatacccagatgcgcaggggtttgctgcagatgtgaggctgatgttcagcaactgctataaatataacccacctgatcacgaggtggttgctatggcccgaaagctgcaggacgtgttcgaaatgaggtttgcaaagatgcccgacgagccggtcgaagcgcctgctttgccagccccagccgcacctatggtgtctaagggcgctgaaagttccagaagttcggaagaatccagctcagacagcggctcatcagactctgaagaagagagggcaactagacttgccgagcttcaagaacagctgaaagcagtgcacgagcagcttgcagccctgtcccaggctccggtcaataagcccaagaagaagaaagaaaagaaagagaaggaaaagaaaaagaaagataaggagaaggaaaaggaaaaacataaggtgaaagccgaggaggagaagaaggccaaggttgcccctcctgccaagcaagcccaacagaagaaggctcccgcaaaaaaggctaactctaccactacagcgggaagacagctgaaaaaggggggtaaacaggcctccgcatcctacgatagcgaagaagaggaagagggcctgcccatgagttacgacgagaaacgccagttgagcctggatataaaccgactccctggtgagaaactgggaagggtggtccacattatacaatcccgggagccaagcctgagggacagcaacccggacgagatagaaatcgattttgaaacgctgaaacccacgacgctgcgggagttagagagatacgtgaagtcctgccttcagaaaaaacaacggaagccattctcagcatcgggtaaaaagcaggcagctaaatccaaagaggaactggctcaggagaaaaagaaggagctggagaaacgtcttcaagatgtgagcggccagctctcctcttctaaaaagcctgccagaaaagagaagccaggctcagcacctagcggagggccatcacggctgagctcaagcagttcatctgaatcaggttcttccagttcatcgggatcgagtagcgactcatcggacagcgaatag

SEQ ID NO: 172245 - DNA, 63 bp, Artificial Sequence
  derived and/or modified sequence
atgtcaacagctactactgtggccccagctggcattccagcaacaccaggccctgtcaattag

SEQ ID NO: 172246 - DNA, 1218 bp, Artificial Sequence
  derived and/or modified sequence
atgttatccaagaaacatgccgcatatgcgtggcccttctataaaccagtggatgctgaagccctagaactccacgactaccacgacatcatcaagcacccaatggacctaagtaccgtcaagagaaagatggacggcagagagtaccccgatgcgcagggattcgcagcagatgttaggctgatgtttagcaactgttacaaatataatccacctgaccatgaggtcgtggccatggcaaggaagttgcaggatgtgttcgaaatgcgatttgccaagatgcctgacgaaccagttgaagcacctgcccttcccgcacctgccgctccaatggtttccaaaggagctgagagctctagaagcagcgaagagagctccagcgattctggttcctcagactcggaagaggaaagggccacccgtctagctgagcttcaggagcagctcaaggccgtgcacgagcaactcgcggctttgagtcaagcacctgtaaataaacctaaaaaaaagaaggaaaagaaagagaaggagaaaaaaaagaaggataaggagaaagagaaggagaaacataaagtaaaagcagaggaagagaaaaaggcaaaggtcgcacctcccgctaagcaggctcagcagaagaaggcaccagcaaagaaggccaattctaccacaactgctggaaggcagcttaaaaaaggtggaaaacaagcatctgcctcctacgactccgaagaggaggaggaggggttgcccatgtcctatgacgaaaaacgtcaactgtctcttgatataaatcggctgccaggagagaagctggggagggtggtccatatcatccagtccagggagccctctcttcgggattccaaccctgacgagatcgaaatcgactttgaaaccctgaagccaacgacgctcagagaacttgaacggtatgtgaagagctgtctccagaagaaacagcgcaaacctttcagcgccagtggtaaaaagcaggcagcaaaatctaaagaagaattggctcaagagaagaagaaagagctggagaaacgcctgcaagacgtaagtggccagttaagttcatccaagaagcctgcgagaaaggagaagcccggttcggcaccgtctggcggaccatcaaggctttcgagctcaagcagcagcgaaagcggctcatcatccagctcgggttctagcagcgactcgtcggacagcgagtag

SEQ ID NO: 172247 - DNA, 3116 bp, Artificial Sequence
  derived and/or modified sequence
ccggggccggcgagccaaagaggagccggccgcgcgggccgggaggggacggccgccggagccgcgaggccaactgtcgcctggttgggcccggaaatgggacgtcgcgctttctcagggagcgtagaagcagccagggcctctccaagccgctgctgtgacagaaagtgagtgagctgccggaggatgtccaccgccacgacagtcgcccccgcggggatcccggcgaccccgggccctgtgaacccaccccccccggaggtctccaaccccagcaagcccggccgcaagaccaaccagctgcagtacatgcagaatgtggtggtgaagacgctctggaaacaccagttcgcctggcccttctaccagcccgtggacgcaatcaaattgaacctgccggattatcataaaataattaaaaacccaatggatatggggactattaagaagagactagaaaataattattattggagtgcaagcgaatgtatgcaggacttcaacaccatgtttacaaattgttacatttataacaagcccacagatgacatagtgctaatggcccaagctttagagaaaatttttctacaaaaagtggcccagatgccccaagaggaagttgaattattaccccctgctccaaagggcaaaggtcggaagccggctgcgggagcccagagcgcaggtacacagcaagtggcggccgtgtcctctgtctccccagcgaccccctttcagagcgtgccccccaccgtctcccagacgcccgtcatcgctgccacccctgtaccaaccatcactgcaaacgtcacgtcggtcccagtccccccagctgccgccccacctcctcctgccacacccatcgtccccgtggtccctcctacgccgcctgtcgtcaagaaaaagggcgtgaagcggaaagcagacacaaccactcccacgacgtcggccatcactgccagccggagtgagtcgcccccgccgttgtcagaccccaagcaggccaaagtggtggcccggcgggagagtggtggccgccccatcaagcctcccaagaaggacctggaggacggcgaggtgccccagcacgcaggcaagaagggcaagctgtcggagcacctacgctactgcgacagcatcctcagggagatgctatccaagaagcacgcggcctacgcctggcccttctacaagccagtggatgccgaggccctggagctgcacgactaccacgacatcatcaagcacccgatggacctcagcaccgtgaaaaggaagatggatggccgagagtacccagacgcacagggctttgctgctgatgtccggctgatgttctcgaattgctacaaatacaatcccccagaccacgaggttgtggccatggcccggaagctccaggacgtgtttgagatgaggtttgccaagatgccagatgagcccgtggaggcaccggcgctgcctgcccccgcggcccccatggtgagcaagggcgctgagagcagccgtagcagtgaggagagctcttcggactcaggcagctcggactcggaggaggagcgggccaccaggctggcggagctgcaggagcagctgaaggccgtgcacgagcagctggccgccctgtctcaggccccagtaaacaaaccaaagaagaagaaggagaagaaggagaaggagaagaagaagaaggacaaggagaaggagaaggagaagcacaaagtgaaggccgaggaagagaagaaggccaaggtggctccgcctgccaagcaggctcagcagaagaaggctcctgccaagaaggccaacagcacgaccacggccggcagacagctgaagaaaggcggcaagcaggcatctgcctcctacgactcagaggaagaggaggagggcctgcccatgagctacgatgaaaagcgccagcttagcctggacatcaaccggctgcccggggagaagctgggccgggtagtgcacatcatccaatctcgggagccctcgctcagggactccaaccccgacgagatagaaattgactttgagactctgaaacccaccactttgcgggaactggagagatatgtcaagtcttgtttacagaaaaagcaaaggaaaccgttctcagcaagcgggaagaaacaggcagccaagtcgaaagaggagctagctcaggaaaagaagaaggagctggaaaagcgtctgcaggatgtcagcgggcagctgagcagcagcaagaagcccgcccggaaagagaagcccggctcagcaccctcagggggcccgtccaggctcagcagcagcagctcctccgagtctgggagcagcagctccagcgggtccagctctgacagcagtgactcagaatgaactggcttcggacagaacaggacagatggatgtcgcacacgccgagactctgccgtacccctctgtggttcatattactacttctgttccatggtgtgcaggtctgcttcttaattcagtgttatgatatcttccagtttttgctttcataggtcagagatctatcttgtgtgtgcgttagacttgatgagaaggtgtgaactctgcagaaagtctcttcttcatcactgaattcagtcacttggagatgacaacttcaaatgctaacccgatgaccccagaaaaccgtgtgagattcgtaccgaagaaccttgtggaatccctttgcttaggcccaacctggtcgatagctcgagaaagaattttttccaaggaaatgtctcggatatgggtactgtatttgaaagctgttagctttgtcaacacgcattgtccttgtcatttgggccccgagctctgaccctcgtgtctgacgcggccacctctttctggaggggctgaggacagatgtgcctgcttgtggagaccaggctgggcctaagcgaagggtcatcgcagccccagcccggagcgtggagcccttggggggtggtcgggtgggatgtgcgttctccgctcgtggtgatgtcaggagctcctcggagggaacagagcggctgtgtatgcagcctgcaggtttccatacactgaagcttttacctcaactttaaaaaaaaaaaaagaagaaaagatttaaaaaaaaaaaaaaa

SEQ ID NO: 172248 - DNA, 2998 bp, Artificial Sequence
  derived and/or modified sequence
aggctaattaggcgcgcggtttgtttacaaacacgggctcccggcaggtgcgcgccgccccgcccgtgcgcggccggggttcgagggtggctcccgcgggcctcggggtgcccggacgggggctgcggtgctggctgcgtgcccgcttcttccatgccgtcctggggcaccggaaaatccgccgccaggcgctgtccccgacacgggctgtcgcctggttgggcccggaaatgggacgtcgcgctttctcagggagcgtagaagcagccagggcctctccaagccgctgctgtgacagaaagtgagtgagctgccggaggatgtccaccgccacgacagtcgcccccgcggggatcccggcgaccccgggccctgtgaacccaccccccccggaggtctccaaccccagcaagcccggccgcaagaccaaccagctgcagtacatgcagaatgtggtggtgaagacgctctggaaacaccagttcgcctggcccttctaccagcccgtggacgcaatcaaattgaacctgccggattatcataaaataattaaaaacccaatggatatggggactattaagaagagactagaaaataattattattggagtgcaagcgaatgtatgcaggacttcaacaccatgtttacaaattgttacatttataacaagcccacagatgacatagtgctaatggcccaagctttagagaaaatttttctacaaaaagtggcccagatgccccaagaggaagttgaattacgaccccctttcagagcgtgccccccaccgtctcccagacgcccgtcatcgctgccacccctgtaccaaccatcactgcaaacgtcacgtcggtcccagtccccccagctgccgccccacctcctcctgccacacccatcgtccccgtggtccctcctacgccgcctgtcgtcaagaaaaagggcgtgaagcggaaagcagacacaaccactcccacgacgtcggccatcactgccagccggagtgagtcgcccccgccgttgtcagaccccaagcaggccaaagtggtggcccggcgggagagtggtggccgccccatcaagcctcccaagaaggacctggaggacggcgaggtgccccagcacgcaggcaagaagggcaagctgtcggagcacctacgctactgcgacagcatcctcagggagatgctatccaagaagcacgcggcctacgcctggcccttctacaagccagtggatgccgaggccctggagctgcacgactaccacgacatcatcaagcacccgatggacctcagcaccgtgaaaaggaagatggatggccgagagtacccagacgcacagggctttgctgctgatgtccggctgatgttctcgaattgctacaaatacaatcccccagaccacgaggttgtggccatggcccggaagctccaggacgtgtttgagatgaggtttgccaagatgccagatgagcccgtggaggcaccggcgctgcctgcccccgcggcccccatggtgagcaagggcgctgagagcagccgtagcagtgaggagagctcttcggactcaggcagctcggactcggaggaggagcgggccaccaggctggcggagctgcaggagcagctgaaggccgtgcacgagcagctggccgccctgtctcaggccccagtaaacaaaccaaagaagaagaaggagaagaaggagaaggagaagaagaagaaggacaaggagaaggagaaggagaagcacaaagtgaaggccgaggaagagaagaaggccaaggtggctccgcctgccaagcaggctcagcagaagaaggctcctgccaagaaggccaacagcacgaccacggccggcagacagctgaagaaaggcggcaagcaggcatctgcctcctacgactcagaggaagaggaggagggcctgcccatgagctacgatgaaaagcgccagcttagcctggacatcaaccggctgcccggggagaagctgggccgggtagtgcacatcatccaatctcgggagccctcgctcagggactccaaccccgacgagatagaaattgactttgagactctgaaacccaccactttgcgggaactggagagatatgtcaagtcttgtttacagaaaaagcaaaggaaaccgttctcagcaagcgggaagaaacaggcagccaagtcgaaagaggagctagctcaggaaaagaagaaggagctggaaaagcgtctgcaggatgtcagcgggcagctgagcagcagcaagaagcccgcccggaaagagaagcccggctcagcaccctcagggggcccgtccaggctcagcagcagcagctcctccgagtctgggagcagcagctccagcgggtccagctctgacagcagtgactcagaatgaactggcttcggacagaacaggacagatggatgtcgcacacgccgagactctgccgtacccctctgtggttcatattactacttctgttccatggtgtgcaggtctgcttcttaattcagtgttatgatatcttccagtttttgctttcataggtcagagatctatcttgtgtgtgcgttagacttgatgagaaggtgtgaactctgcagaaagtctcttcttcatcactgaattcagtcacttggagatgacaacttcaaatgctaacccgatgaccccagaaaaccgtgtgagattcgtaccgaagaaccttgtggaatccctttgcttaggcccaacctggtcgatagctcgagaaagaattttttccaaggaaatgtctcggatatgggtactgtatttgaaagctgttagctttgtcaacacgcattgtccttgtcatttgggccccgagctctgaccctcgtgtctgacgcggccacctctttctggaggggctgaggacagatgtgcctgcttgtggagaccaggctgggcctaagcgaagggtcatcgcagccccagcccggagcgtggagcccttggggggtggtc

SEQ ID NO: 172249 - DNA, 2181 bp, Artificial Sequence
  derived and/or modified sequence
atgagcaccgccaccaccgtggcccccgccggcatccccgccacccccggccccgtgaacccccccccccccgaggtgagcaaccccagcaagcccggcagaaagaccaaccagctgcagtacatgcagaacgtggtggtgaagaccctgtggaagcaccagttcgcctggcccttctaccagcccgtggacgccatcaagctgaacctgcccgactaccacaagatcatcaagaaccccatggacatgggcaccatcaagaagagactggagaacaactactactggagcgccagcgagtgcatgcaggacttcaacaccatgttcaccaactgctacatctacaacaagcccaccgacgacatcgtgctgatggcccaggccctggagaagatcttcctgcagaaggtggcccagatgccccaggaggaggtggagctgctgccccccgcccccaagggcaagggcagaaagcccgccgccggcgcccagagcgccggcacccagcaggtggccgccgtgagcagcgtgagccccgccacccccttccagagcgtgccccccaccgtgagccagacccccgtgatcgccgccacccccgtgcccaccatcaccgccaacgtgaccagcgtgcccgtgccccccgccgccgccccccccccccccgccacccccatcgtgcccgtggtgccccccaccccccccgtggtgaagaagaagggcgtgaagagaaaggccgacaccaccacccccaccaccagcgccatcaccgccagcagaagcgagagccccccccccctgagcgaccccaagcaggccaaggtggtggccagaagagagagcggcggcagacccatcaagccccccaagaaggacctggaggacggcgaggtgccccagcacgccggcaagaagggcaagctgagcgagcacctgagatactgcgacagcatcctgagagagatgctgagcaagaagcacgccgcctacgcctggcccttctacaagcccgtggacgccgaggccctggagctgcacgactaccacgacatcatcaagcaccccatggacctgagcaccgtgaagagaaagatggacggcagagagtaccccgacgcccagggcttcgccgccgacgtgagactgatgttcagcaactgctacaagtacaacccccccgaccacgaggtggtggccatggccagaaagctgcaggacgtgttcgagatgagattcgccaagatgcccgacgagcccgtggaggcccccgccctgcccgcccccgccgcccccatggtgagcaagggcgccgagagcagcagaagcagcgaggagagcagcagcgacagcggcagcagcgacagcgaggaggagagagccaccagactggccgagctgcaggagcagctgaaggccgtgcacgagcagctggccgccctgagccaggcccccgtgaacaagcccaagaagaagaaggagaagaaggagaaggagaagaagaagaaggacaaggagaaggagaaggagaagcacaaggtgaaggccgaggaggagaagaaggccaaggtggccccccccgccaagcaggcccagcagaagaaggcccccgccaagaaggccaacagcaccaccaccgccggcagacagctgaagaagggcggcaagcaggccagcgccagctacgacagcgaggaggaggaggagggcctgcccatgagctacgacgagaagagacagctgagcctggacatcaacagactgcccggcgagaagctgggcagagtggtgcacatcatccagagcagagagcccagcctgagagacagcaaccccgacgagatcgagatcgacttcgagaccctgaagcccaccaccctgagagagctggagagatacgtgaagagctgcctgcagaagaagcagagaaagcccttcagcgccagcggcaagaagcaggccgccaagagcaaggaggagctggcccaggagaagaagaaggagctggagaagagactgcaggacgtgagcggccagctgagcagcagcaagaagcccgccagaaaggagaagcccggcagcgcccccagcggcggccccagcagactgagcagcagcagcagcagcgagagcggcagcagcagcagcagcggcagcagcagcgacagcagcgacagcgagtag

SEQ ID NO: 172250 - DNA, 63 bp, Artificial Sequence
  derived and/or modified sequence
atgagcaccgccaccaccgtggcccccgccggcatccccgccacccccggccccgtgaactag

SEQ ID NO: 172251 - DNA, 1218 bp, Artificial Sequence
  derived and/or modified sequence
atgctgagcaagaagcacgccgcctacgcctggcccttctacaagcccgtggacgccgaggccctggagctgcacgactaccacgacatcatcaagcaccccatggacctgagcaccgtgaagagaaagatggacggcagagagtaccccgacgcccagggcttcgccgccgacgtgagactgatgttcagcaactgctacaagtacaacccccccgaccacgaggtggtggccatggccagaaagctgcaggacgtgttcgagatgagattcgccaagatgcccgacgagcccgtggaggcccccgccctgcccgcccccgccgcccccatggtgagcaagggcgccgagagcagcagaagcagcgaggagagcagcagcgacagcggcagcagcgacagcgaggaggagagagccaccagactggccgagctgcaggagcagctgaaggccgtgcacgagcagctggccgccctgagccaggcccccgtgaacaagcccaagaagaagaaggagaagaaggagaaggagaagaagaagaaggacaaggagaaggagaaggagaagcacaaggtgaaggccgaggaggagaagaaggccaaggtggccccccccgccaagcaggcccagcagaagaaggcccccgccaagaaggccaacagcaccaccaccgccggcagacagctgaagaagggcggcaagcaggccagcgccagctacgacagcgaggaggaggaggagggcctgcccatgagctacgacgagaagagacagctgagcctggacatcaacagactgcccggcgagaagctgggcagagtggtgcacatcatccagagcagagagcccagcctgagagacagcaaccccgacgagatcgagatcgacttcgagaccctgaagcccaccaccctgagagagctggagagatacgtgaagagctgcctgcagaagaagcagagaaagcccttcagcgccagcggcaagaagcaggccgccaagagcaaggaggagctggcccaggagaagaagaaggagctggagaagagactgcaggacgtgagcggccagctgagcagcagcaagaagcccgccagaaaggagaagcccggcagcgcccccagcggcggccccagcagactgagcagcagcagcagcagcgagagcggcagcagcagcagcagcggcagcagcagcgacagcagcgacagcgagtag

SEQ ID NO: 172252 - protein, 582 aa, Artificial Sequence
  derived and/or modified sequence
MSSSLGKEKDSKEKDPKVPSAKEREKEAKASGGFGKESKEKEPKTKGKDAKDGKKDSSAAQPGVAFSVDNTIKRPNPAPGTRKKSSNAEVIKELNKCREENSMRLDLSKRSIHILPSSIKELTQLTELYLYSNKLQSLPAEVGCLVNLMTLALSENSLTSLPDSLDNLKKLRMLDLRHNKLREIPSVVYRLDSLTTLYLRFNRITTVEKDIKNLSKLSMLSIRENKIKQLPAEIGELCNLITLDVAHNQLEHLPKEIGNCTQITNLDLQHNELLDLPDTIGNLSSLSRLGLRYNRLSAIPRSLAKCSALEELNLENNNISTLPESLLSSLVKLNSLTLARNCFQLYPVGGPSQFSTIYSLNMEHNRINKIPFGIFSRAKVLSKLNMKDNQLTSLPLDFGTWTSMVELNLATNQLTKIPEDVSGLVSLEVLILSNNLLKKLPHGLGNLRKLRELDLEENKLESLPNEIAYLKDLQKLVLTNNQLTTLPRGIGHLTNLTHLGLGENLLTHLPEEIGTLENLEELYLNDNPNLHSLPFELALCSKLSIMSIENCPLSHLPPQIVAGGPSFIIQFLKMQGPYRAMV

SEQ ID NO: 172253 - DNA, 1749 bp, Artificial Sequence
  derived and/or modified sequence
atgtcttctagccttggcaaggaaaaagactcaaaagaaaaggatccaaaggtcccctccgctaaagaacgagaaaaagaggccaaagcgagcggtggattcggcaaggaaagcaaagagaaggagcctaaaactaagggaaaggatgccaaagatggcaagaaggacagtagtgctgcccagcccggggtagctttctctgttgacaataccatcaagcgccccaatcccgctccaggtacacgcaagaagtccagcaacgccgaggtcatcaaagaactcaacaaatgtcgcgaggaaaattctatgcgattagacttgtcgaaacgctcgatccatatcttgccctcctcaatcaaggagttaactcaattaactgaactgtacttgtactccaacaagctacagtccctccctgcggaggttggatgcctcgttaacctgatgacgctggcactgtctgagaactctctaaccagtcttcccgactcactcgataatctcaagaagttgcgtatgctggatttaagacacaataaactgcgggaaattcccagcgtggtgtacagactggactctctcacaaccctttacctgagattcaaccggatcaccaccgtggagaaagacataaagaacttgtctaaactgagcatgctttctatcagggagaataaaatcaagcaactgcccgcagaaatcggcgaactctgcaaccttatcactctggacgtcgcacacaaccaactcgagcacctgcccaaggagattggcaactgtacccaaatcacaaatttggacctccagcataatgaacttctggatctccccgataccatcggtaatctgagttccctgtctcgtctcggcttaaggtataaccggctgtccgcaattccacgttccctggccaaatgttcagctttagaggaactcaatctggagaacaacaatatttcaaccctccccgagagcctgctttccagcctggtcaaattgaattctttaactctagctcgcaattgctttcaactctatcctgtcggcggcccgtctcagttctcaacgatctacagcctgaacatggagcacaaccggatcaataagatcccatttggaattttctccagagcgaaggtgctgtctaaattgaacatgaaggacaaccagctaacctctctgcccctcgactttgggacttggacttctatggtggagttaaacctggctaccaaccagctgacaaagatacctgaagatgtgtccgggctagtgtccctggaagtgttaattttatctaataatctattgaaaaagttaccacacggactgggcaatctgagaaagttacgagagcttgacctcgaggagaataagctggaatcactccccaacgagattgcatacctcaaagacctgcagaaactagttttaactaataaccagctcactaccctcccaagaggcatcggccacctcacaaacctgacccacctggggttaggagagaacctcctgacccatttaccggaagaaatcggcaccctggaaaatttggaggaactttatctcaacgataatcccaaccttcactccctgcccttcgagctcgccttgtgctccaagctctcgattatgagcattgaaaactgcccattatcccacctgcccccacagatcgtggccggaggccccagtttcatcattcagttcctcaagatgcagggcccatacagagccatggtctag

SEQ ID NO: 172254 - DNA, 1749 bp, Artificial Sequence
  derived and/or modified sequence
atgagcagcagcctgggcaaggagaaggacagcaaggagaaggaccccaaggtgcccagcgccaaggagcgggagaaggaggccaaggccagcggcggctttgggaaggagagcaaggagaaggagcccaagaccaagggcaaggatgccaaggatggcaagaaggacagcagcgctgcccagcccggggtggccttctctgtggacaacaccatcaagaggcccaacccagcccctggcaccaggaagaagagcagcaatgctgaggtgatcaaggagctgaacaagtgccgggaggagaacagcatgaggctggacctgagcaagaggagcatccacatcctgcccagcagcatcaaggagctgacccagctgacagagctgtacctgtacagcaacaagctgcagagcctgcctgctgaggtgggctgcctggtgaacctgatgaccctggccctgtctgagaacagcctgaccagcctgcctgacagcctggacaacctgaagaagctgaggatgctggacctgcggcacaacaagctgcgggagatccccagcgtggtgtaccgcctggacagcctgaccaccctgtacctgcgcttcaaccgcatcaccaccgtggagaaggacatcaagaacctgagcaagctgtccatgctgagcatccgggagaacaagatcaagcagctgcctgctgagatcggggagctgtgcaacctgatcaccctggatgtggcccacaaccagctggagcacctgcccaaggagatcggcaactgcacccagatcaccaacctggacctgcagcacaatgagctgctggacctgcctgacaccatcggcaacctgagcagcctgagccggctgggcctgcgctacaaccggctgagcgccatccccaggagcctggccaagtgcagcgccctggaggagctgaacctggagaacaacaacatcagcaccctgcctgagagcctgctgagcagcctggtgaagctgaacagcctgaccctggccaggaactgcttccagctgtaccctgtgggcggccccagccagttcagcaccatctacagcctgaacatggagcacaaccgcatcaacaagatccccttcggcatcttcagccgggccaaggtgctgagcaagctgaacatgaaggacaaccagctgaccagcctgcccctggactttggcacctggacctccatggtggagctgaacctggccaccaaccagctgaccaagatcccagaagatgtgtctggcctggtgtccctggaggtgctgatcctgagcaacaacctgctgaagaagctgccccacggcctgggcaacctgaggaagctgcgggagctggacctggaggagaacaagctggagagcctgcccaatgaaattgcctacctgaaggacctgcagaagctggtgctgaccaacaaccagctgaccaccctgccccggggcatcggccacctgaccaacctgacccacctgggcctgggggagaacctgctgacccacctgcctgaggagatcggcaccctggagaacctggaggagctgtacctgaatgacaaccccaacctgcacagcctgccctttgagctggccctgtgcagcaagctgagcatcatgagcattgagaactgccccctgagccacctgcccccccagatcgtggccggcggccccagcttcatcatccagttcctgaagatgcagggcccctaccgggccatggtgtag

SEQ ID NO: 172255 - DNA, 1749 bp, Artificial Sequence
  derived and/or modified sequence
atgagcagcagcctgggcaaggagaaggacagcaaggagaaggaccccaaggtgccaagcgcgaaagagcgggagaaggaggctaaggcatcaggaggcttcgggaaagagagcaaggagaaagagccaaagactaagggcaaggacgcaaaagatgggaaaaaagattcaagtgctgctcagccgggagttgcattctcagtcgacaacaccataaaaaggcctaaccccgcgccaggtacgcgcaaaaaatcaagcaacgctgaagtgattaaagaactcaacaagtgcagagaagagaattcaatgcgactcgatctgtctaagaggtctatccacattctgccttcatctatcaaagaactgactcagctgactgagctgtacctttactccaataaactccagtccctcccggccgaggtgggttgcttggtgaatttaatgacattagccctgagcgaaaattcactgaccagcttgccagactcgttggacaatcttaagaaactgcgaatgctcgatctcaggcacaacaagttgcgggagattccatcagtggtgtacaggttggatagcctgaccaccttgtatttaagatttaaccgcatcacaacagtcgagaaggacatcaagaatctttcgaagctgagcatgctatccatcagggagaataaaatcaaacagttgcccgctgagatcggggagctgtgcaacctgattaccctagatgttgctcataaccagttagaacacttgcctaaagagatcggtaactgtacccagattacaaatctggacctgcagcataacgaattactcgacttacctgatacgatcggaaacctgagtagcttgtcgcgcttggggctgagatataaccgcctttccgctattccaaggtctctggcaaagtgtagtgccttagaggaattaaacctggagaataacaacatatcaacgcttccggagtctctgctgtcatcattggtcaaattgaacagtctcacactggccaggaattgctttcaactttatcctgtcggaggcccttcccagtttagtacaatctactcgctcaatatggagcacaataggattaataagattccattcggcatattcagtagggccaaggtcctgtccaaattaaatatgaaggacaaccagctgaccagtctgcccctagacttcggtacttggacctctatggtcgagctgaatctggccactaatcagttaactaagatacctgaagatgtaagtggtctggtctcccttgaagtgctaatcctgtcaaataatctgctaaagaagctgccgcacgggctgggcaacctgagaaaactgcgagaattggatttggaagaaaataaattggagagccttccaaacgaaattgcctacttaaaagacctgcagaagttggtgttgacaaacaaccagttgacaacattacctagaggaatcggccaccttactaaccttacccacctgggactcggggagaacctcttaactcatctccctgaagagatcggtactttggaaaatctggaagagctgtatctcaatgataaccctaatctgcatagcctgccgttcgaactggccctctgcagcaagttatccatcatgtccatcgagaattgtccgctcagtcacctcccccctcaaattgtggccggagggccttcattcattattcagtttctaaagatgcaaggaccataccgggcgatggtgtag

SEQ ID NO: 172256 - DNA, 1749 bp, Artificial Sequence
  derived and/or modified sequence
atgtcatctagcttgggaaaagagaaggactccaaggagaaggatccaaaagttccctctgcaaaagagcgggaaaaggaggcgaaagcctctgggggatttgggaaggagtcaaaggagaaggaacccaagacaaaggggaaagacgccaaggatgggaagaaagattcatccgctgctcaaccaggcgtggctttttccgttgataacaccataaagcgcccaaacccggcacctggaacacgcaaaaagtcatcaaacgctgaagttatcaaagagctgaataagtgtcgcgaggagaattcgatgcgcctcgatctgtcaaagagatctatacacatactgcctagcagtatcaaagaactcacccaattaacagagctgtatctctacagtaacaagctgcagagtctgcctgcagaggtcggatgtctagtaaatctgatgacattagccctttcagagaattctctaacctcccttcccgattccctagataatctaaaaaaactcagaatgctggatctgagacataataagttgcgcgaaattcctagcgtagtgtatcgcttagatagcctgaccacactgtatctgaggttcaacagaattacaacggtcgagaaagatatcaaaaacctgtccaaacttagcatgctttccattcgcgaaaacaagattaagcagctgccagcagaaattggagagttgtgcaatcttatcacccttgatgtggcccataatcagctcgagcacctgccaaaagagatcgggaattgtacccagattacgaacttggacctacagcataatgagctgctcgatctcccagacactatcggaaatctatccagcctatctcgactcggcctaaggtataatcggctgagcgccattccaagatccctggctaaatgtagcgctctcgaggagctcaacctggaaaacaacaacatctccacgttgccggagtccctgttgtcatctctggtgaagcttaacagtttgacgctggctagaaactgtttccagctctacccagtgggtggaccaagtcagttcagcaccatctacagtctgaacatggaacacaacagaattaacaagataccatttggaatcttcagccgcgcaaaggtgctgtccaagctgaacatgaaggataaccagttaaccagcctccctctggatttcgggacctggacgagcatggtcgaacttaatctcgcgaccaatcagctaaccaaaataccagaggatgtcagcggtctagtgtctttggaggttctgatcctgagcaacaatctgttgaaaaaactgccacatggccttggaaatctgcggaaactccgcgaactggatttggaggaaaacaagttggagtcactgcctaacgaaatcgcctacctgaaagacctccagaaactagttcttaccaataaccagcttaccacacttcctagaggtattgggcatcttaccaatttaacccacctgggtttgggcgagaatctgcttacgcacctcccagaagagattggcactttagagaaccttgaggagctttacctgaatgacaaccctaacttacacagcctcccatttgagctcgccctgtgttcaaaattgtccattatgtccatagagaattgtccactgagccatctaccccctcagatagtggctgggggtccctcatttatcattcaatttcttaaaatgcaggggccttatagagcgatggtttag

SEQ ID NO: 172257 - DNA, 3943 bp, Artificial Sequence
  derived and/or modified sequence
gggggaggggcgggcggggggcggcggttgggcagcgtcgcttcttaggaggaggaggaagaggaggaaggagggcgagcgaggaggatggcggagtcggggctcctgacggaactctaatgaatcattgattgaccagcactattttaccagttggaatgaatgatcagaaatgggcatagtgcttttagatccaacatgtaacagatggatgttactccatgctgattacttcttcaagccagtacttttttgattgtgtaggatctttgtctcttcatctttgaattcaattactggaaaataaaaggagttcatgtagtttttgtccaggcttgagtcaccatgagtagtagtttaggaaaagaaaaagactctaaagaaaaagatcccaaagtaccatcagccaaggaaagagaaaaggaggcaaaagcctctggaggttttgggaaagagagcaaagaaaaagaacctaagaccaaagggaaagatgccaaagatggaaagaaggactccagtgctgcccaaccaggggtggcattttcagttgacaatacgatcaaacggccaaacccagcacctgggactagaaaaaaatccagcaatgcagaggtgattaaagagctcaacaaatgccgggaagagaattcaatgcgtttggacttatccaagagatctatacacatattgccatcatcaatcaaagagttgactcaattaacagaactttatttatacagtaacaaattgcagtccctcccagcagaggtgggatgtttagtaaatctcatgacactggctctaagtgaaaattcacttaccagtttgcctgactctcttgataacttgaagaagctgcggatgcttgatttacggcataataaactgagagaaattccttcagtggtgtataggctggattctctcaccactctttaccttcgctttaatcgtataactactgtggaaaaggacatcaaaaacttgtcaaaactcagcatgcttagcattcgagagaacaaaattaaacaactacctgctgaaattggtgaattatgtaacctcattacgctggatgtagctcacaatcaacttgaacaccttccaaaggagattggaaactgtacacagataaccaaccttgacttgcagcacaatgaactgctagacctcccagatactataggaaacctgtccagtttaagtcgtcttggtctgagatataacagactgtcagcaatacccagatcattagcaaaatgcagtgcacttgaagaattaaatttagagaacaataacatttctactttaccagagagtcttttatcaagtcttgtgaaactgaatagtttgaccttagctagaaattgcttccagttgtatccagtgggtggtccatctcagttttctaccatctattccctcaacatggaacacaatcgaatcaacaaaattccatttggaattttctccagagcaaaagtattaagtaagctgaatatgaaggacaatcagttaacatcacttcccttggattttggaacttggaccagtatggtagaattgaatttagccactaatcagctcacaaagatccctgaggatgtgtctggtctcgtttctcttgaggttcttatcttatcaaacaatcttctaaagaagcttccccatggtcttggaaaccttaggaagttaagagagttggatctagaagagaacaaattggaatccttgccaaatgaaattgcatatcttaaggatttacagaaattagtcttgacaaacaaccagttgaccactcttcccagaggcattggtcaccttactaatctcacacatctgggccttggagagaacctacttactcaccttcctgaagaaattggtacactggagaacctagaagaactgtatttgaatgacaaccccaacctgcatagccttccctttgagctggcactctgcagcaagctttcaatcatgagtattgagaactgtccactcagtcaccttccacctcagattgttgctggggggccttctttcatcattcagttcttaaagatgcagggtccatatcgtgccatggtctgatataaatctgctggtcccacacactgttcaaaaatagactgccattaatgtttcttatctatatctgtatctatttatgtagatattggtatatggcagatttataaaaattgcattatgtgtttctgctaatagaggaatcatagccatttagaattttttttaaattctgtacaaaaggcttatataagttttctttgctgaatttgatggatgtttttctgttgtgtaatctgatatgccagtttgcttaaaacatttgccaacacattatgaagttattaaatttaagggacagaggtagtatagttagatatactttctcttaggaaaaataatgggcaaaaatttttgttgcaacttttcatatatattttccccttaccaattgttttatccttatagtattgtaggccctgaaagtagaatttttctttaacttattttgagatttgagatttaaattttatgtattgtttacagtcagagtaaatcactggatttcttttgtttgttttgatttgctctgttttattcagtcaaatctagagtttgaatcctctgctaaagaatttgcatccactggtgtaaacagtgaaaggtatttgcttgttgaaaaaaaaaactggcaaagtgaaaagatacagtcaaaaatctagaatttctttaattttgcttctctgacgagttgtgaagcaaaatacctgaagtgagtctttgggtaggggaagggtattgagaccttttctagtatgaatattttttaagtttgggggaagagaaacttgcagtgaaaaggagttttttcattcctgaaagttgcagatccacaaaactaacaggataattgggcaaataaattacatataaacacacacaatctatatatgtatatacaatgctatatagatatgtatttattatatcataaactacagtaggtaactttaaggatttcttcctatccttgtacaatgacatgaatgtctttctttgaaaactgcaatgtatgtatgtttcaaggttatttaacagtgtactatggttttatatcttgacttgccttgtacatctttcaattctggaatatctgtgtctaagcacaatatcttcacactgtgctgtattgctgctgaactaaatgcacttttccccacatatggggcactggcttcaaacaattcagttcagtatcattacttttaatctcatctttcctttcttggtagttgttaatacagttatggaaaagaggcacattgcatagaagccattggggagttcagtggaagttctgtaagatgtgcatgtactatttgatgcgttttctttgcttcactgcttttaatacttagcagtattgttggtctaagtcaatttgattattgaggagtctcagagcaaggtgcgttctagatgtcatcctaaaaaacacttcatatataattaatcactattttgtataattacatattgctgcttgtgtgtttttttttttttccatttagttgggcgttgtgttttacacaaaaccatttttgaattaaggctatgatattaagatagaaatttggactgttgttctgcttttcctggcactcaaattcatgactagttttgaggtcaaacctatgttcgtaatgagagattttataaggatcaactaagaaatggaaggcaggtgaagatataaaaccctagaatgcttaaatgtgctgtaaaactattgtagatgtcactggattttaccaagtaatatcctttcttttttttttccccccatctgctgtggcttttcagttaaaattttgtttataaaaggaatttgtttattacagctctacctaga

SEQ ID NO: 172258 - DNA, 1749 bp, Artificial Sequence
  derived and/or modified sequence
atgagcagcagcctgggcaaggagaaggacagcaaggagaaggaccccaaggtgcccagcgccaaggagagagagaaggaggccaaggccagcggcggcttcggcaaggagagcaaggagaaggagcccaagaccaagggcaaggacgccaaggacggcaagaaggacagcagcgccgcccagcccggcgtggccttcagcgtggacaacaccatcaagagacccaaccccgcccccggcaccagaaagaagagcagcaacgccgaggtgatcaaggagctgaacaagtgcagagaggagaacagcatgagactggacctgagcaagagaagcatccacatcctgcccagcagcatcaaggagctgacccagctgaccgagctgtacctgtacagcaacaagctgcagagcctgcccgccgaggtgggctgcctggtgaacctgatgaccctggccctgagcgagaacagcctgaccagcctgcccgacagcctggacaacctgaagaagctgagaatgctggacctgagacacaacaagctgagagagatccccagcgtggtgtacagactggacagcctgaccaccctgtacctgagattcaacagaatcaccaccgtggagaaggacatcaagaacctgagcaagctgagcatgctgagcatcagagagaacaagatcaagcagctgcccgccgagatcggcgagctgtgcaacctgatcaccctggacgtggcccacaaccagctggagcacctgcccaaggagatcggcaactgcacccagatcaccaacctggacctgcagcacaacgagctgctggacctgcccgacaccatcggcaacctgagcagcctgagcagactgggcctgagatacaacagactgagcgccatccccagaagcctggccaagtgcagcgccctggaggagctgaacctggagaacaacaacatcagcaccctgcccgagagcctgctgagcagcctggtgaagctgaacagcctgaccctggccagaaactgcttccagctgtaccccgtgggcggccccagccagttcagcaccatctacagcctgaacatggagcacaacagaatcaacaagatccccttcggcatcttcagcagagccaaggtgctgagcaagctgaacatgaaggacaaccagctgaccagcctgcccctggacttcggcacctggaccagcatggtggagctgaacctggccaccaaccagctgaccaagatccccgaggacgtgagcggcctggtgagcctggaggtgctgatcctgagcaacaacctgctgaagaagctgccccacggcctgggcaacctgagaaagctgagagagctggacctggaggagaacaagctggagagcctgcccaacgagatcgcctacctgaaggacctgcagaagctggtgctgaccaacaaccagctgaccaccctgcccagaggcatcggccacctgaccaacctgacccacctgggcctgggcgagaacctgctgacccacctgcccgaggagatcggcaccctggagaacctggaggagctgtacctgaacgacaaccccaacctgcacagcctgcccttcgagctggccctgtgcagcaagctgagcatcatgagcatcgagaactgccccctgagccacctgcccccccagatcgtggccggcggccccagcttcatcatccagttcctgaagatgcagggcccctacagagccatggtgtag

SEQ ID NO: 172259 - protein, 246 aa, Artificial Sequence
  derived and/or modified sequence
MFQLPILNFSPQQVAGVCETLEESGDVERLGRFLWSLPVAPAACEALNKNESVLRARAIVAFHGGNYRELYHILENHKFTKESHAKLQALWLEAHYQEAEKLRGRPLGPVDKYRVRKKFPLPRTIWDGEQKTHCFKERTRHLLREWYLQDPYPNPSKKRELAQATGLTPTQVGNWFKNRRQRDRAAAAKNRLQQQVLSQGSGRALRAEGDGTPEVLGVATSPAASLSSKAATSAISITSSDSECDI

SEQ ID NO: 172260 - DNA, 1500 bp, Artificial Sequence
  derived and/or modified sequence
ctcctccagtcggggtcgtccgctcccggccgttgagccaccgccgccacccggtagtgtgtcccgctgccccaatccgcctcatcaacaagcgcctggcacactcagccaggcccgcgggcatctgctgcgtgtcccgctccgggctcagtgccctcgccgccgccggcactgcctcgatgttccagctgcccatcttgaatttcagcccccagcaagtggccggggtatgtgagaccctggaagagagcggcgatgtggagcgcctgggtcgcttcctctggtcgctgcccgtggcccctgcggcctgcgaggccctcaacaagaatgagtcggtgctacgcgcacgagccatcgtggcctttcacggtggcaactaccgcgagctctatcatatcctggaaaaccacaagttcaccaaggagtcgcacgccaagctgcaggcgctgtggcttgaagcacactaccaggaggctgagaagctgcgtggaagacccctgggacctgtggacaagtaccgagtaaggaagaagttcccgctgccgcgcaccatttgggacggcgaacagaagacacactgcttcaaggagcgcacgcggcacctgctacgcgagtggtacctgcaggatccataccctaaccccagcaaaaaacgtgagctcgcccaggcaaccggactgacccctacgcaggtgggcaactggttcaaaaaccgccgacaaagggaccgagcggctgcagccaagaacagactccagcagcaggtcctgtcacagggttccgggcgggcactacgggcggagggcgacggcacgccagaggtgctgggcgtcgccaccagcccggccgccagtctatccagcaaggcggccacttcagccatctccatcacgtccagcgacagcgagtgcgacatctgagttgcccatccaggatgctcagaagcagattccagtgtaaaaacgagaaaaacaaaatgaaagaggggaagaagatgagagacctgcaaatccagcgccacagaagccaggtgaccagggacccgcgggctcgggttgccgtttcccgccccaccccgcggccggcctggcttcactggcgccctttggccgcgaccacgggaaccagcggtgaggcctgacccagcaccacgttcttcttgctttgctttttcctaaggattttgctgcaaagtctccttcggaacccgaactgcaagctgagcgcctgcccagattctcccatgggtatttcacgtcgaaaggacgctgttacatatgtataactttcgctttaaagtttttttttaacaaaacatatatatgctgtttatttacttatttaagagaccgccatggtaggtttctctgtagcttggggaacttgctgtttctaaacatgcaggctggtggtgatgggttctgtgtggagaagccaaacaataaaacaacctagtgggcaaccttcttaattaaaaaaaaaaaaaaaaaaaaaaaaaaa

SEQ ID NO: 172261 - DNA, 741 bp, Artificial Sequence
  derived and/or modified sequence
atgtttcaactacccatcctaaattttagtcctcagcaggtagccggcgtttgcgagacactggaggaatcaggcgatgttgaacggctgggcaggttcctctggtcccttccagtcgcccctgctgcttgcgaagctctgaacaaaaacgagtctgtcctgagagcccgagcgatcgtggccttccatggggggaactaccgcgaactgtaccatatactagagaatcacaaatttactaaggagtcacacgctaagctacaggctctttggctagaagcacactatcaggaggccgaaaagttaagaggacgcccactaggtcctgttgataaatatcgagttcggaagaagttccccctgccaaggactatctgggatggggagcaaaaaacacactgtttcaaggaaaggactcgccacttgctgagggagtggtacctccaggatccctacccgaatccaagcaagaagcgagaattggctcaagccacgggcctgacgcccacccaggtgggaaattggtttaaaaatcgccggcagcgcgaccgcgccgctgcggccaagaaccggctccagcaacaggtcctctcacagggcagcggtagagctctcagggctgagggagacggaactcctgaagtgctgggagtggcaacaagccctgccgccagcttatcaagcaaggccgctacttctgcgataagcatcactagctcagattcagaatgcgatatctag

SEQ ID NO: 172262 - DNA, 741 bp, Artificial Sequence
  derived and/or modified sequence
atgttccagctgcccatcctgaacttcagcccccagcaggtggccggcgtgtgtgagaccctggaggagagcggagatgtggagcggctgggccgcttcctgtggagcctgcctgtggccccagctgcctgtgaggccctgaacaagaatgaatctgtgctgcgggcccgggccatcgtggccttccatggaggcaactaccgggagctgtaccacatcctggagaaccacaagttcaccaaggagagccacgccaagctgcaggccctgtggctggaggcccactaccaggaggccgagaagctgcggggccggcccctgggccctgtggacaagtacagagtgaggaagaagttccccctgcccaggaccatctgggatggagagcagaagacccactgcttcaaggagaggaccaggcacctgctgcgggagtggtacctgcaggacccctaccccaaccccagcaagaagcgggagctggcccaggccaccggcctgacccccacccaggtgggcaactggttcaagaacagacggcagagggacagagctgctgctgccaagaaccggctgcagcagcaggtgctgagccagggcagcggccgggccctgcgggcagaaggagatggcaccccagaggtgctgggcgtggccaccagccctgctgccagcctgagcagcaaggccgccaccagcgccatcagcatcaccagcagtgacagtgaatgtgacatctag

SEQ ID NO: 172263 - DNA, 741 bp, Artificial Sequence
  derived and/or modified sequence
atgttccagctgcccatcctgaacttcagcccccagcaggtggccggggtgtgtgagactttggaagagtcaggagacgtagaaaggttggggcggttcttatggagcctgcctgtggctcccgccgcttgtgaggctctgaacaaaaacgaatcagtgctgcgcgcccgcgcaattgttgcctttcatggaggtaattatcgcgagctgtaccatattctggagaatcacaagtttaccaaggagtctcacgcgaagctgcaggcactctggttagaggcccactatcaggaggcagagaaacttcggggccggcctctggggcctgtggacaagtacagggtgcggaagaagttccctctccctcggacaatttgggacggagaacagaagacccactgctttaaggagcggactcgacatctactcagagaatggtatctacaagacccttacccaaatccctctaagaaacgggaactggcacaggctacagggctgaccccaacccaggtcggcaattggtttaaaaataggcgtcagcgagacagggcagcggccgctaagaaccggctgcagcagcaggtcctatcccaggggtccggccgggctcttagggctgaaggggacggaacacccgaagttctgggcgttgccacttcacccgccgcgtcactgtcctcaaaggctgctactagcgctataagtatcacttcctctgacagtgaatgcgacatatag

SEQ ID NO: 172264 - DNA, 741 bp, Artificial Sequence
  derived and/or modified sequence
atgttccagttgcctattctgaacttttccccacagcaggtggccggagtgtgcgaaaccttggaggaaagcggcgatgtcgaacgactcggccgatttctgtggagcttgcctgtggcccctgctgcatgtgaggcactgaacaaaaatgagtctgttctgagggcacgcgcaatagtggcattccacggaggtaattatagggaactctatcacatcctggagaatcataagtttacaaaggaatctcacgccaaactgcaagccctgtggctggaagcgcactaccaagaggctgaaaaactgcgcggacgtcctcttggcccagtcgataaataccgagttagaaagaaattcccgctgccacgcaccatatgggacggcgagcagaagacccactgtttcaaagagcgaacacggcatctacttcgagagtggtatctgcaagacccatatccgaacccaagtaaaaagcgagaactggcgcaagccactggtctgacaccaacgcaggtggggaactggtttaagaaccgccgacaaagggaccgggctgccgctgctaagaatcgcctgcagcagcaggttttgagccagggctcagggcgagctctgagagcagaaggcgacggcacccctgaggtcctgggagtagctacctcccctgcagcctctctttctagcaaagcagctacttccgctatctctattactagctccgactccgagtgcgacatctag

SEQ ID NO: 172265 - DNA, 2787 bp, Artificial Sequence
  derived and/or modified sequence
gacactcgcatgtcttttcaacctccaggttctgcaaaatactgaagaaaagtccaggagctaacggcgggcgctgtcgagcacggggaggtgctgaaatagtcctggcgtgctgattcaagctttgattggcagagccacccggtgactgacagggggtctccatggcgcccgcgccgccaatccgcccaccccaatagcggagccagctcgcctgccggcgtgcctgagccgagccgagcccgaaccccaagccgcggagccagcacctcctccagtcggggtcgtccgctcccggccgttgagccaccgccgccacccggtagtgtgtcccgctgccccaatccgcctcatcaacaagcgcctggcacactcagccaggcccgcgggcatctgctgcgtgtcccgctccgggctcagtgccctcgccgccgccggcactgcctcgatgttccagctgcccatcttgaatttcagcccccagcaagtggccggggtatgtgagaccctggaagagagcggcgatgtggagcgcctgggtcgcttcctctggtcgctgcccgtggcccctgcggcctgcgaggccctcaacaagaatgagtcggtgctacgcgcacgagccatcgtggcctttcacggtggcaactaccgcgagctctatcatatcctggaaaaccacaagttcaccaaggagtcgcacgccaagctgcaggcgctgtggcttgaagcacactaccaggaggctgagaagctgcgtggaagacccctgggacctgtggacaagtaccgagtaaggaagaagttcccgctgccgcgcaccatttgggacggcgaacagaagacacactgcttcaaggagcgcacgcggcacctgctacgcgagtggtacctgcaggatccataccctaaccccagcaaaaaacgtgagctcgcccaggcaaccggactgacccctacgcaggtgggcaactggttcaaaaaccgccgacaaagggaccgagcggctgcagccaagaacagactccagcagcaggtcctgtcacagggttccgggcgggcactacgggcggagggcgacggcacgccagaggtgctgggcgtcgccaccagcccggccgccagtctatccagcaaggcggccacttcagccatctccatcacgtccagcgacagcgagtgcgacatctgagttgcccatccaggatgctcagaagcagattccagtgtaaaaacgagaaaaacaaaatgaaagaggggaagaagatgagagacctgcaaatccagcgccacagaagccaggtgaccagggacccgcgggctcgggttgccgtttcccgccccaccccgcggccggcctggcttcactggcgccctttggccgcgaccacgggaaccagcggtgaggcctgacccagcaccacgttcttcttgctttgctttttcctaaggattttgctgcaaagtctccttcggaacccgaactgcaagctgagcgcctgcccagattctcccatgggtatttcacgtcgaaaggacgctgttacatatgtataactttcgctttaaagtttttttttaacaaaacatatatatgctgtttatttacttatttaagagaccgccatggtaggtttctctgtagcttggggaacttgctgtttctaaacatgcaggctggtggtgatgggttctgtgtggagaagccaaacaataaaacaacctagtgggcaaccttcttaattaagggagctgctctcagattccttttcttcttattattattaatatcattcccttcaccaggcatgcagggacccttgagcaaatggtctccggaaggtcttacctatatatcttttgccttctttggtgcttcctggtatatgttttaaacaacctatggtaggtctataaccacctcccacgtcaaattacacgtatgtgcatatatgtatgtacctatacaaacatatgtatgtacctatacaaacatatgtatgtatgcatacacgtgatatatttaaggctagaaattggcaacatgtgagcgtcctctctaaggcaagtccccgcatccccagcacaggtaattatggcttgtccacttgacactcgtttacatgaagtgtcaacagctttcaggagcaatttaggaagccaaactatgggactcaataagtgagtcctattttctaaaaatgcaaaactatcctgactcaggctctgcagcaagaaaggctttctgtctccttcaaggccccctccaatacaaaagcagcaggcacccatgatcatgctagagtgagcatatactgcatttaggattgagctattattaaaataagacaaaagatgatagaagaggttgtaaataattagactaacatcttcttgctgcagaatttggttttaatcaaatgaatggtttttaacaagagggatactgagatgggggaaaggatgtaatcatgtcacatactgagggtaaaacaaggctgtagaaataactggcattttaaaaacctaatctccgaattaagcatagaacaagtcatcaagggcctcattgtcctggtaatggcctcgattaaaacataaaatatttttagcatttaatttttcctcgtgcacatgcatgtatgcacctatacatgaacaaatgcatgcatatacaacgcaaaaacatctaccatctttgcactaagaaaataaatgctagccagagtctctaattttgttcctagtgaaacagattgcatattataaaatttgacattgatctttaaa

SEQ ID NO: 172266 - DNA, 741 bp, Artificial Sequence
  derived and/or modified sequence
atgttccagctgcccatcctgaacttcagcccccagcaggtggccggcgtgtgcgagaccctggaggagagcggcgacgtggagagactgggcagattcctgtggagcctgcccgtggcccccgccgcctgcgaggccctgaacaagaacgagagcgtgctgagagccagagccatcgtggccttccacggcggcaactacagagagctgtaccacatcctggagaaccacaagttcaccaaggagagccacgccaagctgcaggccctgtggctggaggcccactaccaggaggccgagaagctgagaggcagacccctgggccccgtggacaagtacagagtgagaaagaagttccccctgcccagaaccatctgggacggcgagcagaagacccactgcttcaaggagagaaccagacacctgctgagagagtggtacctgcaggacccctaccccaaccccagcaagaagagagagctggcccaggccaccggcctgacccccacccaggtgggcaactggttcaagaacagaagacagagagacagagccgccgccgccaagaacagactgcagcagcaggtgctgagccagggcagcggcagagccctgagagccgagggcgacggcacccccgaggtgctgggcgtggccaccagccccgccgccagcctgagcagcaaggccgccaccagcgccatcagcatcaccagcagcgacagcgagtgcgacatctag

SEQ ID NO: 172267 - DNA, 1080 bp, Artificial Sequence
  derived and/or modified sequence
atgattctgaattcctctacggaagatggaataaagagaattcaagatgattgccctaaggccggacggcacaattacatctttgttatgatcccaacgctgtacagcatcattttcgtggtgggcatcttcgggaacagtttggtggtaattgttatttacttttacatgaaactgaagaccgtcgcatccgttttcctgctcaatttggccctggcggacctatgctttctcctcacccttccgctgtgggctgtctacaccgctatggagtatagatggcctttcggtaactacctgtgcaagattgcaagtgcttccgtctcttttaatctgtacgcctcggttttccttttgacctgcctttctatagacagatacctagccatcgtgcacccaatgaaatccaggctcaggcgcaccatgctggtggcaaaggttacctgtattataatctggctgctcgcgggactggcttcccttcctgctatcattcaccgcaacgtgttcttcattgagaatacaaatattacagtgtgtgccttccactacgagtcccaaaacagtactctgcccatcgggctcggcctgaccaagaacattctgggctttctttttccttttctcattatactcacctcttacacgctgatttggaaagcacttaagaaggcatatgaaatacagaagaacaaaccccgaaacgatgatattttcaagatcattatggcaattgtcctctttttttttttctcgtggataccccatcaaatttttacatttctcgacgtcctcatacagctggggatcatacgtgactgcagaatcgccgatatcgtcgacacggccatgccaataacgatctgtatcgcctactttaacaattgcctgaatcctctgttttatggcttcctgggtaaaaagtttaaacgctactttttgcaacttctgaagtacattccacccaaagccaaaagtcacagtaatctgtctactaagatgtccaccttgtcctaccggcctagtgacaacgtgagctcctcaactaagaagccagccccatgtttcgaagtggaatag

SEQ ID NO: 172268 - DNA, 1080 bp, Artificial Sequence
  derived and/or modified sequence
atgatcctcaattccagcactgaggacggtatcaaacgaattcaagatgattgtccgaaagccggcaggcacaattacatattcgtcatgattcctaccttgtactctatcatttttgtcgtggggatctttggaaactcgctggtagtgatcgtgatttatttctacatgaaactcaagaccgtcgcctccgtgttccttctgaacctagcccttgccgatttgtgtttcctgctcactctcccgctgtgggccgtctacaccgcaatggagtataggtggcctttcggtaattatctgtgcaagatcgcctccgcctcagtcagcttcaatctatatgcctctgtttttctgctgacgtgtctttctatcgataggtatctggctatagtccaccctatgaaatccagactccgccgcacaatgcttgtagctaaggtcacttgtatcattatctggctcttggctggtttggccagtctgccggctattattcaccggaatgtcttttttatcgagaatactaacatcacagtatgtgcattccattacgagtcccagaactcaaccctgccgatcggcctgggcctcacgaagaatattctaggattcttgtttccattcctgatcatacttacgtcctataccctgatttggaaggctttaaaaaaagcttacgaaatccaaaagaacaagccgcggaacgatgatatcttcaagataatcatggcgatcgtacttttcttcttcttcagctggatacctcaccagattttcacttttcttgacgttcttatccagctgggcattatccgggattgcaggatcgcggatatagtagataccgccatgcctataacaatttgtatcgcctatttcaacaattgcctgaatcccctgttctacggctttttgggaaaaaagtttaagaggtactttctgcagttattaaaatacatccctcccaaagctaagagccattctaatttatctaccaaaatgtcgacactgtcctacaggccttccgataacgtgagctcgtccacaaaaaagcctgctccgtgcttcgaggtggaatag

SEQ ID NO: 172269 - DNA, 1080 bp, Artificial Sequence
  derived and/or modified sequence
atgatcctgaatagctccactgaggacggaatcaagcgaattcaggacgactgtcccaaggcaggccgtcacaactatatttttgttatgatacccaccctgtattccattatctttgtggttggaattttcggaaattccctggtagtcatagtcatctatttctatatgaagcttaagacagttgcctctgtgtttctgcttaacttggctctggccgatctctgtttcctcctcaccctcccactgtgggccgtgtatactgccatggagtaccgctggcctttcggcaattacctgtgcaagattgcctcagccagcgtgtcatttaatctgtacgcctcggtgtttctgcttacctgcctgtccatcgatcgttacctggctattgttcacccgatgaagtccaggctgcggagaactatgttagtggccaaggtgacatgcatcatcatttggttgctggcagggttagccagtcttccagccataatccaccggaatgtctttttcatagagaatacaaatataaccgtgtgtgcatttcactacgagagccaaaactctactctgcctatcggcttgggcctgaccaagaatattttggggtttctttttccctttctgattattctgacttcatacacattgatctggaaggcgcttaaaaaggcctacgaaatccagaaaaacaaacctcggaacgacgacatttttaagatcatcatggcaatcgtgctctttttttttttctcttggatcccccaccagatatttacattcttggatgtgctaatacagctcgggataatccgcgactgccgcattgccgacatagtagacactgccatgccgattaccatctgcatcgcatacttcaataattgcctaaaccctttgttttatggcttcctggggaaaaaatttaaacggtatttcttacagttgctaaaatacattccgcccaaggcgaagtcacattctaatctgtccacaaaaatgagcaccttgtcttaccggccatcagataacgtgagttccagcaccaagaaaccagccccctgctttgaggtggagtag

SEQ ID NO: 172270 - DNA, 1080 bp, Artificial Sequence
  derived and/or modified sequence
atgattctcaattcctcaacagaggatggaataaaacgaattcaggacgattgcccgaaggcagggcgacacaactacattttcgtcatgattccaacattgtacagtatcattttcgtggttggcatctttggcaattctctggtggtaatcgtaatttatttctacatgaaactgaagaccgtggcctccgtctttctgcttaacctggcactagccgacctgtgctttttgcttacccttccattgtgggccgtctacacagccatggaatatagatggccattcgggaattacctgtgtaaaatcgcatccgctagcgtgagtttcaatctctacgctagcgtctttcttctgacgtgcctgtcaatcgacaggtacctggccatcgtacaccctatgaaatcaaggctgcgtaggactatgcttgtggctaaagtgacctgtataattatttggctgctcgctgggcttgcctctctgccagctatcatacataggaacgtattttttatcgaaaacactaatatcacggtatgcgcgttccactatgaatctcagaactccaccctcccaattgggctcgggttgactaagaatatactgggtttcctatttcccttcttgattatcctgacctcctacaccctgatttggaaggctctcaagaaagcgtatgaaattcagaaaaacaaaccaaggaacgatgatatatttaagattattatggcaatagtcttgttcttcttcttttcttggattcctcatcaaatattcacgtttctcgacgttttaatccagctcggcatcattagggattgtagaattgcggacatcgtcgacacagcaatgcccattaccatctgcattgcttatttcaacaactgtctcaatcctctgttctatgggtttctggggaagaagttcaaacgctacttcctgcaactgctgaagtatatccccccaaaagcaaaaagtcattccaatctgtccactaaaatgagtacactgtcgtaccgtcccagtgataacgtgagctctagcaccaaaaagcctgcaccttgttttgaagttgagtag

SEQ ID NO: 172271 - DNA, 1080 bp, Artificial Sequence
  derived and/or modified sequence
atgatacttaatagctcgaccgaagatggcatcaaaagaattcaggatgattgtcctaaggctgggagacataactatatcttcgtcatgataccgacgctctactccattatcttcgtggtaggcattttcggtaacagtttggtcgtcatcgtcatttacttctacatgaaactcaaaaccgtggcgtcagtcttcctgctgaacctcgcactcgccgatctgtgtttcctcctgactttgcctctgtgggctgtctatacagccatggagtacaggtggcccttcggtaactacctctgtaaaatcgcttctgcaagcgtgtcctttaacctatacgcttctgtttttctgctgacatgtctgtcaatagaccgctatttagccatcgttcatcccatgaaaagcaggttgcgcagaacgatgcttgtcgccaaggtgacttgtatcataatttggctattggccggcttggccagtctgcccgcaattattcatcggaatgttttcttcatcgaaaatacaaatatcaccgtctgtgcatttcattacgagagccagaattccacactaccaattggtctgggactgactaagaacatcctcgggtttctgtttcccttccttattatcctgacttcatatacactcatctggaaggccctgaagaaagcttacgagattcaaaaaaacaagccaaggaatgacgatatttttaaaattattatggcaattgtgttgttctttttcttcagctggattccccaccaaatctttacatttctggacgtgttgatccagttggggataatccgggattgccgaattgccgatatcgttgatacagccatgccaatcactatctgtatcgcgtatttcaacaactgtctaaaccccttgttttacgggttcctcggcaagaaattcaaaaggtacttcttgcaattattaaaatacatccctccaaaagcaaaaagtcattccaatttatctaccaaaatgtctacactctcatataggccctctgacaatgtgagcagctcaaccaagaaacctgcaccatgtttcgaagtcgagtag

SEQ ID NO: 172272 - DNA, 1080 bp, Artificial Sequence
  derived and/or modified sequence
atgatacttaactcatctacagaagacggcattaagaggatccaggatgattgccctaaggcagggcggcataactatatcttcgtcatgatcccaacactttacagcataatcttcgtggtcggtatattcgggaattcactggtggtgatcgtgatctatttctatatgaaacttaaaactgtagcctccgtgttcctcttgaacctagcgctcgccgacctatgttttctgctaacattacctctttgggcggtgtacactgcgatggaatacaggtggcctttcggaaattacctctgtaaaatagctagcgcatcggtgagctttaacctatacgcaagcgttttcctgctgacctgtctatccatcgatcgctatctggcgattgtccacccaatgaaatcccgtctgcgccgaactatgcttgtagccaaggtcacctgtattattatatggctcctggctggcctggcttctctgcctgccataattcacaggaatgtgttttttatagagaataccaacataacagtttgcgcgttccactacgagtcccagaattcaacgctgcctataggtttgggtttgactaaaaacatcctagggttcctgttcccatttttgatcatccttaccagctacacactgatatggaaggctctcaaaaaagcttacgagatccaaaagaacaagcctagaaacgatgacatctttaagatcataatggcgatcgtgctgttcttctttttctcgtggatcccccatcaaatttttaccttcctggacgttttgattcagttaggtatcattcgcgactgtcgaatcgccgacatcgtcgacaccgcaatgcccatcaccatctgtatcgcctattttaataactgtctcaacccattattttacggcttcctgggtaaaaagtttaagcgctatttcctgcagctgttaaagtatatcccccccaaggccaaatctcacagcaatttgagtactaaaatgagtacgctgtcctaccgtccttcagataatgtcagtagctctaccaagaagcctgccccttgcttcgaggttgagtag

SEQ ID NO: 172273 - DNA, 1080 bp, Artificial Sequence
  derived and/or modified sequence
atgatcctaaacagttctacagaggatggaattaaacgaatacaagacgattgccccaaggctggtcgccacaattatatctttgtaatgatcccaactctctattccatcatatttgttgtcgggatttttggcaactctttggttgtaatcgtcatctatttttatatgaaattgaagaccgtcgcctcagttttcctcttaaatttggcactagcagatctgtgctttttgctgacattacccctgtgggccgtctacactgcaatggagtaccggtggccctttggaaactacttatgcaaaatagcaagcgcttcagtctcttttaatctctatgcgtccgtgtttcttctcacttgccttagcatagacagatacctggcgatcgtgcaccctatgaagagtcgccttcggcgtaccatgttagtagctaaggtcacctgcatcataatctggcttctggccgggctggcttcactgcccgctattattcaccgaaacgtcttctttatcgagaacacaaatatcactgtgtgcgccttccactatgaaagccagaattcaactcttcctattggcttggggctaaccaaaaacatcctgggattccttttcccctttctgatcatcctcacgagctataccctgatttggaaggcactgaagaaggcctacgagatccagaagaacaaaccaagaaatgatgatatcttcaagattattatggccattgttctcttcttttttttcagctggatcccacatcagatctttaccttcctggatgtactgatccagttgggcattatccgggactgtagaattgccgatatcgtcgacacagccatgcctattaccatatgcattgcttacttcaacaactgcctgaacccgctgttttatggattccttgggaaaaaatttaaaagatatttcctccagctccttaaatatatccccccaaaagcaaaatcacatagtaacctttccaccaagatgagcaccctctcctataggccatcagataacgtgtcctcatcaacaaagaaacccgcgccttgctttgaggtggagtag

SEQ ID NO: 172274 - DNA, 1080 bp, Artificial Sequence
  derived and/or modified sequence
atgatcttgaacagctccaccgaagacggaataaaaaggatacaagatgactgccctaaagcgggtcggcataactacattttcgtgatgattccgaccttgtattccattatatttgtggtgggaatcttcggcaattccctcgtcgtaatagtgatttacttttatatgaagttaaagactgtcgcatcagtgttcctgctaaacctggcactggccgatctgtgcttccttctaacactccccctgtgggccgtgtacaccgctatggaatataggtggcccttcgggaactacttatgcaaaattgcctctgcctccgtgagctttaacttatacgccagcgtattcctgctgacatgcctgtccatcgataggtacctggcaattgtgcatcccatgaaatctcgcctcaggagaaccatgttggtcgccaaagtgacgtgtatcatcatctggctcctcgcaggtctggcctctcttcctgcaattatccacagaaatgtctttttcatagagaacaccaatatcacagtgtgtgcatttcattatgaaagtcagaacagcactcttcccataggcttggggctaactaaaaatattctcggctttctctttccttttttaattatattgacgagttacacactcatatggaaagctctgaagaaagcatatgaaatccagaaaaacaaacctcgcaatgatgatattttcaagattattatggctattgtgctcttcttttttttttcgtggattccgcaccagatctttacattcttggacgtgctgatccagttggggatcattagggattgtcgtattgcagacatcgttgacaccgccatgccaattaccatctgcatcgcttatttcaataattgtcttaaccctctgttctatggtttcttgggaaagaagttcaagaggtatttccttcaactgctgaaatacattcctcctaaggccaagtctcactcaaacctttcaaccaagatgtcaaccctttcttaccggcccagtgataatgtgagctcatctacaaagaaaccggccccctgcttcgaggttgagtag

SEQ ID NO: 172275 - DNA, 1080 bp, Artificial Sequence
  derived and/or modified sequence
atgatcttaaacagctccacagaggatgggatcaagcgaatccaggacgactgcccaaaggcaggaagacacaactacatattcgtgatgataccaacactgtactctatcatcttcgtagttggaatcttcgggaattcactagtggtgattgtgatttacttctatatgaagctcaagaccgtcgcaagcgtgttcctgctgaatcttgcgctagccgacctgtgctttcttctgaccttaccactctgggccgtctacacagcgatggaatatcgctggccattcggtaattatctttgtaagattgcgtcagcgagtgttagcttcaacctgtacgccagcgtgtttctgcttacctgtttgtctattgatcgttacttagccatagtccatccgatgaagtcaagactgcgccgaacaatgctggtggcaaaagtcacatgcatcattatatggctgctggcaggcctggctagtttacccgcaatcattcacaggaatgtctttttcatagagaacacaaatataaccgtttgtgcctttcattacgagtctcaaaacagcacattaccaataggcctgggccttacaaagaatatactgggcttcctcttcccatttttaatcattcttaccagttacacgctgatctggaaagccctgaagaaggcatatgagatccaaaaaaacaagcctcggaacgacgatatctttaagatcataatggcgatcgtcctgttcttcttttttagttggattccccaccagatcttcacattcctggatgtgttgatccagctcggtattatccgcgattgtcgaatcgcggacattgttgacaccgctatgccaatcactatctgcatcgcttacttcaataactgccttaacccgttattttatggcttcctgggcaaaaagttcaagaggtactttctccagctcctgaaatatatccctccaaaggcaaagtcacactccaaccttagcaccaagatgagcaccctcagttaccggcctagcgataacgtgtcgagttctactaaaaaacccgcaccctgctttgaagtggaatag

SEQ ID NO: 172276 - DNA, 1080 bp, Artificial Sequence
  derived and/or modified sequence
atgatcctgaacagcagcacagaagatggcatcaagaggatccaggatgactgccccaaggccggccgccacaactacatctttgtgatgatccccaccctgtacagcatcatctttgtggtgggcatcttcggcaacagcctggtggtgattgtcatctacttctacatgaagctgaagacagtggccagcgtcttcctgctgaacctggccctggccgacctgtgcttcctgctgaccctgcccctgtgggccgtgtacacagccatggagtaccgctggcccttcggcaactacctgtgcaagatcgccagcgcctctgtgtccttcaacctgtatgcctctgtgttcctgctgacctgcctgagcattgaccgctacctggccatcgtgcaccccatgaagagccggctgcggaggaccatgctggtggccaaggtgacctgcatcatcatctggctgctggccggcctggccagcctgcctgccatcatccacagaaatgtgttcttcatcgagaacaccaacatcaccgtgtgtgccttccactatgagagccagaacagcaccctgcccatcggcctgggcctgaccaagaacatcctgggcttcctgttccccttcctgatcatcctgaccagctacaccctcatctggaaggccctgaagaaggcctatgagatccagaagaacaagcccagaaatgatgacatcttcaagatcatcatggccatcgtgctcttcttcttcttctcctggatcccccaccagatcttcaccttcctggatgtgctgatccagctgggcatcatccgggactgcagaattgctgacatcgtggacacagccatgcccatcaccatctgcatcgcctacttcaacaactgcctgaaccccctcttctacggcttcctgggcaagaagttcaagcgctacttcctgcagctgctgaagtacatcccccccaaggccaagagccacagcaacctgagcaccaagatgagcaccctgagctaccggcccagcgacaacgtgagcagcagcaccaagaagccagccccctgctttgaggtggagtag

SEQ ID NO: 172277 - DNA, 1080 bp, Artificial Sequence
  derived and/or modified sequence
atgatcctgaacagcagcaccgaggacggcatcaagcggatccaggacgactgcccaaaagcaggccggcacaattacatatttgtaatgatcccaaccctttactctattatcttcgtggtggggattttcggcaattccttagtggtgatagtgatctatttttacatgaaactgaaaaccgtggcttcggtgtttttattgaatctggcgctggctgacctctgcttcctgctaaccctgccgctgtgggcagtgtacactgctatggagtacagatggccttttggcaactacctgtgcaagatcgctagcgcctctgtatcttttaatttatacgctagcgtcttcctgctgacatgtctttcaatcgatagatatctggccattgtgcacccgatgaaaagcagactacgtagaaccatgttagttgctaaggtaacctgtataatcatctggctgctggctggcttagcttcattaccggccataattcatcgcaacgtcttttttatcgagaacacaaacatcaccgtttgtgcctttcactatgaaagtcagaattcaacgctacctatcgggctcggccttacaaagaatatcctggggttcctcttccctttcctgatcattttaacctcatatacacttatctggaaagccctcaaaaaggcctacgagattcaaaaaaacaagcctagaaatgacgacatctttaaaatcattatggccatagtgctgtttttctttttctcttggatcccacaccaaattttcacctttcttgacgtcctgatccagcttggtatcatcagggactgcaggatcgctgatattgttgatactgcaatgcccatcaccatctgcattgcctacttcaacaattgtctcaacccgctgttttacggcttcctgggtaaaaagttcaaacggtatttccttcagcttttgaaatacataccgcctaaggcaaaatcccattcaaacctgagcaccaaaatgagtaccctgtcgtacagaccgtcggataacgtaagcagctctaccaagaaaccagccccctgctttgaggtcgagtag

SEQ ID NO: 172278 - DNA, 1080 bp, Artificial Sequence
  derived and/or modified sequence
atgatcctgaacagcagcaccgaggacggcatcaagcggatccaggacgactgcccaaaggccgggaggcacaactatatctttgtgatgattcccaccctgtattcaataatctttgtcgtgggcatttttgggaactcactcgtggtcatagttatctatttttacatgaagctcaagaccgttgcgtcagtgttccttctgaacttagcccttgccgacctgtgcttcctgctgaccctgcctttatgggctgtgtataccgcaatggagtatagatggccttttggtaactacttatgtaagattgcatctgccagtgtgagtttcaacctgtatgcctctgtgttcctgcttacatgtctgagtatcgacaggtatctggccatcgttcaccccatgaagagccgactgaggaggacaatgctggtggcaaaggttacttgtattattatttggctgcttgcaggcctggccagcctgcctgcaataattcacaggaacgtgttcttcattgaaaatacaaatatcaccgtttgcgccttccactacgaaagccagaacagcaccttgcctatcggtttaggcctaacaaagaacatactggggtttctgttccccttcctgataatactgaccagctacactctaatttggaaagcactgaagaaggcctatgagattcagaaaaacaagcctcgaaatgacgatattttcaagatcatcatggctatcgtgctgttctttttcttctcttggatccctcatcagatctttacattcctggatgttctcatccagctgggcattataagagactgccgtatcgcggatattgtcgacactgccatgcccatcaccatctgtatagcctactttaataactgtctcaacccactcttttatggcttcctgggcaagaaatttaagagatattttctgcagcttctgaaatatattccgccaaaagctaagtcccattcgaatctgagcaccaaaatgagtacgctgtcctacaggccttcagataatgtgtcctcatctactaaaaaacctgccccgtgctttgaagtcgagtag

SEQ ID NO: 172279 - DNA, 1080 bp, Artificial Sequence
  derived and/or modified sequence
atgatcctgaacagcagcaccgaggacggcatcaagcggatccaggatgactgccctaaggccggccggcacaactacatctttgtcatgatccctaccctgtatagtatcatttttgtggtaggaatctttggaaacagcctggtggtgattgttatttacttttatatgaaattgaaaaccgtagcgtcagttttccttctcaatctcgcactcgcagacctttgtttccttttaacgctgccactttgggccgtttacacagcaatggagtaccggtggccctttgggaattacctgtgtaaaatcgcttccgcatccgtctcttttaatctgtacgcttcagtgtttttgctgacttgcctgtcgatcgacagatacttggcaattgtgcatcccatgaaaagcagattaaggagaacaatgctcgtagcaaaggtaacatgtatcatcatctggctgctggcaggcttggcctctctacccgccataatccacagaaatgtatttttcattgaaaacaccaatatcacagtgtgtgcattccactatgaatctcaaaactctaccttgccaattggactgggcctgaccaagaatattctaggattcctgtttcccttcctaatcatcctgacctcctatacgctgatttggaaagcccttaagaaagcctatgagattcagaagaacaaacctcggaatgacgatatttttaaaataattatggctattgtcctcttcttctttttttcttggattccccaccagatcttcacatttttggatgtcctcatccaactggggatcatccgagactgtcggatcgctgatatagttgacaccgctatgccgatcactatttgtattgcctattttaataactgtctcaaccctctcttttatggatttttgggcaagaaatttaagaggtatttcctgcaactccttaaatacataccccctaaggcgaaatcccatagcaatctgagcaccaaaatgtctactctgtcatataggccctctgacaatgtctcatcttccacaaaaaagccggctccctgttttgaagtggaatag

SEQ ID NO: 172280 - DNA, 1080 bp, Artificial Sequence
  derived and/or modified sequence
atgatcctgaacagcagcaccgaggacggcatcaagcggatccaggacgattgtccaaaggccggccggcacaactacatcttcgtcatgattccgaccctgtacagcatcatattcgttgtgggcatcttcggtaattctttggttgttattgtgatttacttctacatgaaattaaagacagtggcatctgtgttcttactgaatttggccctcgctgacttatgttttctgttgacactccctctatgggccgtgtacacagccatggaatacaggtggccgttcggcaattacctgtgtaagatcgcaagtgcctctgtttcctttaacctctatgccagtgtctttttgctgacttgcctgtccatcgaccgttacctggccattgtgcacccaatgaaatctcgcctgaggcggactatgctcgtcgctaaggttacttgcataattatttggctactggccgggcttgccagcctgcctgccataatccacaggaacgtgttctttatagaaaacactaacattactgtatgtgcatttcattatgaaagtcaaaactcaaccctgcccattggcctgggcctcacaaaaaacattctgggcttcctgtttcctttcctcattatcctaaccagttacacactcatttggaaagcgctaaagaaagcctatgagatccagaaaaacaaacccagaaatgacgatatatttaagatcataatggccatagtgttgttcttttttttttcatggatcccgcaccaaatctttacattcctagacgtgctgatacaattgggtatcatccgcgattgcaggattgccgatattgtcgacacagctatgcctatcactatatgcattgcctactttaacaactgtctaaaccctctcttttacgggttcctgggtaaaaagtttaagcgttatttcctacagctcctgaaatacattccacccaaagctaaatctcactcaaacctctctacaaagatgtccaccctgtcttacagacctagtgataatgtgtcctcatctacaaagaagcccgcaccgtgcttcgaggtggagtag

SEQ ID NO: 172281 - DNA, 1080 bp, Artificial Sequence
  derived and/or modified sequence
atgatcctgaacagcagcaccgaggacggcatcaagcggatccaggacgactgcccgaaggccggtagacacaactatatctttgtgatgataccgaccctctactctattatcttcgtggtagggatctttggcaactcactcgtggttatcgtgatatacttctacatgaaattgaaaacagtcgcgtccgtattcttgcttaacttggctctggctgatctctgtttcctgctcacacttcccctgtgggcagtctatacagcaatggagtacaggtggcctttcggaaactatctgtgtaagatagctagcgcctcggtgtccttcaacttgtatgcctccgtatttttgctcacctgtctgtcaatcgaccggtacctggcaatcgtgcacccaatgaagtctcgtctcagacggaccatgctcgtcgcgaaggtgacttgtattattatttggttattagccggactcgcaagcctccctgcgataattcaccgtaacgtgtttttcatagagaacaccaatattactgtgtgtgcattccattatgaatctcagaacagcacattgcctataggcctcgggctgaccaagaacattctagggttcctgtttccttttttgataattttgacctcttatactcttatatggaaagcattaaagaaggcctatgagattcagaaaaacaagcctcggaatgatgatatttttaaaatcatcatggccatcgttctcttcttctttttttcttggattccgcaccagatttttacctttctcgacgttctgatccagctgggtattatccgcgactgcaggattgctgacatcgttgataccgctatgcctatcactatctgtatcgcctatttcaacaactgcctgaatccgcttttttatggctttctaggaaaaaagtttaagcgatacttcttacaactgctgaaatacatcccccccaaggcaaaaagccattccaatctgagcacgaaaatgtcaacactatcctatcgaccctccgacaacgtgagctcttctacgaagaagcccgcaccgtgcttcgaagtggagtag

SEQ ID NO: 172282 - DNA, 1080 bp, Artificial Sequence
  derived and/or modified sequence
atgatcctgaacagcagcaccgaggacggcatcaagcggatccaggatgattgtcctaaggctgggcggcacaattatatcttcgtcatgataccaacactgtattctataattttcgtggtcgggatcttcggcaactctctagtcgtaattgtgatttatttctatatgaaactgaaaaccgtggcctcagtgttcctgctaaacctggcattagcggacttgtgttttctactgacactgcccttatgggcagtgtacaccgccatggaatatcgttggcctttcggaaattatctgtgcaagatcgcgtctgcctctgtatcttttaacttatacgcctccgtgtttcttcttacctgcctctccatcgaccgctacctagccattgttcacccgatgaagtcgaggttgagaagaacgatgttggtagctaaagtcacgtgtatcattatttggctcctagctggcctggccagcctccctgcaatcatacatagaaacgtgtttttcatcgagaacacgaacatcacagtttgtgcattccactacgagtcccaaaatagcaccctgcctatcggcctcggcctgacgaaaaacatcctgggattcctgttcccatttttgatcatcctcacttcatacacccttatctggaaagcattgaagaaggcctacgagattcagaaaaataagcctaggaacgacgacatcttcaaaattatcatggcaatcgtgctgtttttcttcttttcctggattccacaccagatctttaccttcttggatgtcctaattcagctaggaatcatcagagattgccgaatcgctgacatcgtcgacaccgcaatgcccattaccatttgtattgcctactttaataactgcctgaaccccttgttttatggattcttgggaaaaaaatttaaacgatatttccttcagctgctaaagtatattccacccaaggctaagagccatagcaatctctccaccaaaatgagtaccctgtcttaccgcccaagcgacaatgtcagctcctccacaaaaaagcccgctccttgtttcgaggtggagtag

SEQ ID NO: 172283 - DNA, 1080 bp, Artificial Sequence
  derived and/or modified sequence
atgatcctgaacagcagcaccgaggacggcatcaagcggatccaggacgattgcccaaaagccggccgccacaattacatttttgtcatgattccaaccctgtacagcatcatcttcgttgtaggaattttcggcaacagtttagttgtaatcgttatatatttctacatgaaattaaaaaccgttgcttccgtcttccttctgaatttggctttagctgatctctgcttcttgctaactctgcctctgtgggccgtgtacaccgccatggaatatcggtggcctttcggaaactacctatgtaagatcgcctccgcatccgtgtccttcaacctctacgcttctgtttttctcttaacatgcttgtcaattgacaggtacctcgctatcgtccaccccatgaaaagtaggctgagacggacaatgctagtcgcaaaggtaacttgcattatcatctggcttctggctggcctggctagcctgcctgccattatacaccggaacgtgttcttcattgagaatacaaatataactgtatgtgccttccattacgagagtcaaaactcaacacttcccatcggcttggggctgacgaagaatatcttggggtttcttttcccattcctcattatcctgacaagctacacgcttatctggaaggccctgaagaaagcatacgagatccaaaaaaacaagcccaggaacgatgatattttcaaaattatcatggctattgtgctgttctttttcttcagttggatcccccatcagatctttactttcctcgacgttttgattcagctgggcattattagggattgtcgaatagcggatattgtagacaccgctatgcctatcaccatttgtattgcttacttcaacaactgtctaaaccctctcttctatggtttcctaggtaaaaagtttaagaggtatttccttcagctactgaagtatatcccgcccaaagctaagagccattctaacctgtccactaaaatgagtacgctgagttaccgtccatcagacaacgtgtcatcgagtactaaaaagccagctccctgctttgaagtggaatag

SEQ ID NO: 172284 - DNA, 1080 bp, Artificial Sequence
  derived and/or modified sequence
atgatcctgaacagcagcaccgaggacggcatcaagcggatccaggacgactgccctaaagccggcagacacaattatatctttgtaatgatccctactctttatagcattattttcgtcgtcggaatattcggaaactccctggtggtgatagtaatctacttttatatgaagctgaagacggtcgccagtgtctttctgctgaatctggccctggccgacctttgtttcctgctgactctccccctgtgggctgtgtacaccgcgatggaatatagatggccatttggaaactatttgtgcaaaatcgcctcagcaagtgtgagctttaacctctacgcgtcagtctttctgctcacttgcctctccattgaccgatacctggccatagtccaccccatgaagagccggctcagacgcaccatgctggtcgcgaaggtgacatgtattataatttggctgttggcgggactggcttcactgcctgcaattatccacagaaatgtttttttcatcgagaacacgaacattactgtgtgtgcctttcattatgagtcacagaatagcactcttccaatcgggcttggtctcacaaagaatatactgggtttcctgtttccgttcctcattatattgacaagttacaccctgatctggaaggccctgaaaaaggcctacgagatacagaagaataaacctcgaaatgacgatatctttaagatcattatggctatcgtgctgttcttctttttttcctggatcccccatcagatttttaccttccttgatgtgctcatccagctggggatcattcgggactgtcggatcgcagacatcgtggacaccgccatgccaattacgatctgtattgcctattttaacaactgcctgaatccactgttttacggcttcttaggaaaaaagttcaaaagatatttcctccagctgctcaagtacattccccccaaagcgaaatctcactcaaaccttagcaccaagatgagcaccctatcctatcggccaagtgacaacgtttcctcttctacaaagaagcccgccccctgcttcgaggtcgaatag

SEQ ID NO: 172285 - DNA, 1080 bp, Artificial Sequence
  derived and/or modified sequence
atgatcctgaacagcagcaccgaggacggcatcaagcggatccaggatgactgccctaaagctggtaggcacaattacatcttcgtcatgattcctaccctttacagtattatcttcgtggtgggaatctttggcaactcacttgtggtcatagttatttatttttacatgaaactaaagacagttgcatcagtgttccttcttaatctggcgctggcggacttgtgtttcctgttgaccttgccactctgggcagtgtacactgcgatggaataccggtggccctttgggaactatctatgcaaaattgcatctgcctctgtctcatttaacctttatgcgagtgtgttcctgcttacctgtctgtctattgatcgctacttggctattgtgcatcccatgaagagtcggcttcggcgcacaatgctagtcgccaaggtgacatgcatcataatctggttgctcgccgggctggcctcactgcccgcaatcatccatagaaatgtcttctttattgagaacaccaacataacagtctgcgccttccattacgaaagtcagaattccaccctgccgataggcctggggctgaccaagaatatcctgggttttctttttccctttctcatcattctgacttcctatactctcatctggaaagcattaaagaaagcatacgaaatccaaaaaaataagcctagaaacgacgatatctttaaaattatcatggctatagtcctgttcttttttttttcttggattccacatcagatcttcacctttctggacgttctgatccaacttggtattatcagggattgcagaatagcagatatcgtggacaccgccatgcccataacaatatgcatcgcttacttcaacaattgccttaaccccctcttctatgggttccttggcaagaaatttaaaaggtacttcctccagctgctaaaatatatcccacctaaagccaagagtcacagcaacttaagcacgaaaatgagcactctgtcctatagaccctcagacaatgtctcctcctctacaaagaaaccagcaccatgttttgaggtggaatag

SEQ ID NO: 172286 - DNA, 1080 bp, Artificial Sequence
  derived and/or modified sequence
atgattttgaattcttccacggaggatgggattaagcggattcaggatgactgcccaaaagcgggaaggcacaactacatattcgtgatgatccccacgctttactctattatcttcgttgtgggcattttcggcaactcgctggtggtgattgtaatctacttttacatgaagcttaagactgtcgcttctgtatttctgctgaacctggcactcgcagacttgtgttttcttcttacccttccgctgtgggccgtgtacaccgccatggagtacaggtggccttttggcaattacctctgtaagattgcttctgccagcgtctcatttaatctttacgccagtgtgtttcttctgacatgcttgagtattgaccgttacctggccatcgttcatccaatgaagtcaaggcttagacgcaccatgttggtggcaaaagtgacttgcataattatttggcttctggcaggcttagcgtcacttcccgcaattatccaccgcaacgtttttttcatagagaatacaaacattacggtatgtgcattccattatgagtcccagaacagcactctgccaatcgggctgggacttaccaagaatatcttgggcttcctgttcccatttttgatcattctgacatcgtacacattaatttggaaagcactaaaaaaagcatatgagatacagaagaacaaaccgcgaaatgatgacattttcaaaatcataatggcaatcgtgttattcttcttcttctcttggattccgcaccagatcttcaccttcttggatgtccttatccaattaggcatcatacgggactgtcggattgcagatatcgttgataccgccatgccgattacgatttgcatagcttactttaataactgtcttaacccccttttctacggattcttgggcaaaaagtttaaaagatactttctccagctcttgaagtatattccaccaaaggcaaaaagccatagtaacttaagtacaaagatgagcactctctcctacaggccgtctgacaacgtctcttcatcgactaaaaaaccagcaccctgcttcgaagtcgagtag

SEQ ID NO: 172287 - DNA, 1080 bp, Artificial Sequence
  derived and/or modified sequence
atgattctgaactcgtcaacagaggacggcattaaaagaatccaggacgattgcccaaaagcagggagacataactatatctttgtgatgattcccaccctctattccatcatcttcgtggttgggattttcggaaatagcttagttgtgattgttatttatttctacatgaagctgaaaacggttgcatcggtgtttctactcaacttagccctggccgacttatgtttccttctcacccttcccctctgggcggtctacaccgcaatggaatacagatggccatttggcaactacctctgcaagattgcctcagcttccgtctcatttaacttatacgcttccgtgtttcttctgacatgtctcagtatcgatcgctacttggcaatcgtgcacccgatgaagtcccggctaaggcgcactatgcttgtggccaaagttacttgtattatcatctggctactggccggactggcgagtctgcccgctattatccaccgcaacgtgttcttcatcgagaacaccaacataaccgtgtgtgcctttcattatgaaagtcagaatagtaccctccccattggcctgggtctcaccaagaatatcttggggtttctgttccctttcctgatcatactgacatcctacacattgatctggaaggccttaaagaaagcatacgagattcagaagaataagcctaggaacgatgatatatttaagatcatcatggcgatagtgctcttcttcttcttcagttggattcctcatcagattttcacattcttggacgtgttgattcagttgggtatcatccgagactgcagaatcgcggacatcgtggatacagccatgccgatcacaatctgcatcgcttactttaataactgtcttaatccattattttatggctttttgggaaagaaattcaagagatatttcttgcagcttctgaagtatatcccccctaaggctaagtcacattcaaatctgagtacgaaaatgtccaccttaagttatcgtccatccgacaacgtctcatccagcaccaagaaacccgctccatgttttgaggtcgagtag

SEQ ID NO: 172288 - DNA, 1080 bp, Artificial Sequence
  derived and/or modified sequence
atgatcctcaattcatcgacagaagatgggattaagaggattcaggatgattgcccaaaggcagggaggcacaactatatttttgttatgatccccacgctgtacagcatcattttcgtggtcggcatcttcggaaattctctggtggtcatagtgatctacttctacatgaagctgaagaccgtagcctcagtgttcctgctgaatcttgcactggctgacctgtgctttcttttaactctgccgttgtgggctgtctacactgctatggagtaccgctggccattcgggaactacttgtgcaaaattgcaagcgcgagtgtgtccttcaacctttatgcctccgtgttcctcctgacctgtctgagtatcgatcggtacctcgcgattgtgcatcccatgaagtcacgcctgcgaaggacgatgctggtggcgaaagtgacatgtattattatctggttgcttgctgggctggcatcactccccgctatcatccacagaaatgtcttctttatcgagaatactaacatcaccgtgtgtgctttccactacgaaagccagaatagcacccttccaattggactcggactcaccaagaacatactcggttttctgtttccgtttctcataatccttacttcttataccctgatttggaaagcattgaaaaaagcctacgaaatccagaagaacaaacccagaaacgacgatatcttcaagatcatcatggccatagtccttttttttttctttagttggatcccacatcagatctttacttttctcgacgtgttaatccagcttgggatcattagggactgtagaattgcggatatcgtagatacggctatgccaatcactatctgtatcgcctattttaacaactgcctcaatcccctgttctacggatttctgggcaaaaagttcaaaaggtacttcctgcaactgctgaaatacatcccccctaaggccaaatcacactcgaatctgagtacaaagatgtcaaccttaagctatcggccatccgataacgtctcctcgagtaccaaaaagcctgctccatgcttcgaggtggagtag

SEQ ID NO: 172289 - DNA, 1080 bp, Artificial Sequence
  derived and/or modified sequence
atgattctcaatagctctactgaagatggaattaaaaggattcaggacgattgccccaaggctggaaggcacaactatatctttgtcatgatccccacattgtattcaattatttttgtggtaggaattttcggaaacagcctggtggttatagtgatttatttctatatgaaactcaaaaccgtggccagcgtgttccttctcaacctggcacttgcagatctatgctttctattaactttgcctctctgggctgtctacactgccatggaatacagatggccttttggtaattatctgtgcaagattgcctccgccagcgtcagctttaacctatatgcatctgtgtttttgctgacttgtctgagcattgatcgctatttagccattgtccaccccatgaaatctcgcctgaggaggacgatgctggtggccaaggtgacatgtatcatcatctggctcctggccggtctcgccagcctcccagcgatcattcaccgcaacgtatttttcatcgagaatactaatattactgtgtgcgcatttcattacgaaagtcagaattctacactgccgatcgggctcggcctaacgaaaaatattctgggttttctttttcccttcttaatcattttgacaagctacaccctgatttggaaagccctaaaaaaagcttacgaaatccagaagaacaaacccagaaatgatgacatttttaaaatcattatggcgatagtgctgttcttcttcttcagctggatcccccaccagatttttacatttctagatgtccttatacagctcgggatcatccgcgactgccgtatcgccgatattgtagacaccgcgatgccaattaccatctgtattgcttactttaacaattgcctgaaccccttgttctatggtttcttagggaagaagttcaagagatattttctccagctcctaaagtacatcccaccaaaagctaagtctcattctaatctgtcgactaagatgagcacactctcctatcgcccatctgacaatgtctcaagtagtactaagaaacctgcaccttgcttcgaggtggagtag

SEQ ID NO: 172290 - DNA, 1080 bp, Artificial Sequence
  derived and/or modified sequence
atgattttaaacagctccaccgaggacgggatcaagaggatacaagatgattgtcccaaggccggacggcacaactatatttttgttatgatacccaccttatactctattatcttcgtcgtaggtatcttcgggaatagcttagtcgtgatcgttatctacttctatatgaaattgaaaaccgtggcatccgtttttctcctgaacttagcacttgcagacctatgtttcctgctgaccttaccactgtgggctgtgtacaccgcgatggagtaccgatggccctttggaaactatctatgtaagattgctagcgccagtgtgtctttcaacttatacgccagcgtctttctgttaacctgtttgtccatagaccggtatttggccattgtgcatccaatgaagtcaaggctacgacggaccatgctggtggccaaagtgacttgtatcataatctggttgcttgcaggccttgcttccttgcctgccataatccacagaaacgtgttctttatagaaaatacaaatatcaccgtgtgtgcatttcactatgaatcacagaatagtacgctcccgatagggctaggccttacgaaaaatatcctgggctttctgttcccctttttaattatcctgactagttacaccctgatctggaaggccttgaaaaaggcttacgagatccagaaaaataaaccaagaaatgatgacattttcaagatcattatggccatcgtcctctttttttttttctcctggatccctcaccagatcttcacatttctcgacgttttgatccaactcgggattatccgagattgcaggatcgctgacatcgtggacacggccatgcccattacaatctgcatcgcttatttcaataactgtctcaaccctctgttctacggattcttgggcaagaaatttaagaggtacttcctccagctgctaaaatatattcccccaaaggctaaatcccacagcaatttatctaccaaaatgtcaaccctgagttacaggccttccgataacgtatcttcatccactaaaaaaccagcaccttgtttcgaggtagaatag

SEQ ID NO: 172291 - DNA, 1080 bp, Artificial Sequence
  derived and/or modified sequence
atgatcctgaactcttcaaccgaagacggtatcaaaaggatacaggatgactgcccaaaggcaggacggcacaactatatcttcgtgatgataccaactctttattcaatcatctttgttgtggggattttcggtaacagcctagtcgtaatcgttatctacttttacatgaaacttaaaacagtcgcatctgtcttcctgcttaaccttgcgctcgccgacctgtgtttcctgctcactctgccgctctgggccgtatatacggctatggagtatcgctggccgttcggcaactatctgtgtaagatcgctagcgcaagtgtgtctttcaatctttatgcctctgtgtttctgttgacctgtctatctattgatcggtatctcgcaattgtgcatcctatgaaaagccgtctccgtcgcacaatgctggtggctaaagtgacctgtatcattatatggctcctcgcaggactggcttcactcccggctatcatccatcgaaacgttttctttattgagaataccaacatcacagtttgtgctttccattatgagtctcagaactctacgctgccgatcgggctcggtttgacaaagaacatccttggattcctttttcccttcttaatcattctgaccagctacaccctcatttggaaagccttgaaaaaggcttatgaaatccagaaaaataaaccaaggaacgacgatattttcaaaattatcatggccattgtgctgtttttctttttctcttggatcccacatcaaatctttacgtttctggatgtgttgatccagttggggatcattcgcgattgtagaatcgcagacattgtggataccgctatgccaattactatttgcatcgcttactttaataattgcctgaatcctctcttttacggctttctgggaaaaaaattcaaaaggtactttcttcagctgcttaaatacataccgccaaaggcaaagtctcattcaaacctttcaaccaaaatgagcactctttcttacaggccttctgacaacgtgagcagttcgactaagaaacccgctccgtgtttcgaggtggagtag

SEQ ID NO: 172292 - DNA, 1080 bp, Artificial Sequence
  derived and/or modified sequence
atgatcctgaactccagcacagaggacgggatcaaaagaatccaggacgactgtccaaaggctggccgacacaactatatatttgtcatgatcccaactctgtactctataattttcgtcgtcggcatctttggcaactctcttgtcgtgattgtcatctacttctacatgaaattaaagacagtcgccagtgtgttcctgctaaatctggccctggccgatctgtgcttcctgctcaccttaccactctgggctgtctacacagcaatggaatacaggtggcctttcggaaattacctgtgcaaaattgcatctgccagcgtttcgttcaacctatacgcttcggtgtttctgcttacgtgcctctccatcgataggtacctggctatcgtccaccccatgaagtcccgattgcgacggacaatgttggtggctaaagtaacttgtataatcatttggctgctcgcgggactggcctcactgccagctattattcacaggaatgtcttctttatcgaaaatactaatatcaccgtctgcgcatttcactatgagtcgcagaattctacactccctataggcctggggctgacaaagaacattctgggctttcttttccccttccttattatcctcacttcttacaccctgatttggaaggccttgaagaaggcctacgagattcagaaaaacaagcccaggaatgacgacatcttcaaaatcatcatggccattgtgctgttcttctttttcagctggattccccaccaaatatttacatttctggatgtactgatacagcttggcatcatccgcgactgtaggatcgctgacatcgtggataccgctatgcccattacaatttgcatagcttacttcaacaactgcctcaaccccctcttttatgggttcttgggaaagaagttcaagcgttatttcctgcagctcctgaaatatatccctcccaaagcaaaatcccattccaacttatcaactaagatgtctacactgtcatatcggccaagcgataacgtctcatcttctacaaagaaaccggcaccttgtttcgaagtggagtag

SEQ ID NO: 172293 - DNA, 1080 bp, Artificial Sequence
  derived and/or modified sequence
atgattcttaacagttcaactgaggacggtatcaaacggatccaggacgactgccccaaagccggaaggcacaactatatcttcgtgatgatacccacactatactccatcatcttcgttgtgggaatattcggaaatagcctcgtcgttatagtgatatatttttatatgaaactgaagaccgtggctagcgtgtttcttctcaatcttgccttggccgacctctgctttttactcaccctgccgctgtgggccgtctacaccgctatggagtataggtggccatttggcaattatttgtgtaaaatcgccagtgcctcagtttcctttaacctgtatgccagtgtattcctattgacctgtttatccatcgatagatacctggcaatcgtgcatccaatgaaaagtcgcctgaggaggaccatgttggtggctaaggtcacatgcataatcatctggctgctcgcagggctggcctccttaccggctattatacacaggaacgtcttcttcatcgagaacacaaacattaccgtgtgtgccttccattacgagagtcagaactccacgctccctatcggcttaggcctgacgaaaaacattctgggattcctcttcccatttctcatcattcttaccagttatacgcttatctggaaggcactgaaaaaggcttacgaaatccagaaaaataagccgagaaacgatgacatcttcaaaatcattatggcgattgtgctattcttttttttctcctggatcccccaccagatatttacgttcctggacgttcttatccaactaggaataatccgtgattgtaggatcgctgacattgttgataccgccatgccaattacaatctgtatcgcctattttaacaactgcctcaacccccttttttacggctttctgggcaaaaaatttaagagatactttttgcagctgcttaagtacattcctcccaaggcgaaatctcattccaatttatctacaaagatgtctaccctctcttacagaccatcggataacgtcagctcttccaccaaaaaaccggcaccttgtttcgaggtcgaatag

SEQ ID NO: 172294 - DNA, 1080 bp, Artificial Sequence
  derived and/or modified sequence
atgattttgaatagttctacggaagacggtattaaaaggattcaggacgactgtcctaaagctggtagacacaactatatcttcgttatgatccctacactttacagcattatctttgtcgtcggaatttttgggaattccctcgtggtcatcgtcatctatttttacatgaaactgaagacagtcgcatccgtgttcctgctgaatttggcgcttgccgatctgtgttttttgttaacactgcccctttgggcggtgtataccgctatggaatacagatggccattcggtaactacttgtgtaaaattgccagcgcttctgtcagttttaatctctatgcttccgtttttctcttgacgtgcctctccatcgatagatatttggctatcgtgcatcccatgaagtcaagacttcgcaggactatgctggtcgccaaggttacatgcatcatcatttggctcctagccggtctcgccagtctgccagcaatcatacacagaaacgtgttcttcattgaaaataccaacataaccgtgtgtgcctttcattacgagagccagaactccaccttaccaattggacttggcctaaccaagaacattctcgggtttctgtttcctttcctcataattctcaccagttacacactgatctggaaagcactcaagaaggcatacgagatacagaagaacaagcctaggaacgacgacattttcaagattatcatggctatcgtgctgttttttttctttagctggatcccacaccagatcttcactttcctggacgttcttatccagctgggcattatcagggattgtagaatcgcagatattgtggataccgctatgccgatcacaatctgtattgcctacttcaacaattgtctgaaccccctcttctacggatttctgggcaaaaaattcaagcgatatttcctgcagctgttgaagtatatcccaccaaaggctaaatcccatagcaatctcagcaccaaaatgtctacactgagctaccggcctagcgataacgtctcttctagtacgaaaaagcccgcaccgtgtttcgaagtggaatag

SEQ ID NO: 172295 - DNA, 1080 bp, Artificial Sequence
  derived and/or modified sequence
atgatcctgaacagcagcaccgaggacggcatcaagagaatccaggacgactgccccaaggccggcagacacaactacatcttcgtgatgatccccaccctgtacagcatcatcttcgtggtgggcatcttcggcaacagcctggtggtgatcgtgatctacttctacatgaagctgaagaccgtggccagcgtgttcctgctgaacctggccctggccgacctgtgcttcctgctgaccctgcccctgtgggccgtgtacaccgccatggagtacagatggcccttcggcaactacctgtgcaagatcgccagcgccagcgtgagcttcaacctgtacgccagcgtgttcctgctgacctgcctgagcatcgacagatacctggccatcgtgcaccccatgaagagcagactgagaagaaccatgctggtggccaaggtgacctgcatcatcatctggctgctggccggcctggccagcctgcccgccatcatccacagaaacgtgttcttcatcgagaacaccaacatcaccgtgtgcgccttccactacgagagccagaacagcaccctgcccatcggcctgggcctgaccaagaacatcctgggcttcctgttccccttcctgatcatcctgaccagctacaccctgatctggaaggccctgaagaaggcctacgagatccagaagaacaagcccagaaacgacgacatcttcaagatcatcatggccatcgtgctgttcttcttcttcagctggatcccccaccagatcttcaccttcctggacgtgctgatccagctgggcatcatcagagactgcagaatcgccgacatcgtggacaccgccatgcccatcaccatctgcatcgcctacttcaacaactgcctgaaccccctgttctacggcttcctgggcaagaagttcaagagatacttcctgcagctgctgaagtacatcccccccaaggccaagagccacagcaacctgagcaccaagatgagcaccctgagctacagacccagcgacaacgtgagcagcagcaccaagaagcccgccccctgcttcgaggtggagtag

SEQ ID NO: 172296 - protein, 570 aa, Artificial Sequence
  derived and/or modified sequence
MKEKSKNAAKTRREKENGEFYELAKLLPLPSAITSQLDKASIIRLTTSYLKMRAVFPEGLGDAWGQPSRAGPLDGVAKELGSHLLQTLDGFVFVVASDGKIMYISETASVHLGLSQVELTGNSIYEYIHPSDHDEMTAVLTAHQPLHHHLLQEYEIERSFFLRMKCVLAKRNAGLTCSGYKVIHCSGYLKIRQYMLDMSLYDSCYQIVGLVAVGQSLPPSAITEIKLYSNMFMFRASLDLKLIFLDSRVTEVTGYEPQDLIEKTLYHHVHGCDVFHLRYAHHLLLVKGQVTTKYYRLLSKRGGWVWVQSYATVVHNSRSSRPHCIVSVNYVLTEIEYKELQLSLEQVSTAKSQDSWRTALSTSQETRKLVKPKNTKMKTKLRTNPYPPQQYSSFQMDKLECGQLGNWRASPPASAAAPPELQPHSESSDLLYTPSYSLPFSYHYGHFPLDSHVFSSKKPMLPAKFGQPQGSPCEVARFFLSTLPASGECQWHYANPLVPSSSSPAKNPPEPPANTARHSLVPSYEGGSGLLVGKVGGLRTAGSRSSHGGGWQMETEPSRFGQTCPLSASK

SEQ ID NO: 172297 - DNA, 1713 bp, Artificial Sequence
  derived and/or modified sequence
atgaaggagaagtccaaaaacgcagccaaaaccagaagggaaaaggaaaatggtgagttttacgagctggctaaactgctcccattaccttccgcaattacctctcaactcgataaggcttccatcattcgtcttaccactagctatctgaagatgagggccgtcttccctgagggtctgggggatgcttggggccaacccagtagggcaggcccccttgatggtgttgccaaagagctcggttcacatctcctgcagactttagatggcttcgtctttgtagtggccagcgatggcaaaattatgtacatttctgagacagcctcggttcatttaggactctctcaggttgaattaacaggtaattccatatatgagtacattcaccctagcgatcatgacgaaatgactgccgtactgacagcacatcagccgctgcaccaccatctcttacaggaatacgaaatagaaagatcattttttctgcgtatgaaatgcgtgcttgctaaacgtaacgcaggactgacatgctctggttacaaggtgatacattgcagtggatacctgaagattcggcagtatatgctcgacatgagcctgtatgattcctgctaccagatcgtaggtttagtggcagttggacagtcccttccaccttctgctattactgaaattaaactctacagcaacatgttcatgtttcgggccagcctggacctcaaactgatcttcctggattcgagggtgacagaggtcactgggtatgagccacaggatctgatagaaaagacactctatcaccatgtccatggctgtgatgtgttccatctgcgctatgctcatcacctcttattagtgaaaggccaggtaacgaccaagtactacaggctgctctctaagcgcggtggctgggtgtgggtccagtcctatgccacagtggtgcacaactctcgatcatcccggccacactgtattgtctcagtgaattatgtactaacggagattgagtataaggaactgcagctgtccctcgagcaggtatcaactgcaaaatcacaggatagctggaggaccgcactttccaccagccaggagacgagaaagctggtgaagcctaaaaataccaagatgaagaccaaactacgcacaaatccctacccaccgcaacagtatagctcctttcagatggataagttagaatgcggacagctgggcaattggcgggccagtccccctgcaagcgccgcagcccctccagagttacagccccatagtgagagctctgatctcctgtataccccctcttattccctaccattcagttatcattacgggcactttccccttgattcacacgtattctcctccaagaaacctatgctgccggccaaatttggccagccacagggaagcccttgtgaggtggcccgcttcttcctgagtactctaccagcctccggcgaatgccagtggcattatgccaaccctttggtcccttcatcctcctccccagccaaaaaccctccagagccccctgcaaataccgccagacactctctggtgcccagctacgaaggcggatccggtctgctagtgggaaaagttggtggcctccgaacggcgggatctcgctcgtcccacggcggtggatggcaaatggaaacagagccaagtagattcggtcagacctgccctcttagtgccagcaaatag

SEQ ID NO: 172298 - DNA, 1713 bp, Artificial Sequence
  derived and/or modified sequence
atgaaggagaagagcaagaatgctgccaagacccggcgggagaaggaaaatggagagttctatgagctggccaagctgctgcccctgcccagcgccatcaccagccagctggacaaggccagcatcatccggctgaccaccagctacctgaagatgagagctgtgtttcctgagggcctgggagatgcctggggccagcccagccgggccggccccctggatggagtggccaaggagctgggcagccacctgctgcagaccctggatggctttgtgtttgtggtggccagtgatggcaagatcatgtacatcagcgagacagcctctgtgcacctgggcctgagccaggtggagctgaccggcaacagcatctatgagtacatccaccccagcgaccatgatgagatgacagctgtgctgacagcccaccagcccctgcaccaccacctgctgcaggagtatgaaattgaaagaagcttcttcctgaggatgaagtgtgtgctggccaagagaaatgccggcctgacctgcagcggctacaaggtgatccactgcagcggctacctgaagatccggcagtacatgctggacatgagcctgtatgacagctgctaccagatcgtgggcctggtggccgtgggccagagcctgccccccagcgccatcacagagatcaagctgtacagcaacatgttcatgttccgggccagcctggacctgaagctgatcttcctggacagccgggtgacagaggtgacaggctatgagccccaggacctgattgagaagaccctgtaccaccacgtgcacggctgtgatgtgttccacctgcgctatgcccaccacctgctgctggtgaagggccaggtgaccaccaagtactaccgcctgctgagcaagaggggcggctgggtgtgggtgcagagctatgccaccgtggtgcacaacagccgcagcagccggccccactgcatcgtgtctgtgaactacgtgctgacagaaattgagtacaaggagctgcagctgagcctggagcaggtgtccacagccaagagccaggacagctggaggacagccctgagcaccagccaggagaccaggaagctggtgaagcccaagaacaccaagatgaagaccaagctgcggaccaacccctacccaccccagcagtacagcagcttccagatggacaagctggagtgtggccagctgggcaactggagggccagccccccagccagcgctgctgcccctcctgagctgcagccccacagcgagagcagtgacctgctgtacacccccagctacagcctgcccttctcctaccactacggccacttccccctggacagccacgtgttcagcagcaagaagcccatgctgcctgccaagtttggccagccccagggcagcccctgtgaggtggcccgcttcttcctgagcaccctgcctgccagcggggagtgccagtggcactacgccaaccccctggtgcccagcagcagcagccctgccaagaaccccccagagcccccagccaacacagcccggcacagcctggtgcccagctatgagggcggcagcggcctgctggtgggcaaggtgggcggcctgaggacagctggcagccgcagcagccatggaggcggctggcagatggagacagagcccagccgcttcggccagacctgccccctgagcgccagcaagtag

SEQ ID NO: 172299 - DNA, 1713 bp, Artificial Sequence
  derived and/or modified sequence
atgaaggagaagagcaagaacgccgccaagacccggcgggagaaggagaacggggagttttacgagttggctaaactgctccccctcccatctgctatcaccagccaactcgacaaggcttccattattcggctcaccacaagctaccttaagatgagagcagtctttccagagggcttaggtgatgcttggggacagccgagccgggccgggccactggatggtgtggcgaaggaactgggaagccaccttttacagacccttgatgggttcgtctttgtggttgcgagtgacggtaaaattatgtacatcagtgagacggcgtccgtgcacttaggcctgtctcaggtggagctgaccggaaacagcatctacgaatacattcacccaagcgatcatgatgagatgacagcggtcctcaccgcgcatcagcctcttcatcaccatctgctccaggaatacgagatagaacgaagcttctttctgaggatgaaatgtgtgttggccaagagaaacgcaggtctgacatgttctgggtacaaggtgattcactgttccgggtacttgaaaatccgacagtacatgctggatatgtccctttacgatagctgttatcagatcgttggcctcgtggcagtgggccagtctctgccaccaagcgccattaccgaaattaagctctactccaacatgttcatgttccgggcatctctggatctcaagttgatctttctagattctcgggtgaccgaggtgactggatacgagccacaagatttaatcgaaaaaactttataccaccatgtgcatggctgcgatgtgttccatctgcggtacgcccaccaccttctccttgtgaaaggacaggtaacaaccaaatactataggctcctctcaaagcgtggtggatgggtctgggtgcagtcttacgccacggtcgtgcataatagtcgctcttccaggccccactgtatcgtgtcagttaactatgtgttgaccgaaattgagtataaagagctacagcttagcctcgagcaggtgagtaccgctaaatcccaggattcttggagaacagcactctctacatcccaggaaactcggaagctggtgaagccgaagaacacaaagatgaagacaaagttgcggacaaacccttatcctccccaacaatactcaagttttcagatggataaactcgaatgcggccagctcggcaattggcgtgccagccccccagcctccgcagccgcacccccagagttgcaacctcacagcgaaagttccgacctgctctatactcccagctattcactcccattctcttaccattacggccacttccctctggactcccacgtatttagttctaaaaaacctatgctgcctgctaagttcgggcagccccagggttccccttgcgaagtagctaggttcttcctgtcgaccctgccagcctcaggggaatgtcagtggcactatgctaatccacttgtcccctctagcagtagccctgcaaagaaccccccggagcccccagccaacaccgcacgacactcactggtccctagttatgagggaggcagtggcctcctggtgggaaaagtagggggtctgaggaccgctggctcgcggagttcacatgggggaggatggcagatggagactgaaccaagtaggtttgggcagacctgtcccttgtcggccagcaagtag

SEQ ID NO: 172300 - DNA, 1713 bp, Artificial Sequence
  derived and/or modified sequence
atgaaagaaaagagcaagaacgccgctaagacacggagggagaaggagaacggggagttctacgagctggctaagctgctccccctgccctccgctataacaagccaactggacaaggcgtctattatcagactcacaacaagctacctgaagatgagggcggtattccctgagggcttgggagacgcttggggtcagccgtcccgtgctggccctctcgatggagttgctaaggagcttggatcacatcttctccagacgcttgacggctttgtgttcgtggtggcctccgacggaaagatcatgtacattagcgaaacggcaagcgttcacctggggctgtctcaggtcgagctgaccggcaatagtatctacgaatacattcaccctagtgaccacgacgaaatgacagccgtgttaaccgcccaccagccactccatcatcacctgcttcaagaatatgaaatcgagcgtagtttctttttgcgcatgaaatgcgtgctggcgaagcggaacgctggtttgacatgttctggttacaaggtgatccattgtagtggatacttaaagatccgtcagtatatgctcgatatgtcactgtacgacagctgctatcagatcgtgggcttggtcgccgtcggacagagcctccccccatctgcaatcaccgagatcaaattgtatagtaacatgtttatgttcagggcttctctcgacttgaaactgatttttcttgatagtcgggtcaccgaggttacggggtacgaacctcaggatctgattgagaagactttgtaccatcacgtccatgggtgtgatgtttttcatctccgctacgcccaccatctactgctcgtcaagggacaggtcacaaccaaatactatcgactgctgtctaagcgcggtggttgggtatgggtgcagtcctacgccacagttgttcacaatagccgaagttcacggcctcactgcattgtatccgtgaattacgtactgaccgaaatagagtataaggagctccagctgagcctcgaacaagtctctacagcaaagagccaggatagctggcgcaccgccctctccaccagtcaggagactcggaaactcgtgaaaccgaagaacaccaagatgaagactaaattgagaaccaacccataccccccacaacagtactcgtcattccaaatggataagctggaatgtggacagctgggcaattggagagcctcacccccagccagcgctgccgctcctcctgaactgcagccccactctgaatcatctgatctgctgtacactccgtcctactctctacctttttcgtatcattacggccactttccactggatagtcacgtgttttcctccaagaagcctatgctgcctgccaaattcggccagcctcaaggttctccctgcgaagtggcaaggttctttctttccaccctacccgcttctggcgagtgccagtggcactacgcaaaccccttagtgccctctagctcctctcctgcgaagaacccgcctgagccaccagcaaacaccgctcgtcactctctcgtccccagctacgagggagggagcggcctgcttgtcggtaaggtgggagggctgcggaccgccggtagcaggtcctctcatggtgggggatggcagatggaaactgagccttcccgattcgggcagacctgcccactctccgcctccaagtag

SEQ ID NO: 172301 - DNA, 2414 bp, Artificial Sequence
  derived and/or modified sequence
ggggctccgcgggcctggagcacggccgggtctaatatgcccggagccgaggcgcgatgaaggagaagtccaagaatgcggccaagaccaggagggagaaggaaaatggcgagttttacgagcttgccaagctgctcccgctgccgtcggccatcacttcgcagctggacaaagcgtccatcatccgcctcaccacgagctacctgaagatgcgcgccgtcttccccgaaggtttaggagacgcgtggggacagccgagccgcgccgggcccctggacggcgtcgccaaggagctgggatcgcacttgctgcagactttggatggatttgtttttgtggtagcatctgatggcaaaatcatgtatatatccgagaccgcttctgtccatttaggcttatcccaggtggagctcacgggcaacagtatttatgaatacatccatccttctgaccacgatgagatgaccgctgtcctcacggcccaccagccgctgcaccaccacctgctccaagagtatgagatagagaggtcgttctttcttcgaatgaaatgtgtcttggcgaaaaggaacgcgggcctgacctgcagcggatacaaggtcatccactgcagtggctacttgaagatcaggcagtatatgctggacatgtccctgtacgactcctgctaccagattgtggggctggtggccgtgggccagtcgctgccacccagtgccatcaccgagatcaagctgtacagtaacatgttcatgttcagggccagccttgacctgaagctgatattcctggattccagggtgaccgaggtgacggggtacgagccgcaggacctgatcgagaagaccctataccatcacgtgcacggctgcgacgtgttccacctccgctacgcacaccacctcctgttggtgaagggccaggtcaccaccaagtactaccggctgctgtccaagcggggcggctgggtgtgggtgcagagctacgccaccgtggtgcacaacagccgctcgtcccggccccactgcatcgtgagtgtcaattatgtactcacggagattgaatacaaggaacttcagctgtccctggagcaggtgtccactgccaagtcccaggactcctggaggaccgccttgtctacctcacaagaaactaggaaattagtgaaacccaaaaataccaagatgaagacaaagctgagaacaaacccttaccccccacagcaatacagctcgttccaaatggacaaactggaatgcggccagctcggaaactggagagccagtccccctgcaagcgctgctgctcctccagaactgcagccccactcagaaagcagtgaccttctgtacacgccatcctacagcctgcccttctcctaccattacggacacttccctctggactctcacgtcttcagcagcaaaaagccaatgttgccggccaagttcgggcagccccaaggatccccttgtgaggtggcacgctttttcctgagcacactgccagccagcggtgaatgccagtggcattatgccaaccccctagtgcctagcagctcgtctccagctaaaaatcctccagagccaccggcgaacactgctaggcacagcctggtgccaagctacgaaggtgggtcaggtctgctcgtggggaaggtgggaggactgcgcacggccgggagccgaagcagccatggcggtgggtggcagatggagacagaaccctcacgctttgggcaaacttgccctctttctgcttctaagtagggcttgctgtgctttcttgctctcaatgcaggtgctcctcgagagtgagaaatggcagtctgcctgcctcggggacactagtgacagtataaagggcaaaggaaaaccgagtatctggccttcacgtaaatcctggccacattcaccaaccaaagggggacagtgattttcaaaaccagctcccatgtgctgagaacaccccagctgcatttcttttgcaagattcctttccactccaaccagaagtgaatatttgagacaaacggcctattggctattttcccatgccagttttggaagtggggaaaactatggtggaaatttgtgggcttggggacagaaatgccactcaccaacccagggcaaagaacacaaaccctccaggcctcagtttcttcacctgtaaaatggggtgaagctgtgatgtgcctactcccaaggacacgacacacagtagggacctgccctgtacatgctagttcaacagaaaggaatggcctttcaccttctcctggtggcaggcaagcagatgtcctctgcggagataccgccagctccccaggacgcagactgactcctgtttgctcgctggaccaaccccaggcagaaggtggaaggtgggaacagaggtttagctgcaggaca

SEQ ID NO: 172302 - DNA, 1713 bp, Artificial Sequence
  derived and/or modified sequence
atgaaggagaagagcaagaacgccgccaagaccagaagagagaaggagaacggcgagttctacgagctggccaagctgctgcccctgcccagcgccatcaccagccagctggacaaggccagcatcatcagactgaccaccagctacctgaagatgagagccgtgttccccgagggcctgggcgacgcctggggccagcccagcagagccggccccctggacggcgtggccaaggagctgggcagccacctgctgcagaccctggacggcttcgtgttcgtggtggccagcgacggcaagatcatgtacatcagcgagaccgccagcgtgcacctgggcctgagccaggtggagctgaccggcaacagcatctacgagtacatccaccccagcgaccacgacgagatgaccgccgtgctgaccgcccaccagcccctgcaccaccacctgctgcaggagtacgagatcgagagaagcttcttcctgagaatgaagtgcgtgctggccaagagaaacgccggcctgacctgcagcggctacaaggtgatccactgcagcggctacctgaagatcagacagtacatgctggacatgagcctgtacgacagctgctaccagatcgtgggcctggtggccgtgggccagagcctgccccccagcgccatcaccgagatcaagctgtacagcaacatgttcatgttcagagccagcctggacctgaagctgatcttcctggacagcagagtgaccgaggtgaccggctacgagccccaggacctgatcgagaagaccctgtaccaccacgtgcacggctgcgacgtgttccacctgagatacgcccaccacctgctgctggtgaagggccaggtgaccaccaagtactacagactgctgagcaagagaggcggctgggtgtgggtgcagagctacgccaccgtggtgcacaacagcagaagcagcagaccccactgcatcgtgagcgtgaactacgtgctgaccgagatcgagtacaaggagctgcagctgagcctggagcaggtgagcaccgccaagagccaggacagctggagaaccgccctgagcaccagccaggagaccagaaagctggtgaagcccaagaacaccaagatgaagaccaagctgagaaccaacccctaccccccccagcagtacagcagcttccagatggacaagctggagtgcggccagctgggcaactggagagccagcccccccgccagcgccgccgccccccccgagctgcagccccacagcgagagcagcgacctgctgtacacccccagctacagcctgcccttcagctaccactacggccacttccccctggacagccacgtgttcagcagcaagaagcccatgctgcccgccaagttcggccagccccagggcagcccctgcgaggtggccagattcttcctgagcaccctgcccgccagcggcgagtgccagtggcactacgccaaccccctggtgcccagcagcagcagccccgccaagaacccccccgagccccccgccaacaccgccagacacagcctggtgcccagctacgagggcggcagcggcctgctggtgggcaaggtgggcggcctgagaaccgccggcagcagaagcagccacggcggcggctggcagatggagaccgagcccagcagattcggccagacctgccccctgagcgccagcaagtag

SEQ ID NO: 172303 - protein, 355 aa, Artificial Sequence
  derived and/or modified sequence
MAFSGSQAPYLSPAVPFSGTIQGGLQDGLQITVNGTVLSSSGTRFAVNFQTGFSGNDIAFHFNPRFEDGGYVVCNTRQNGSWGPEERKTHMPFQKGMPFDLCFLVQSSDFKVMVNGILFVQYFHRVPFHRVDTISVNGSVQLSYISFQNPRTVPVQPAFSTVPFSQPVCFPPRPRGRRQKPPGVWPANPAPITQTVIHTVQSAPGQMFSTPAIPPMMYPHPAYPMPFITTILGGLYPSKSILLSGTVLPSAQRFHINLCSGNHIAFHLNPRFDENAVVRNTQIDNSWGSEERSLPRKMPFVRGQSFSVWILCEAHCLKVAVDGQHLFEYYHRLRNLPTINRLEVGGDIQLTHVQT

SEQ ID NO: 172304 - DNA, 1068 bp, Artificial Sequence
  derived and/or modified sequence
atggctttcagcggctcacaagctccttacctgtcccccgcggttccattcagcgggactatacagggaggccttcaggatggtctgcaaatcacagtgaacggcactgtgctgtcctcctctggtactcggttcgctgtgaatttccagacaggtttttctggaaatgacatcgcttttcactttaatcctcgtttcgaggatggaggctacgttgtctgcaacacaaggcaaaacggcagctgggggcccgaagagagaaagactcatatgcctttccagaaggggatgccattcgatctttgcttcctggtgcagagctctgattttaaggtgatggtgaatggcatcctatttgtgcagtatttccaccgtgtaccgttccatcgggtggacacaatttcagtaaatggatctgtacagctctcttatatatcatttcagaatccaagaaccgtgcccgtgcaaccagctttctccaccgtgccattcagccagcccgtctgcttccccccgaggccccggggccggagacagaaacctccaggtgtgtggccggcaaacccagccccaatcactcagacagtgatacacaccgttcagagtgctccaggccagatgttttctacccccgctataccacctatgatgtatccccatcctgcctacccgatgcccttcataacgaccattcttgggggcctatatccttctaagtccatccttctctccggtacagtgttaccctctgcgcagcgtttccacatcaacctatgctctggtaatcatatcgcttttcacctcaaccctagatttgatgaaaatgccgtagttcgcaacacacaaatcgataatagctggggctccgaggagagaagtctcccgagaaaaatgcctttcgtacgtgggcagtcttttagcgtctggattctatgcgaagcccattgtttgaaggttgccgtggacggccaacatctctttgagtactatcatcgactgagaaatcttccaaccattaaccgacttgaggtggggggagacatacagctaacccacgtgcagacgtag

SEQ ID NO: 172305 - DNA, 1068 bp, Artificial Sequence
  derived and/or modified sequence
atggccttcagcggcagccaggccccctacctgagccctgctgtgcccttcagcggcaccatccagggcggcctgcaggacggcctgcagatcaccgtgaatggcaccgtgctgagcagcagcggcaccaggtttgctgtgaacttccagacaggcttctctggaaatgacatcgccttccacttcaaccccaggtttgaagatggcggctacgtggtgtgcaacacccggcagaatggctcctggggccctgaggagaggaagacccacatgcccttccagaagggcatgccctttgacctgtgcttcctggtgcagagcagtgacttcaaggtgatggtgaatggcatcctgtttgtgcagtacttccaccgggtgcccttccaccgggtggacaccatctctgtgaatggatctgtgcagctgagctacatctccttccagaaccccaggacagtgcctgtgcagcctgccttcagcacagtgcccttcagccagcctgtgtgcttccccccccggccccggggccggcggcagaagcccccaggagtgtggccagccaacccagcccccatcacccagaccgtcatccacacagtgcagagcgcccctggccagatgttcagcaccccagccatcccccccatgatgtacccccacccagcctaccccatgcccttcatcaccaccatcctgggcggcctgtaccccagcaagagcatcctgctgagcggcaccgtgctgcccagcgcccagcgcttccacatcaacctgtgcagcggcaaccacatcgccttccacctgaaccccaggtttgatgaaaatgctgtggtgaggaacacccagattgacaacagctggggcagcgaggagaggagcctgcccaggaagatgccctttgtgcggggccagagcttctctgtgtggatcctgtgtgaggcccactgcctgaaggtggccgtggatggccagcacctgtttgagtactaccaccggctgaggaacctgcccaccatcaaccggctggaggtgggcggggacatccagctgacccacgtgcagacctag

SEQ ID NO: 172306 - DNA, 3114 bp, Artificial Sequence
  derived and/or modified sequence
tgtttgttaaattatatgtagggacagggtcttccaacctttcccgagctggtctcaagctcctgggctgaagtgatcctcctgcctcagcctctcaaagtgctggtattataggcataagccaccacgccctgcccatttttctaagttggattattttacactccagtctgctgtgaatgagagttccagttgttgcgtatcgcaatcaatttgtgattgcctacaaatgatgtgccgtgatgaaattgtccctggtgtccgagaggatcgcaaagaatttcccttcctttctctcctttctgctccccttgtactgtctactccttaaactggtacttgatccaggaacataatggggatggacagtgcagatggcacacatggcctcagtctattggagcatctcaaaggaattagtctgcaaattctagtgcatctaggtggagcacaggaaggaagagaggtgcagactcacgtatggccctggggcacctgccatcctctcgcacccgtacagcccttacctgccagcacttaccctacccagcttgagttctgggccttctcaccagcacatcgctgggacctggtcgacttcaggtaagtttatttcatggctccctcccccacgacctgcacatgccatatgttccttcccagccccatgtcacttgaaatgttctatcatgtccaagacttctctcctcatcctaaagtgcagaaaataaggatggagaagagaaggagaagagaatcaagagagattcattgagagggaggatcagaagctcctgggcaccccatactgtagaataaaaatattcattatggtgtttttcttgcaaaatattcccctctacataattatgtttttacatgaataatataaatttaaacaggagaaatactttttgaagagtctgagaatcttcataaagttcaggcggccacgaattagctgtgtgacctggggcatgccccttagactctgagcctcagcttctctgtatgtaaaatgggttgaagccgcccttccccacaagcaccctgtgcacaggcaatgcccagccccattattttctggactccgtggccaagcatgcttaggacacacagccacatacttctgggcagtgtcatctggcaacttgctgtcatgtcagtgtggtcaagcattgtagacctctatgaaccaaatatgcttcaggcttgggttgagcacaggagagggaggagggaaaggtcactggggctgggagtgcctacttccctctgtgagtgtcaccccagtccacccagtaccatacctttctctctctggacccacttccttttgctgccggctcctccccattgaataacagccaagttgctttggtttctatttctttgttaagtcgttccctctacaaaggacttcctagtgggtgtgaaaggcagcggtggccacagaggcggcggagagatggccttcagcggttcccaggctccctacctgagtccagctgtccccttttctgggactattcaaggaggtctccaggacggacttcagatcactgtcaatgggaccgttctcagctccagtggaaccaggtttgctgtgaactttcagactggcttcagtggaaatgacattgccttccacttcaaccctcggtttgaagatggagggtacgtggtgtgcaacacgaggcagaacggaagctgggggcccgaggagaggaagacacacatgcctttccagaaggggatgccctttgacctctgcttcctggtgcagagctcagatttcaaggtgatggtgaacgggatcctcttcgtgcagtacttccaccgcgtgcccttccaccgtgtggacaccatctccgtcaatggctctgtgcagctgtcctacatcagcttccagaacccccgcacagtccctgttcagcctgccttctccacggtgccgttctcccagcctgtctgtttcccacccaggcccagggggcgcagacaaaaacctcccggcgtgtggcctgccaacccggctcccattacccagacagtcatccacacagtgcagagcgcccctggacagatgttctctactcccgccatcccacctatgatgtacccccaccccgcctatccgatgcctttcatcaccaccattctgggagggctgtacccatccaagtccatcctcctgtcaggcactgtcctgcccagtgctcagaggttccacatcaacctgtgctctgggaaccacatcgccttccacctgaacccccgttttgatgagaatgctgtggtccgcaacacccagatcgacaactcctgggggtctgaggagcgaagtctgccccgaaaaatgcccttcgtccgtggccagagcttctcagtgtggatcttgtgtgaagctcactgcctcaaggtggccgtggatggtcagcacctgtttgaatactaccatcgcctgaggaacctgcccaccatcaacagactggaagtggggggcgacatccagctgacccatgtgcagacataggcggcttcctggccctggggccgggggctggggtgtggggcagtctgggtcctctcatcatccccacttcccaggcccagcctttccaaccctgcctgggatctgggctttaatgcagaggccatgtccttgtctggtcctgcttctggctacagccaccctggaacggagaaggcagctgacggggattgccttcctcagccgcagcagcacctggggctccagctgctggaatcctaccatcccaggaggcaggcacagccagggagaggggaggagtgggcagtgaagatgaagccccatgctcagtcccctcccatcccccacgcagctccaccccagtcccaagccaccagctgtctgctcctggtgggaggtggcctcctcagcccctcctctctgacctttaacctcactctcaccttgcaccgtgcaccaacccttcacccctcctggaaagcaggcctgatggcttcccactggcctccaccacctgaccagagtgttctcttcagaggactggctcctttcccagtgtccttaaaataaagaaatgaaaatgcttgttggcacattca

SEQ ID NO: 172307 - DNA, 1068 bp, Artificial Sequence
  derived and/or modified sequence
atggccttcagcggcagccaggccccctacctgagccccgccgtgccgtttagcggaacaatccagggaggcctgcaggatggactgcagatcacagtcaatggtaccgtcttatcctcttcaggaacacggttcgctgtgaactttcaaactgggttctccggaaacgacattgccttccactttaatccaagatttgaggatggtgggtatgtggtgtgcaatacgcgccagaacggtagctgggggcctgaagagagaaagactcatatgcccttccagaagggaatgccctttgacctctgcttcctggtgcagtctagcgacttcaaggtgatggttaatggcatcctgtttgtgcagtacttccatcgggtgccatttcatcgagtggacaccatctctgtgaacgggtccgttcagctcagttacatttctttccagaacccacgcacggtgcccgtgcagcccgctttttctactgtgccctttagccagccagtctgttttcctcctcggcccagagggagaaggcagaagccacccggggtttggcccgcaaatcccgccccgatcacacagactgtaatacacacagttcagtccgccccaggtcagatgtttagcacgccggcgatcccacccatgatgtacccccaccccgcctaccccatgcccttcattaccacaattctaggcggcttataccctagtaagtctatcctgttaagcggtactgtgttaccgtctgcgcagcggtttcatattaacctctgctctggtaaccacatcgcctttcacctgaatcctcgctttgatgaaaacgccgtggtccgaaacacccagatcgataactcttggggatcagaggagagatcacttccaagaaagatgccctttgtgcggggtcagagcttcagcgtctggattctatgcgaggcccattgtctcaaggtagccgtggatggtcagcacctgttcgagtattaccaccgactgaggaacctgcctaccatcaatagactcgaggttggcggggatatccagcttacccacgtgcagacgtag

SEQ ID NO: 172308 - DNA, 1068 bp, Artificial Sequence
  derived and/or modified sequence
atggccttctctggatcacaggctccgtatcttagtccagccgttccttttagcgggaccatccagggcggtctacaggacggattacagataaccgtcaacggcacagtgctcagtagcagtggaactcgcttcgccgtgaactttcagactggattttccgggaatgatattgctttccattttaatcctcgctttgaagatgggggatacgttgtgtgcaacacaaggcagaatgggtcctggggacctgaagaacgtaagacacatatgcctttccaaaagggcatgccattcgatctctgttttttggtacagtcctccgactttaaggtgatggtcaacgggatccttttcgttcaatatttccaccgtgtcccctttcaccgggtggacacaatcagcgtgaatggaagcgtacaattgtcatacatctccttccaaaacccgaggaccgttcctgtgcaacctgccttctctactgtgcccttttctcagcccgtctgtttcccccctaggccaagagggcgacgtcagaagccccctggggtgtggccagccaatcctgcacccattacccagactgtcattcacacagtgcagagcgccccaggtcagatgttctccacccccgctatcccacctatgatgtacccccatccggcatacccgatgccctttattaccactattctggggggactttatcctagtaagtcaattctactgtctggcaccgtcttgccttccgcgcagcgatttcacatcaatttgtgtagtggtaaccacattgcatttcacctcaacccacgctttgatgaaaacgctgtggtgagaaacacccagatcgacaactcttgggggagtgaagagcgttcactaccaaggaaaatgccattcgtgcgcggtcagtccttctcggtatggatcttgtgtgaggcacactgcctaaaagtagctgtggatggacaacatctatttgaatactaccaccgcctccgaaacctgcccacaataaacaggctggaagtcgggggagacattcagcttacccacgtccagacttag

SEQ ID NO: 172309 - DNA, 1068 bp, Artificial Sequence
  derived and/or modified sequence
atggccttcagcggcagccaggccccctacctgagccccgccgtgcccttcagcggcaccatccagggcggcctgcaggacggcctgcagatcaccgtgaacggcaccgtgctgagcagcagcggcaccagattcgccgtgaacttccagaccggcttcagcggcaacgacatcgccttccacttcaaccccagattcgaggacggcggctacgtggtgtgcaacaccagacagaacggcagctggggccccgaggagagaaagacccacatgcccttccagaagggcatgcccttcgacctgtgcttcctggtgcagagcagcgacttcaaggtgatggtgaacggcatcctgttcgtgcagtacttccacagagtgcccttccacagagtggacaccatcagcgtgaacggcagcgtgcagctgagctacatcagcttccagaaccccagaaccgtgcccgtgcagcccgccttcagcaccgtgcccttcagccagcccgtgtgcttcccccccagacccagaggcagaagacagaagccccccggcgtgtggcccgccaaccccgcccccatcacccagaccgtgatccacaccgtgcagagcgcccccggccagatgttcagcacccccgccatcccccccatgatgtacccccaccccgcctaccccatgcccttcatcaccaccatcctgggcggcctgtaccccagcaagagcatcctgctgagcggcaccgtgctgcccagcgcccagagattccacatcaacctgtgcagcggcaaccacatcgccttccacctgaaccccagattcgacgagaacgccgtggtgagaaacacccagatcgacaacagctggggcagcgaggagagaagcctgcccagaaagatgcccttcgtgagaggccagagcttcagcgtgtggatcctgtgcgaggcccactgcctgaaggtggccgtggacggccagcacctgttcgagtactaccacagactgagaaacctgcccaccatcaacagactggaggtgggcggcgacatccagctgacccacgtgcagacctag

SEQ ID NO: 172310 - protein, 77 aa, Artificial Sequence
  derived and/or modified sequence
MGALGLEGRGGRLQGRGSLLLAVAGATSLVTLLLAVPITVLAVLALVPQDQGGLGFRSCQRRSQKQISAPGSQLPTS

SEQ ID NO: 172311 - DNA, 234 bp, Artificial Sequence
  derived and/or modified sequence
atgggcgcacttggcttagagggccgcggagggcgcttacaagggaggggtagcctactcctggcagtggctggcgccacttcgctggtcaccctgctccttgcagtacctatcacagttttggccgtccttgcccttgtccctcaggatcagggtggactaggatttagatcttgccagcgacgctctcagaagcagatatctgccccaggctcccagctacccaccagctag

SEQ ID NO: 172312 - DNA, 234 bp, Artificial Sequence
  derived and/or modified sequence
atgggcgccctgggcctggagggccggggcggccgcctgcagggccggggcagcctgctgctggccgtggccggggccaccagcctggtgaccctgctgctggccgtgcccatcaccgtgctggccgtgctggccctggtgccccaggaccagggcggcctgggcttccgcagctgccagaggaggagccagaagcagatcagcgcccctggcagccagctgcccaccagctag

SEQ ID NO: 172313 - DNA, 234 bp, Artificial Sequence
  derived and/or modified sequence
atgggcgccctgggcctggagggccggggcggccggctgcagggccgagggagtctgctgttagccgtcgcaggtgcaactagtctcgtaactttgctgctggctgtcccaatcactgtactggcagtgttggcccttgtcccacaggatcagggagggttaggctttagaagctgtcagcgtcgctcccaaaagcagatcagcgcccctggctctcaactgcccacctcttag

SEQ ID NO: 172314 - DNA, 234 bp, Artificial Sequence
  derived and/or modified sequence
atgggtgccctgggtctggaaggaaggggcggtagactgcaaggcaggggctctctactgctggctgtggcaggcgcaacctcgctcgtcactctgctgctagcagtgcctattactgtgcttgctgttctggccctggttccgcaggatcagggcggtctgggcttccggagttgtcaacgcagatctcaaaaacagatcagcgctcccggttcgcaactgcccacgtcctag

SEQ ID NO: 172315 - DNA, 234 bp, Artificial Sequence
  derived and/or modified sequence
atgggcgccctgggcctggagggcagaggcggcagactgcagggcagaggcagcctgctgctggccgtggccggcgccaccagcctggtgaccctgctgctggccgtgcccatcaccgtgctggccgtgctggccctggtgccccaggaccagggcggcctgggcttcagaagctgccagagaagaagccagaagcagatcagcgcccccggcagccagctgcccaccagctag

SEQ ID NO: 172316 - protein, 756 aa, Artificial Sequence
  derived and/or modified sequence
MHLKIVLAFLALSLITIFALAYVLLTSPGGSSQPPHCPSVSHRAQPWPHPGQSQLFADLSREELTAVMRFLTQRLGPGLVDAAQAQPSDNCIFSVELQLPPKAAALAHLDRGSPPPAREALAIVLFGGQPQPNVSELVVGPLPHPSYMRDVTVERHGGPLPYHRRPVLRAEFTQMWRHLKEVELPKAPIFLSSTFNYNGSTLAAVHATPRGLRSGDRATWMALYHNISGVGLFLHPVGLELLLDHRALDPAHWTVQQVFYLGHYYADLGQLEREFKSGRLEVVRVPLPPPNGASSLRSRNSPGPLPPLQFSPQGSQYSVQGNLVVSSLWSFTFGHGVFSGLRIFDVRFQGERIAYEVSVQECVSIYGADSPKTMLTRYLDSSFGLGRNSRGLVRGVDCPYQATMVDIHILVGKGAVQLLPGAVCVFEEAQGLPLRRHHNYLQNHFYGGLASSALVVRSVSSVGNYDYIWDFVLYPNGALEGRVHATGYINTAFLKGGEEGLLFGNRVGERVLGTVHTHAFHFKLDLDVAGLKNWVVAEDVVFKPVAAPWNPEHWLQRPQLTRQVLGKEDLTAFSLGSPLPRYLYLASNQTNAWGHQRGYRIQIHSPLGIHIPLESDMERALSWGRYQLVVTQRKEEESQSSSIYHQNDIWTPTVTFADFINNETLLGEDLVAWVTASFLHIPHAEDIPNTVTLGNRVGFLLRPYNFFDEDPSIFSPGSVYFEKGQDAGLCSINPVACLPDLAACVPDLPPFSYHGF

SEQ ID NO: 172317 - DNA, 2271 bp, Artificial Sequence
  derived and/or modified sequence
atgcaccttaaaatcgttcttgcgttcctcgcattgagcctaatcaccatctttgctttggcttatgtgctgctgacatctccgggcggctcgtcacagcccccccactgtccttcggtttcccaccgcgcacagccgtggccccacccgggccagtcacagctgttcgcagacctgagccgagaggagctgaccgcagttatgagatttcttactcagcgcctgggtcctggcctcgtggacgctgctcaagcccagccatctgacaactgtatcttctctgtagaactccagcttccccctaaagctgcagcgctcgcccacctcgataggggtagccctcctcctgctcgcgaggccctggccatcgtgctgtttggcggacagccacaaccaaacgtcagcgagctggtggtggggcccttaccccatccgagctatatgcgagacgtgacagttgagcggcatggaggtcccctcccataccatcggagacccgttttacgcgcagaattcacccagatgtggcgtcacctcaaggaagtggaactgcctaaggcacccattttcttaagctccaccttcaattataatggatccactctggctgcagtacacgccacgcctagaggtctgaggagcggcgaccgggccacgtggatggctttgtaccacaatatctccggggttggactgtttctgcaccctgtcgggttggagctgctgttggaccatcgagcattggatccggctcactggactgtgcaacaagtcttttatctcggtcactactacgcagacttgggccagttggaacgtgagtttaagagcggacggctggaagtggtccgggttcccctcccaccacccaatggggcctcctcactaagaagccgcaattcacctggcccactcccccctctccagttctcaccccaggggtctcagtatagcgtacaaggaaatctagtggtaagctccctatggagcttcacctttggccacggggtattctccggactaagaatctttgacgttagattccagggggaacgaatcgcatacgaagttagcgtgcaggagtgcgtcagcatttacggagccgacagccccaaaactatgctgacccgctaccttgattccagctttggcctgggccgcaattcccgcggcctcgtgcgtggagttgactgtccataccaagccaccatggtagacatccatatcctggtgggaaagggtgctgtccagctgctcccgggggcagtgtgtgtattcgaggaagcccagggattgcctctacgccgccatcacaactatctccagaatcatttttatggaggcctggcaagctcggccctggttgtgcggtcagtaagctccgtgggtaactatgattacatatgggacttcgtcctgtaccccaacggcgctcttgaaggtagagtgcatgccacaggctacatcaatacagcattcttgaaaggcggcgaggagggactgctgttcgggaacagggtgggagagcgggtgctaggtacggtgcacacccacgcctttcactttaaactcgatctagatgtggcaggcttgaaaaattgggtggtggcggaagacgtggtgtttaagcctgttgcagcaccctggaaccctgaacattggctgcagcggccacagctgacgcggcaggtgcttgggaaggaagaccttaccgcgttcagtcttgggtcacctctcccacgatatctgtatctcgcaagtaatcagacgaatgcttgggggcatcaacgaggataccggattcagattcactctcctctgggtattcacatcccgttggagtcagacatggaacgggctctatcttggggcaggtaccagttggtggttactcagcgtaaggaggaggaaagccaatcttcttcgatttatcaccagaacgatatctggaccccgaccgtgacttttgcggatttcatcaacaacgagacacttcttggggaagacctcgtagcctgggttacagcctcctttttacatattcctcacgccgaggatatccccaataccgtcactctgggaaacagagtcggtttccttctgcggccctacaatttctttgatgaggacccttcaatcttctctcctgggtccgtgtatttcgaaaaggggcaggatgctggcttatgcagcatcaatccagtggcctgcctcccggatctggctgcttgcgtgcccgacttgccccctttctcctaccacgggttttag

SEQ ID NO: 172318 - DNA, 2271 bp, Artificial Sequence
  derived and/or modified sequence
atgcacctgaagatcgtgctggccttcctggccctgagcctcatcaccatctttgccctggcctacgtgctgctgaccagccctgggggcagcagccagcccccccactgccccagcgtgagccaccgggcccagccctggccccaccctggccagagccagctgtttgctgacctgagccgggaggagctgacagctgtgatgaggttcctgacccagaggctgggccctggcctggtggatgctgcccaggcccagcccagcgacaactgcatcttctctgtggagctgcagctgccccccaaggccgccgccctggcccacctggaccggggcagccccccaccagcccgggaggccctggccatcgtgctgtttggaggccagccccagcccaacgtgtctgagctggtggtgggccccctgccccaccccagctacatgagagatgtgacagtggagcggcacggcggccccctgccctaccaccggcggcctgtgctgcgggcagagttcacccagatgtggaggcacctgaaggaggtggagctgcccaaggcccccatcttcctgagcagcaccttcaactacaacggcagcaccctggccgctgtgcacgccaccccccggggcctgcggagcggggaccgggccacctggatggccctgtaccacaacatcagcggcgtgggcctcttcctgcaccctgtgggcctggagctgctgctggaccaccgggccctggaccctgcccactggacagtgcagcaggtgttctacctgggccactactatgctgacctgggccagctggagcgggagttcaagagcggccgcctggaggtggtgcgggtgcccctgcccccaccaaatggagccagcagcctgcggagcaggaacagccctggccccctgccccccctgcagttcagcccccagggcagccagtacagcgtgcagggcaacctggtggtgagcagcctgtggagcttcacctttggacatggagtcttcagcggcctgcgcatctttgatgtgcgcttccagggcgagagaattgcctatgaggtgtctgtgcaggagtgtgtgtccatctacggggctgacagccccaagaccatgctgacccgctacctggacagcagctttggcctgggcaggaacagccggggcctggtgcggggcgtggactgcccctaccaggccaccatggtggacatccacatcctggtgggcaaaggagctgtgcagctgctgcccggggctgtgtgtgtgtttgaggaggcccagggcctgcccctgcggcggcaccacaactacctgcagaaccacttctacggcggcctggccagcagcgccctggtggtgcgctctgtgtcctctgtgggcaactatgactacatctgggactttgtgctgtaccccaacggggccctggagggccgggtgcacgccaccggctacatcaacacagccttcctgaagggcggggaggagggcctgctgtttggaaacagagtgggggagcgggtgctgggcaccgtgcacacccacgccttccacttcaagctggacctggatgtggccggcctgaagaactgggtggtggccgaggatgtggtgttcaagcctgtggccgccccctggaaccctgagcactggctgcagaggccccagctgacccggcaggtgctgggcaaggaggacctgacagccttcagcctgggcagccccctgccccgctacctgtacctggccagcaaccagaccaatgcctggggccaccagaggggctaccgcatccagatccacagccccctgggcatccacatccccctggagagtgacatggagcgggccctgtcctggggccgctaccagctggtggtgacccagaggaaggaggaggagagccagagcagcagcatctaccaccagaatgacatctggacccccaccgtgacctttgctgacttcatcaacaatgagaccctgctgggggaggacctggtggcctgggtgacagccagcttcctgcacatcccccatgctgaggacatccccaacacagtgaccctgggcaacagagtgggcttcctgctgcggccctacaacttctttgatgaggaccccagcatcttcagccctggctctgtgtactttgagaagggccaggatgctggcctgtgcagcatcaaccctgtggcctgcctgcctgacctggccgcctgtgtgcctgacctgccccccttctcctaccacggcttctag

SEQ ID NO: 172319 - DNA, 2663 bp, Artificial Sequence
  derived and/or modified sequence
tgttagaattctgatttcagctctcagcatccaccatgcatctcaagatagtcctggcgttcctggcactgtccctcattaccatctttgccctggcctatgttttgctgaccagcccaggtggttccagccagcctccccactgcccctctgtatcccatagggcccagccctggccacaccctggccagagccagctgtttgcagacctgagccgagaggagttgacagctgtgatgcgctttctgacccagcggctggggccagggctggtggacgcagcccaggctcagccctcggacaactgcatcttctcagtggagctgcagctgccccccaaggctgcagccctggcccacctggacagggggagccccccacctgcccgggaggcactggccatcgtcctctttggtggacaaccccaacccaatgtgagtgagctggtggtggggccgctgcctcacccctcgtacatgcgggatgtgactgtggagcgtcacggcgggcccctgccctatcaccgtcgcccggtgctgagagctgagtttacacagatgtggaggcatctgaaagaggtggagctacccaaggcacccatcttcctgtcgtccaccttcaactacaatggctctaccctggcagctgtgcatgccacccctcggggcttgcgctcaggggaccgagctacctggatggccctctaccataacatctcaggggttggtcttttccttcaccccgtggggctggagctactactggaccacagggccctggaccctgcccactggactgtccagcaggtcttctaccttgggcactactatgcagacttgggccagttggaacgggagtttaagtctggccggttggaagtggttagagtccctctacctccaccaaatggagcttcatccctgaggtctcggaactctccaggtcctcttccccctcttcagttctcgccccagggttcccagtacagtgtgcaaggaaacctggtggtatcctccctctggtcatttacctttggccatggggtgttcagcggcctgaggatttttgatgttcggttccagggtgagcgaatagcctatgaagtcagtgtccaggagtgtgtatctatctatggtgccgattcacccaagacgatgctgactcgctatttggatagcagctttggactcggccgtaacagccgaggcttggtgcggggagtggactgcccctatcaagccacgatggtggacatccatatattagtgggcaaaggggcagtccagctgcttccaggggctgtgtgtgtatttgaggaagcccagggactgccccttcgaaggcaccacaattaccttcaaaatcatttctatggtggtttggccagctcagcccttgtggtcaggtctgtgtcatctgtgggcaactatgactacatttgggactttgtgttgtacccaaatggggcacttgaagggcgggtccatgccacgggttatatcaacacagctttcctgaaagggggagaggagggcctcctctttgggaaccgtgtgggggaaagagtgctgggaacggtgcacacacatgccttccacttcaagctggacctggatgtggcagggctgaaaaactgggtggtagctgaagacgtggtgtttaaacctgtggctgccccctggaacccggagcactggctacagcgcccacagctgactcggcaggtcctgggaaaggaggacctgacagctttttccttgggaagccccctaccccgctacctctacctggctagcaaccagactaatgcgtggggtcaccagcgcgggtaccgaatccagatccacagcccccttggcatacacatacccctggagagtgacatggagagggccctcagctgggggagataccagcttgtggtgacccagagaaaggaggaggagtcacagagcagtagcatctatcaccagaatgacatctggacacccacagttacctttgctgacttcatcaacaatgaaaccctcttaggagaggatctggtggcttgggtcacagccagcttcctgcacattccccatgccgaggacatcccaaacacagtgactctggggaacagagttggcttcttgctccgaccctataacttctttgatgaggacccctccatcttctcccctggcagtgtctactttgagaagggccaggatgctgggctctgcagcatcaatcctgtggcctgcctccccgacctggcagcctgtgtcccggacttaccccctttctcttaccacggcttctagtcctgagggtgtggcgggcggcgtggttaggcacatgtacttttccctgtttctactttctattctccgtgtttttatcacacctgctccccagattcccaccccctcaatgttcctctcacacgaaacccccatcagtccctttggttaattcttacttcctgttcatctctaaagtgttaaattataaaaatgatttttaaatattcaaagaaaaatatcacaaatcctactactcagaaataggtggtcacattacatcagacatctctttatgcatgtgcattcaaaaggaagagtagatagaattttgtaaaacagatgttgtatgtaatttataataaaaagtattagagg

SEQ ID NO: 172320 - DNA, 2271 bp, Artificial Sequence
  derived and/or modified sequence
atgcacctgaagatcgtgctggccttcctggccctgagcctgatcacaattttcgcactcgcctacgtgttgctgacttctcctggtggttcaagtcagccccctcattgcccctctgtgtcacatcgtgcacagccatggccccatcccggccagtctcaactgttcgccgacctgtcacgagaagagctgacagcagtcatgcgattccttacacagaggttaggacccggactcgtagacgccgcacaagcccagcctagcgacaattgcatattctccgtcgagcttcaactccccccaaaagcggccgcactagctcacttggatagaggctccccaccccccgctagggaagccctggccatcgtcctcttcgggggccagccacagcctaatgtgtcggaactggttgtaggccctttacctcacccctcatatatgagggacgttaccgtggagcggcacggtggaccactcccttatcataggagaccagtgcttcgggccgaatttacacaaatgtggagacatttgaaagaggttgagttgcccaaggccccaatctttctgagctcaacgttcaattacaacggtagcacgctcgctgccgttcatgctaccccaagaggactgcggtctggggaccgggccacgtggatggctctttaccataatatttccggggtcgggctgttcctgcacccagtaggccttgagcttctgctcgaccacagggccctcgaccccgcccactggactgtccagcaagttttctacttaggccactactacgcagacttggggcagcttgagcgggaatttaagtccggaagactggaggtcgtccgtgtgccgctgcccccccctaacggtgccagcagtcttagaagtcgtaattctcctggcccactaccaccactgcaattttccccacaaggcagccagtatagcgtccaggggaacctggtggtgtcatccttgtggagttttacattcggtcacggagttttttctggactgaggattttcgacgtgcggtttcagggggaaaggattgcctacgaggtatctgtacaggagtgcgtgtcaatctacggcgcagattccccgaaaaccatgctgacacggtacttggacagctcatttggtctgggtagaaatagccgaggtctggtccgaggggtggactgtccatatcaggctaccatggtggacatccacattctcgttggcaagggtgctgtacagctgctaccaggcgctgtctgcgtattcgaagaggctcagggactgcccttgcgtcgccatcataattaccttcagaatcacttctacggaggcttggcctcctctgcattggtggtgagatctgtcagcagcgttggcaattatgactatatctgggactttgttctctatcccaatggcgctctggagggaagagtgcatgccaccggctacatcaataccgctttcttaaaaggaggggaggagggccttctgtttggcaatagggtcggagagagggtgcttggaaccgttcatacacacgcctttcactttaagcttgatttggacgttgctggactgaaaaactgggttgtggcagaagatgtcgtctttaagcccgtcgccgccccgtggaacccagagcactggctgcagagaccacagcttacacgccaagtccttgggaaagaggatctgactgcgttttcgctcggcagtcctcttccaaggtatctgtatcttgcctctaatcaaacgaatgcctggggtcaccagcgcggttatagaatccaaatccacagtcccctcggcatccatataccattagagtccgacatggagcgggccctgtcctggggtagatatcagctggtcgttacacagcgaaaagaggaggagtcccaatcgtcaagcatatatcatcaaaatgacatttggacaccaacggtcaccttcgctgattttattaacaacgagaccctgttgggggaagatctggtcgcatgggttaccgcttcatttctgcatattccgcacgctgaggacatcccaaataccgtgaccttgggaaatcgcgttggtttcctcctaaggccatataacttctttgatgaggacccttcaattttcagccctggaagtgtttattttgagaaggggcaggatgccggcctgtgttctattaatccagtggcatgtctacccgacttggccgcatgtgtgcccgacctcccgcctttctcctaccacggcttctag

SEQ ID NO: 172321 - DNA, 2271 bp, Artificial Sequence
  derived and/or modified sequence
atgcacctcaagattgtccttgcctttctggctttgtcactgatcaccatcttcgctcttgcatacgtgttgttaacaagccctggcggatccagccagccaccccattgtccgtccgttagccatagagcccagccgtggccccaccccggacagagccagttgttcgcagatttgtctcgcgaagagttgacagctgttatgagatttctaacacagagactgggtcccggtctcgtagacgccgctcaggcgcagcctagcgataattgtatcttttcagtagagcttcagctgcccccaaaagccgctgctctggcccaccttgatcgaggctccccgcctcccgctcgcgaggcgcttgctatcgttctgtttggtgggcagccccaaccaaatgtgtcagagctggtagttggtcctttaccacatcctagttatatgcgggacgtcacagtcgaaagacatggcggaccactcccatatcataggcgacctgtgctgcgggcagaattcacccagatgtggcgccacctgaaggaagtagaacttccaaaagccccaatcttcttatcgagcacttttaattataatgggtcgacgctggcagcagtgcacgccactcccagggggcttcgaagcggggaccgggctacctggatggctctctaccataatatcagcggggtggggctgtttttacatcccgttgggctggaacttctgcttgatcacagggctctcgatcccgctcactggactgtccaacaggtgttttatttaggacattactacgccgatctgggccagctagaaagagagtttaagtcaggtcgtttagaagtggtgcgggttccactgccaccaccgaacggcgctagctccctcaggtcaagaaactccccaggcccactgccacccttgcagttctcaccccaagggtctcaatattccgttcaggggaatctcgtggtgagttccctgtggtcgtttactttcgggcacggggtcttcagcgggctgcgcatttttgacgtgagattccagggagaacgtatcgcttacgaggtgtcggtgcaggaatgcgtcagcatctacggggcagactctcccaagacaatgctcacaaggtatttagactcatcatttggcttgggcaggaacagccgtgggctggtgagaggggtggattgcccctaccaggcaacaatggtggacattcacatactggtgggaaaaggcgctgtacagttgctgcccggtgccgtgtgcgttttcgaggaggcccaagggctccctctaaggagacatcacaattacctgcagaatcacttctatgggggacttgcctcaagcgctctggtagttcgtagcgtcagtagtgttgggaattacgactacatttgggacttcgtgctctaccccaacggagccctggagggcagagtgcacgccactggttacattaacactgcttttctgaaaggaggcgaagaggggctgctcttcggaaacagggttggcgagcgggtccttggaactgtgcacacacacgcctttcactttaaacttgacctggacgttgctggtctcaaaaactgggtggtggcagaggatgtggtgttcaagccagtggctgccccatggaacccggagcactggttgcagcggccacagctgacacgacaggtccttggaaaagaggacttgacagccttcagcctgggctcccccctacccagatacctgtacctggcgagcaaccagaccaacgcctggggccaccagagaggatacaggatccagatccacagccctctggggatccacatccctcttgagtcagacatggagcgagccctatcttggggcaggtaccagctggttgtcacccagaggaaagaggaggaatctcaatccagcagtatttatcaccagaacgacatctggacaccaaccgttacattcgctgattttatcaataacgagacactgctaggagaggatctcgtggcatgggtcacagcaagtttcctgcatataccacacgctgaggacattcccaataccgtgactctcggaaacagagtcgggtttctcctccgaccatataattttttcgacgaagatccatctatctttagtcccggtagtgtttatttcgaaaaggggcaggatgctgggctgtgcagcataaaccccgtggcctgtttgcctgatctagccgcttgcgtacccgacctcccacccttctcttatcacggcttttag

SEQ ID NO: 172322 - DNA, 2271 bp, Artificial Sequence
  derived and/or modified sequence
atgcacctgaagatcgtgctggccttcctggccctgagcctgatcaccatcttcgccctggcctacgtgctgctgaccagccccggcggcagcagccagcccccccactgccccagcgtgagccacagagcccagccctggccccaccccggccagagccagctgttcgccgacctgagcagagaggagctgaccgccgtgatgagattcctgacccagagactgggccccggcctggtggacgccgcccaggcccagcccagcgacaactgcatcttcagcgtggagctgcagctgccccccaaggccgccgccctggcccacctggacagaggcagccccccccccgccagagaggccctggccatcgtgctgttcggcggccagccccagcccaacgtgagcgagctggtggtgggccccctgccccaccccagctacatgagagacgtgaccgtggagagacacggcggccccctgccctaccacagaagacccgtgctgagagccgagttcacccagatgtggagacacctgaaggaggtggagctgcccaaggcccccatcttcctgagcagcaccttcaactacaacggcagcaccctggccgccgtgcacgccacccccagaggcctgagaagcggcgacagagccacctggatggccctgtaccacaacatcagcggcgtgggcctgttcctgcaccccgtgggcctggagctgctgctggaccacagagccctggaccccgcccactggaccgtgcagcaggtgttctacctgggccactactacgccgacctgggccagctggagagagagttcaagagcggcagactggaggtggtgagagtgcccctgcccccccccaacggcgccagcagcctgagaagcagaaacagccccggccccctgccccccctgcagttcagcccccagggcagccagtacagcgtgcagggcaacctggtggtgagcagcctgtggagcttcaccttcggccacggcgtgttcagcggcctgagaatcttcgacgtgagattccagggcgagagaatcgcctacgaggtgagcgtgcaggagtgcgtgagcatctacggcgccgacagccccaagaccatgctgaccagatacctggacagcagcttcggcctgggcagaaacagcagaggcctggtgagaggcgtggactgcccctaccaggccaccatggtggacatccacatcctggtgggcaagggcgccgtgcagctgctgcccggcgccgtgtgcgtgttcgaggaggcccagggcctgcccctgagaagacaccacaactacctgcagaaccacttctacggcggcctggccagcagcgccctggtggtgagaagcgtgagcagcgtgggcaactacgactacatctgggacttcgtgctgtaccccaacggcgccctggagggcagagtgcacgccaccggctacatcaacaccgccttcctgaagggcggcgaggagggcctgctgttcggcaacagagtgggcgagagagtgctgggcaccgtgcacacccacgccttccacttcaagctggacctggacgtggccggcctgaagaactgggtggtggccgaggacgtggtgttcaagcccgtggccgccccctggaaccccgagcactggctgcagagaccccagctgaccagacaggtgctgggcaaggaggacctgaccgccttcagcctgggcagccccctgcccagatacctgtacctggccagcaaccagaccaacgcctggggccaccagagaggctacagaatccagatccacagccccctgggcatccacatccccctggagagcgacatggagagagccctgagctggggcagataccagctggtggtgacccagagaaaggaggaggagagccagagcagcagcatctaccaccagaacgacatctggacccccaccgtgaccttcgccgacttcatcaacaacgagaccctgctgggcgaggacctggtggcctgggtgaccgccagcttcctgcacatcccccacgccgaggacatccccaacaccgtgaccctgggcaacagagtgggcttcctgctgagaccctacaacttcttcgacgaggaccccagcatcttcagccccggcagcgtgtacttcgagaagggccaggacgccggcctgtgcagcatcaaccccgtggcctgcctgcccgacctggccgcctgcgtgcccgacctgccccccttcagctaccacggcttctag

SEQ ID NO: 172323 - protein, 736 aa, Artificial Sequence
  derived and/or modified sequence
MEALIPVINKLQDVFNTVGADIIQLPQIVVVGTQSSGKSSVLESLVGRDLLPRGTGIVTRRPLILQLVHVSQEDKRKTTGEENGVEAEEWGKFLHTKNKLYTDFDEIRQEIENETERISGNNKGVSPEPIHLKIFSPNVVNLTLVDLPGMTKVPVGDQPKDIELQIRELILRFISNPNSIILAVTAANTDMATSEALKISREVDPDGRRTLAVITKLDLMDAGTDAMDVLMGRVIPVKLGIIGVVNRSQLDINNKKSVTDSIRDEYAFLQKKYPSLANRNGTKYLARTLNRLLMHHIRDCLPELKTRINVLAAQYQSLLNSYGEPVDDKSATLLQLITKFATEYCNTIEGTAKYIETSELCGGARICYIFHETFGRTLESVDPLGGLNTIDILTAIRNATGPRPALFVPEVSFELLVKRQIKRLEEPSLRCVELVHEEMQRIIQHCSNYSTQELLRFPKLHDAIVEVVTCLLRKRLPVTNEMVHNLVAIELAYINTKHPDFADACGLMNNNIEEQRRNRLARELPSAVSRDKSSKVPSALAPASQEPSPAASAEADGKLIQDSRRETKNVASGGGGVGDGVQEPTTGNWRGMLKTSKAEELLAEEKSKPIPIMPASPQKGHAVNLLDVPVPVARKLSAREQRDCEVIERLIKSYFLIVRKNIQDSVPKAVMHFLVNHVKDTLQSELVGQLYKSSLLDDLLTESEDMAQRRKEAADMLKALQGASQIIAEIRETHLW

SEQ ID NO: 172324 - DNA, 2211 bp, Artificial Sequence
  derived and/or modified sequence
atggaggccctcatcccagtgattaacaaacttcaggatgtttttaacaccgtcggagccgacattatccagctgccccaaatcgtcgtcgtgggcacccagtctagcggaaagtcgtccgttcttgagtccttagtcggacgagacctgctgccccggggaacggggatcgtaactcgtagacccctcattctgcagctcgtacatgtgtctcaagaggataagagaaagaccaccggggaagagaacggcgtcgaggcagaggaatggggcaagttcctacacacgaagaataagctgtacacagactttgatgagatcaggcaggaaatcgaaaacgagacggagaggatttcaggaaataataagggggtgagcccggagcctatccatctgaagatcttctcacccaacgtggtgaatcttacactggtcgatctgcccggtatgactaaagtgcctgtgggagaccagcctaaggatatcgaactgcagatccgtgaattaatcctgcggtttattagcaaccccaactctataatcctggctgtgaccgccgctaacaccgatatggccacttcggaggctctcaaaataagtcgtgaagtggaccccgacgggcgtagaactttagctgtgattactaagctggacctgatggatgccggaaccgacgccatggacgtgttaatgggtcgggtgattccagtgaaactgggcattatcggggttgtgaatcgctcccaactggatatcaataataagaagagcgtgaccgattcgatccgggatgagtatgctttcctgcagaagaaataccccagcctggcaaacaggaacggcacaaaatacctcgcccgaactctgaatagactactgatgcaccacatcagagactgtttgcccgaactcaagactagaattaatgtgctcgctgcacagtaccaaagcctactgaactcttacggcgaaccagttgatgacaagagtgccacgcttcttcagctgattacgaagtttgccaccgagtattgtaatacaatcgaaggaactgctaagtatattgagacctccgagctttgtgggggtgcccgcatctgttacatctttcacgaaacttttggcaggacactcgaatcggtggacccactcggaggcttgaacaccatcgacatcctcaccgccattcggaacgctacaggacctagacccgcactgttcgtgcccgaggtttcattcgagctgctcgtgaagcggcaaattaaacgcctggaggaaccttcactcagatgtgttgagcttgtgcacgaagagatgcagcggatcatccagcactgttccaattactccacgcaggaacttttgcggttcccgaaactgcacgacgccattgtggaggtggtaacctgtttgttacgaaagcgactgcccgtaacaaatgagatggtccacaacctcgtcgccatcgagcttgcttacataaacactaaacaccccgattttgctgatgcctgcggcctcatgaacaataatattgaggagcagcgccggaaccgattggctcgagagctcccttcagccgtgtcccgcgacaagtcttctaaagtgcctagcgcgcttgcaccggcgtcccaggaaccctcccccgctgcaagtgccgaggccgacggaaaactgatccaagattccaggcgcgagaccaagaacgtcgcttctggtggcgggggggtgggcgacggcgttcaggaaccgactaccggaaattggaggggcatgttaaagacaagcaaagcggaggagctcctcgcggaggagaagagtaagccaatacctatcatgccagcatcgcctcagaaaggacacgccgtgaacctcctggacgtgccagtgccagttgctcgaaagctgagtgccagggagcagcgggactgcgaagtgatcgaaaggctcattaagagttacttcttaattgtgcgaaagaacattcaggattctgtacctaaagccgttatgcatttcttggttaatcatgtgaaggacaccctgcagtctgaattggtgggacagctgtataaaagcagcctcttggatgacctgcttaccgagtcagaagatatggcacagcgccgcaaggaggcagccgacatgcttaaggcactacaaggtgcctcacagattattgctgagatacgcgagacacacctctggtag

SEQ ID NO: 172325 - DNA, 2211 bp, Artificial Sequence
  derived and/or modified sequence
atggaggccctgatccctgtgatcaacaagctgcaggatgtgttcaacacagtgggcgctgacatcatccagctgccccagatcgtggtggtgggcacccagagcagcggcaagagctctgtgctggagagcctggtgggccgggacctgctgccccggggcactggaattgtgacccggcggcccctcatcctgcagctggtgcacgtgtcccaggaggacaagaggaagaccactggagaggagaatggagtggaggccgaggagtggggcaagttcctgcacaccaagaacaagctgtacacagactttgatgagatccggcaggagattgaaaatgaaacagagcgcatcagcggcaacaacaagggcgtgtccccagagcccatccacctgaagatcttcagccccaacgtggtgaacctgaccctggtggacctgcccggcatgaccaaggtgcctgtgggggaccagcccaaggacatcgagctgcagatccgggagctgatcctgcgcttcatcagcaaccccaacagcatcatcctggccgtgacagctgccaacacagacatggccaccagcgaggccctgaagatcagccgggaggtggaccctgatggccgccgcaccctggccgtcatcaccaagctggacctgatggatgctggaacagatgccatggatgtgctgatgggccgggtcatccctgtgaagctgggcatcatcggcgtggtgaacagaagccagctggacatcaacaacaagaagtctgtgacagacagcatcagagatgaatatgccttcctgcagaagaagtaccccagcctggccaacagaaatggcaccaagtacctggcccggaccctgaaccggctgctgatgcaccacatccgggactgcctgcctgagctgaagacccgcatcaacgtgctggccgcccagtaccagagcctgctgaacagctatggagagcctgtggatgacaagagcgccaccctgctgcagctgatcaccaagtttgccacagagtactgcaacaccatcgagggcacagccaagtacatcgagaccagcgagctgtgtggcggggcccgcatctgctacatcttccacgagaccttcggccgcaccctggagagcgtggaccccctgggcggcctgaacaccatcgacatcctgacagccatcagaaatgccaccggccccaggcctgccctgtttgtgcctgaggtgtcctttgagctgctggtgaagaggcagatcaagaggctggaggagcccagcctgcgctgtgtggagctggtgcatgaggagatgcagaggatcatccagcactgcagcaactacagcacccaggagctgctgcgcttccccaagctgcatgatgccatcgtggaggtggtgacctgcctgctgaggaagaggctgcctgtgaccaatgagatggtgcacaacctggtggccatcgagctggcctacatcaacaccaagcacccagactttgctgatgcctgtggcctgatgaacaacaacatcgaggagcagaggaggaaccggctggcccgggagctgcccagcgctgtgtcccgggacaagagcagcaaggtgcccagcgccctggccccagccagccaggagcccagccctgctgccagcgctgaggctgatggcaagctgatccaggacagccggcgggagaccaagaatgtggccagcggcggcggcggcgtgggagatggagtgcaggagcccaccaccggcaactggaggggcatgctgaagaccagcaaggccgaggagctgctggccgaggagaagagcaagcccatccccatcatgcctgccagcccccagaagggccatgctgtgaacctgctggatgtgcctgtgcctgtggccaggaagctgagcgcccgggagcagagggactgtgaggtgattgagcggctcatcaagagctacttcctgattgtgaggaagaacatccaggacagcgtgcccaaggctgtgatgcacttcctggtgaaccacgtgaaggacaccctgcagagcgagctggtgggccagctgtacaagagcagcctgctggatgacctgctgacagaaagtgaggacatggcccagaggaggaaggaggccgctgacatgctgaaggccctgcagggcgccagccagatcatcgccgagatccgggagacccacctgtggtag

SEQ ID NO: 172326 - DNA, 2211 bp, Artificial Sequence
  derived and/or modified sequence
atggaggccctgatccccgtgatcaacaagctgcaggacgtgttcaataccgtgggcgctgatattatccagcttccacagattgtagtcgtcggcactcagtcttcgggcaaaagctcagtgctagagagtctcgtcggccgcgacctgttgccacgcggaaccggcattgtgacgagaagacccttaatcctgcaactagtgcacgtatcccaggaggataagcggaaaacaaccggtgaggagaatggggtggaagctgaggagtgggggaagtttctccacaccaagaacaaactgtatacggattttgacgagattagacaggagatagaaaatgaaacggaaaggatcagtggcaacaataagggcgtgtcgcccgagcccatccacctcaagattttttccccaaacgtggtgaacctgacacttgtcgatctcccagggatgaccaaagtaccagtgggcgaccagcccaaagatatagaattgcagatcagagagctcatcttgaggttcatctccaaccccaattcaatcattctcgctgtcacggccgccaataccgacatggcgacttccgaagctctgaagatatctcgcgaggtggaccccgatggacgacggaccctggcggtcatcaccaagctggatcttatggacgccggcactgacgctatggacgtactgatggggagggtgatccctgttaagctcggcatcattggcgtggtgaaccggagccagctggatattaacaataaaaagtcagtcacagattcaattagagacgaatatgcgttcctgcagaaaaaataccccagtctcgctaatcgcaatgggactaagtatctcgctcgtacacttaatcgcctcctcatgcatcacatcagggactgcttacctgagctcaaaactcggatcaatgtcttggcagctcagtatcagtcactgctcaatagttacggtgaaccagtcgatgacaagtctgcaaccctactgcagctaatcacaaaattcgcgacggaatattgcaacacgattgagggtaccgccaagtatattgaaacatccgagctgtgtgggggagctcgcatttgctacattttccacgaaacattcggtagaacactcgaatctgtagacccacttgggggactgaataccattgatatactgaccgccatccggaacgcaacaggtccgcggccggctctgtttgtgcccgaggtgagcttcgagctgttagtgaagaggcagataaaacggctggaggaacctagcttacggtgtgtcgagctggtccatgaggaaatgcagagaatcattcagcattgttccaactattccacccaggagctgcttcgatttccaaagctgcacgatgctattgtggaggtggtgacctgcttattgcgcaagaggcttcccgtcactaacgagatggtgcataatctggttgctattgagctggcttacatcaacacaaagcaccctgatttcgcggacgcctgtgggctcatgaataacaacattgaagagcaacgtagaaatcgccttgctcgggagctcccatccgccgtctcccgagacaagtcatcgaaagtaccatctgcactggcacccgctagccaggaaccctctcccgctgcttcggctgaggccgatggaaagttgattcaggattcccgccgagagaccaaaaatgtggcaagcggaggggggggtgtgggtgacggagtacaggaaccaacaacaggcaactggcgcggtatgctgaaaacaagcaaggccgaagagctgctggccgaagagaaaagcaagcccataccgatcatgcccgcgtcccctcaaaaagggcatgcggtgaacttactggacgtcccagtaccggtggccagaaagctctctgcacgcgaacagcgcgactgtgaggttatcgagcgcttgattaagtcttactttctgattgtgcgcaagaacattcaggattccgtacccaaagccgtaatgcacttcttggttaaccacgtgaaagatactctgcaaagcgagctcgtcggccaactctacaagtcatctctactggacgacctgctgaccgaatctgaggatatggcccaacggcgtaaggaagccgcagatatgctgaaggcactgcagggggcgtctcagattatagccgagatcagagaaacacatctttggtag

SEQ ID NO: 172327 - DNA, 2211 bp, Artificial Sequence
  derived and/or modified sequence
atggaggcgctaattcctgtgatcaacaagctccaagacgtcttcaacactgtgggcgctgacattattcagctcccgcagatcgttgtcgtcggcacacagagttctggtaaaagcagtgtgctggagtctttggtggggcgtgatcttctgcctcgagggacgggaatcgtaacgagacgaccattgattcttcagttggtgcacgtgtctcaggaggataagcggaagactacgggggaggaaaacggcgtggaggcagaggaatgggggaagttcctgcataccaaaaacaagctatacaccgattttgacgagattagacaggaaattgaaaatgaaactgaaaggatctccggtaacaacaaaggtgtatcccctgaaccaatacatctgaagatctttagccccaatgtggtgaatcttaccctagtagacctaccaggaatgacaaaggtccctgttggcgaccaacccaaggatatagaactgcagataagggaactgattctacggttcatctcaaatccaaatagcattattttagccgtgacggctgccaataccgatatggctactagcgaggctctgaagatatcccgagaagtggacccagacggaagacggactctggccgtgattacaaaactggaccttatggacgcagggaccgacgccatggacgttctgatgggacgggtaattcctgttaagttgggtatcatcggagtagtaaaccgaagtcaactggacattaacaataaaaagtcagttacagatagtatcagggatgaatatgcttttcttcagaagaaatacccatccttggccaataggaatggaactaaatacctcgctcggaccctcaacagacttttgatgcaccacataagggattgtctgcccgagctgaaaacccggatcaatgtgttggcagctcagtaccagtccctcctgaattcctacggggaacctgtggacgataagagtgccacgttgctccagttgatcactaaattcgcaaccgagtattgtaacacgattgaagggactgctaaatatattgaaacgtctgaactgtgcggcggagcgagaatttgttatattttccatgaaacctttggaaggacgcttgagtcagtcgacccactaggtggcctgaacaccattgacatcttaacagcgatccgtaacgctactggaccgagaccagctctgtttgtgcctgaagtcagttttgagctcttagtgaagcggcagataaaaaggctggaggagcctagtctacggtgcgttgaactggtgcacgaggaaatgcagcggattatacaacactgttcgaattactccacccaggagcttctaagatttccgaagctgcacgatgccatcgttgaagtggttacctgtttactgagaaagcggttgcctgttactaacgaaatggtccataacctcgtggcgattgagctagcttatatcaacacgaaacatcccgacttcgccgacgcctgcggactaatgaataacaacattgaagaacagaggcgcaaccgcctggccagggaactcccatctgccgtgtctcgagataagtcctctaaggtacctagtgcactcgccccagcttcccaagagccttcccccgcagcctccgcggaagcggatgggaaacttatacaggactcccgtagggagacaaaaaacgtcgcgtccggcggtggtggagtcggcgatggcgttcaggaacccactaccggcaattggcggggaatgcttaagacatccaaggccgaagagttgctggcagaggagaagtcaaagccgatcccgatcatgcccgctagcccccagaaaggccatgccgtcaatctgctggatgtgcccgtccccgtggccagaaagttgagtgccagggagcagagagactgcgaggtgattgaacgactaatcaagtcgtactttctgatcgtgcgcaagaatatccaggattctgtccctaaggccgttatgcattttttagtgaaccacgtaaaagacaccctgcagtctgaactcgttggacaattatacaaatcctccctgttggacgatcttctcactgaatccgaagatatggcacagcgacggaaagaagcggcagacatgttgaaggctctgcagggagcatcccaaattatagccgaaatacgcgagacgcacctgtggtag

SEQ ID NO: 172328 - DNA, 2211 bp, Artificial Sequence
  derived and/or modified sequence
atggaggccctgatccccgtgatcaacaagctgcaggacgtgttcaacaccgtgggcgccgacatcatccagctgccccagatcgtggtggtgggcacccagagcagcggcaagagcagcgtgctggagagcctggtgggcagagacctgctgcccagaggcaccggcatcgtgaccagaagacccctgatcctgcagctggtgcacgtgagccaggaggacaagagaaagaccaccggcgaggagaacggcgtggaggccgaggagtggggcaagttcctgcacaccaagaacaagctgtacaccgacttcgacgagatcagacaggagatcgagaacgagaccgagagaatcagcggcaacaacaagggcgtgagccccgagcccatccacctgaagatcttcagccccaacgtggtgaacctgaccctggtggacctgcccggcatgaccaaggtgcccgtgggcgaccagcccaaggacatcgagctgcagatcagagagctgatcctgagattcatcagcaaccccaacagcatcatcctggccgtgaccgccgccaacaccgacatggccaccagcgaggccctgaagatcagcagagaggtggaccccgacggcagaagaaccctggccgtgatcaccaagctggacctgatggacgccggcaccgacgccatggacgtgctgatgggcagagtgatccccgtgaagctgggcatcatcggcgtggtgaacagaagccagctggacatcaacaacaagaagagcgtgaccgacagcatcagagacgagtacgccttcctgcagaagaagtaccccagcctggccaacagaaacggcaccaagtacctggccagaaccctgaacagactgctgatgcaccacatcagagactgcctgcccgagctgaagaccagaatcaacgtgctggccgcccagtaccagagcctgctgaacagctacggcgagcccgtggacgacaagagcgccaccctgctgcagctgatcaccaagttcgccaccgagtactgcaacaccatcgagggcaccgccaagtacatcgagaccagcgagctgtgcggcggcgccagaatctgctacatcttccacgagaccttcggcagaaccctggagagcgtggaccccctgggcggcctgaacaccatcgacatcctgaccgccatcagaaacgccaccggccccagacccgccctgttcgtgcccgaggtgagcttcgagctgctggtgaagagacagatcaagagactggaggagcccagcctgagatgcgtggagctggtgcacgaggagatgcagagaatcatccagcactgcagcaactacagcacccaggagctgctgagattccccaagctgcacgacgccatcgtggaggtggtgacctgcctgctgagaaagagactgcccgtgaccaacgagatggtgcacaacctggtggccatcgagctggcctacatcaacaccaagcaccccgacttcgccgacgcctgcggcctgatgaacaacaacatcgaggagcagagaagaaacagactggccagagagctgcccagcgccgtgagcagagacaagagcagcaaggtgcccagcgccctggcccccgccagccaggagcccagccccgccgccagcgccgaggccgacggcaagctgatccaggacagcagaagagagaccaagaacgtggccagcggcggcggcggcgtgggcgacggcgtgcaggagcccaccaccggcaactggagaggcatgctgaagaccagcaaggccgaggagctgctggccgaggagaagagcaagcccatccccatcatgcccgccagcccccagaagggccacgccgtgaacctgctggacgtgcccgtgcccgtggccagaaagctgagcgccagagagcagagagactgcgaggtgatcgagagactgatcaagagctacttcctgatcgtgagaaagaacatccaggacagcgtgcccaaggccgtgatgcacttcctggtgaaccacgtgaaggacaccctgcagagcgagctggtgggccagctgtacaagagcagcctgctggacgacctgctgaccgagagcgaggacatggcccagagaagaaaggaggccgccgacatgctgaaggccctgcagggcgccagccagatcatcgccgagatcagagagacccacctgtggtag

SEQ ID NO: 172329 - DNA, 2487 bp, Artificial Sequence
  derived and/or modified sequence
ggaggcgaactgtgggccccggccccattcattgccgtggccggcgggcactggggccccgtgttttcagagtcatggaggcgctaattcctgtcataaacaagctccaggacgtcttcaacacggtgggcgccgacatcatccagctgcctcaaatcgtcgtagtgggaacgcagagcagcggaaagagctcagtgctagaaagcctggtggggagggacctgcttcccagaggtactggaattgtcacccggagacctctcattctgcaactggtccatgtttcacaagaagataaacggaaaacaacaggagaagaaaatggggtggaagcagaagaatggggtaaatttcttcacaccaaaaataagctttacacggattttgatgaaattcgacaagaaattgaaaatgaaacagaaagaatttcaggaaataataagggagtaagccctgaaccaattcatcttaagattttttcacccaacgttgtcaatttgacacttgtggatttgccaggaatgaccaaggtgcctgtaggtgatcaacctaaggatattgagcttcaaatcagagagctcattcttcggttcatcagtaatcctaattccattatcctcgctgtcactgctgctaatacagatatggcaacatcagaggcacttaaaatttcaagagaggtagatccagatggtcgcagaaccctagctgtaatcactaaacttgatctcatggatgcgggtactgatgccatggatgtattgatgggaagggttattccagtcaaacttggaataattggagtagttaacaggagccagctagatattaacaacaagaagagtgtaactgattcaatccgtgatgagtatgcttttcttcaaaagaaatatccatctctggccaatagaaatggaacaaagtatcttgctaggactctaaacaggttactgatgcatcacatcagagattgtttaccagagttgaaaacaagaataaatgttctagctgctcagtatcagtctcttctaaatagctacggtgaacccgtggatgataaaagtgctactttactccaacttattaccaaatttgccacagaatattgtaacactattgaaggaactgcaaaatatattgaaacttcggagctatgcggtggtgctagaatttgttatattttccatgagacttttgggcgaaccttagaatctgttgatccacttggtggccttaacactattgacattttgactgccattagaaatgctactggtcctcgtcctgctttatttgtgcctgaggtttcatttgagttactggtgaagcggcaaatcaaacgtctagaagagcccagcctccgctgtgtggaactggttcatgaggaaatgcaaaggatcattcagcactgtagcaattacagtacacaggaattgttacgatttcctaaacttcatgatgccatagttgaagtggtgacttgtcttcttcgtaaaaggttgcctgttacaaatgaaatggtccataacttagtggcaattgaactggcttatatcaacacaaaacatccagactttgctgatgcttgtgggctaatgaacaataatatagaggaacaaaggagaaacaggctagccagagaattaccttcagctgtatcacgagacaagtcttctaaagttccaagtgctttggcacctgcctcccaggagccctcccccgctgcttctgctgaggctgatggcaagttaattcaggacagcagaagagaaactaaaaatgttgcatctggaggtggtggggttggagatggtgttcaagaaccaaccacaggcaactggagaggaatgctgaaaacttcaaaagctgaagagttattagcagaagaaaaatcaaaacccattccaattatgccagccagtccacaaaaaggtcatgccgtgaacctgctagatgtgccagttcctgttgcacgaaaactatctgctcgggaacagcgagattgtgaggttattgaacgactcattaaatcatattttctcattgtcagaaagaatattcaagacagtgtgccaaaggcagtaatgcattttttggttaatcatgtgaaagacactcttcagagtgagctagtaggccagctgtataaatcatccttattggatgatcttctgacagaatctgaggacatggcacagcgcaggaaagaagcagctgatatgctaaaggcattacaaggagccagtcaaattattgctgaaatccgggagactcatctttggtgaagagaactatgtaatactgagactttgttgactcaaaacttgctagttactgcctacctgagtagaatcttatttatgaactcctgtgtattgcaatggtatgaatctgctcatgtggagactggctataaactgaaaagtgtattccaaattgcagaacacatcacacatttaatccaaataataaatggctgtttctaaa

SEQ ID NO: 172330 - protein, 710 aa, Artificial Sequence
  derived and/or modified sequence
MEALIPVINKLQDVFNTVGADIIQLPQIVVVGTQSSGKSSVLESLVGRDLLPRGTGIVTRRPLILQLVHVSQEDKRKTTGEENGVEAEEWGKFLHTKNKLYTDFDEIRQEIENETERISGNNKGVSPEPIHLKIFSPNVVNLTLVDLPGMTKVPVGDQPKDIELQIRELILRFISNPNSIILAVTAANTDMATSEALKISREVDPDGRRTLAVITKLDLMDAGTDAMDVLMGRVIPVKLGIIGVVNRSQLDINNKKSVTDSIRDEYAFLQKKYPSLANRNGTKYLARTLNRLLMHHIRDCLPELKTRINVLAAQYQSLLNSYGEPVDDKSATLLQLITKFATEYCNTIEGTAKYIETSELCGGARICYIFHETFGRTLESVDPLGGLNTIDILTAIRNATGPRPALFVPEVSFELLVKRQIKRLEEPSLRCVELVHEEMQRIIQHCSNYSTQELLRFPKLHDAIVEVVTCLLRKRLPVTNEMVHNLVAIELAYINTKHPDFADACGLMNNNIEEQRRNRLARELPSAVSRDKLIQDSRRETKNVASGGGGVGDGVQEPTTGNWRGMLKTSKAEELLAEEKSKPIPIMPASPQKGHAVNLLDVPVPVARKLSAREQRDCEVIERLIKSYFLIVRKNIQDSVPKAVMHFLVNHVKDTLQSELVGQLYKSSLLDDLLTESEDMAQRRKEAADMLKALQGASQIIAEIRETHLW

SEQ ID NO: 172331 - DNA, 2133 bp, Artificial Sequence
  derived and/or modified sequence
atggaggccttgattcctgtgatcaataagctccaggatgtcttcaacacggtcggcgccgatattatccaattgccccaaatcgtcgtggtgggaacacagtcatctggaaagagcagtgtgctggagagtctcgttggccgggatctgctccccagaggcacagggatagtcacccgccgcccactgatattacagcttgtgcatgtctctcaggaggataaaaggaagaccacaggggaggagaatggggtcgaggccgaagaatggggaaagtttttacatacaaaaaataaactgtatacagattttgacgagattcgacaggaaatagagaacgagactgagagaataagcggtaacaataaaggggtctctcccgaacccatacatctgaaaatttttagtccaaatgttgtcaacctcacacttgtggacttaccaggcatgaccaaggtgccagtaggtgaccagcctaaagatatcgagctgcaaattcgggaactgattctgagatttatctctaaccctaactctatcatcctggctgtgactgcggcaaacaccgatatggcaaccagcgaagccttaaaaatatcgcgtgaggtcgatcctgacgggaggcgaaccctggcagtgatcaccaagctcgatctgatggatgctggcactgatgctatggatgtccttatggggagggtgattcctgtaaagctcggcattataggagtggtaaatcgcagtcagctcgatatcaataataagaaatccgttacggacagtatcagagatgaatatgcttttttgcaaaagaagtaccctagcctggctaatagaaacgggactaagtatctcgctagaactctgaacaggttgctcatgcaccatatccgggactgcctccccgagctgaaaactcgcatcaatgtgctcgccgcccaataccagtcactgctgaattcctatggagagcccgtggatgataagtctgctacccttctccagctaatcaccaagttcgcgaccgaatactgcaacaccattgagggaactgctaaatatattgaaaccagcgaactgtgtggaggggctcgaatttgttatatctttcacgagacttttggccgtacgctggagagtgtggatcctcttggtggattgaacaccatcgacatcttgacagcgatccgcaacgctactggcccccggcccgcactcttcgttcctgaagtgagctttgaactgttagttaagcgccaaattaagcgtttagaagagccttccctgcggtgcgtagagctcgtgcacgaagagatgcagagaatcatccagcattgctccaattattctacccaggagcttctgcgcttcccaaagctccacgatgctattgtggaggtcgtcacttgcctgctgcgtaaacggctgcctgttacaaatgagatggtgcacaatctggtggcaatcgaactggcttacatcaacacgaagcaccccgacttcgcagatgcctgcgggctgatgaacaacaacattgaggaacagcgaaggaaccgcctggcacgtgaactcccaagtgccgtgagtcgcgataaactcatccaggattcgagaagagagaccaagaacgtggcctctggtggagggggtgttggcgacggagtacaggaacctactactggcaattggagggggatgttaaaaacgtccaaagctgaagaactgcttgcagaagagaaaagcaagcctatcccgatcatgcctgcaagcccgcaaaaagggcacgctgtgaatctgctggatgttcctgtacccgtcgcccggaagttatcggcgagagagcaaagggactgcgaggtgattgaaaggctgattaagtcttacttcttgattgtcagaaagaatatccaggattccgtgccgaaggcggttatgcacttcctggttaatcacgtgaaggacacactacagtctgagcttgtggggcagctttacaagagctcactcttggatgacctcttaaccgaatcggaggatatggctcagcgtagaaaggaagccgctgacatgctgaaggccctccaaggcgcctctcagatcatcgcagaaatcagggagacccacttgtggtag

SEQ ID NO: 172332 - DNA, 2133 bp, Artificial Sequence
  derived and/or modified sequence
atggaggccctgatccctgtgatcaacaagctgcaggatgtgttcaacacagtgggcgctgacatcatccagctgccccagatcgtggtggtgggcacccagagcagcggcaagagctctgtgctggagagcctggtgggccgggacctgctgccccggggcactggaattgtgacccggcggcccctcatcctgcagctggtgcacgtgtcccaggaggacaagaggaagaccactggagaggagaatggagtggaggccgaggagtggggcaagttcctgcacaccaagaacaagctgtacacagactttgatgagatccggcaggagattgaaaatgaaacagagcgcatcagcggcaacaacaagggcgtgtccccagagcccatccacctgaagatcttcagccccaacgtggtgaacctgaccctggtggacctgcccggcatgaccaaggtgcctgtgggggaccagcccaaggacatcgagctgcagatccgggagctgatcctgcgcttcatcagcaaccccaacagcatcatcctggccgtgacagctgccaacacagacatggccaccagcgaggccctgaagatcagccgggaggtggaccctgatggccgccgcaccctggccgtcatcaccaagctggacctgatggatgctggaacagatgccatggatgtgctgatgggccgggtcatccctgtgaagctgggcatcatcggcgtggtgaacagaagccagctggacatcaacaacaagaagtctgtgacagacagcatcagagatgaatatgccttcctgcagaagaagtaccccagcctggccaacagaaatggcaccaagtacctggcccggaccctgaaccggctgctgatgcaccacatccgggactgcctgcctgagctgaagacccgcatcaacgtgctggccgcccagtaccagagcctgctgaacagctatggagagcctgtggatgacaagagcgccaccctgctgcagctgatcaccaagtttgccacagagtactgcaacaccatcgagggcacagccaagtacatcgagaccagcgagctgtgtggcggggcccgcatctgctacatcttccacgagaccttcggccgcaccctggagagcgtggaccccctgggcggcctgaacaccatcgacatcctgacagccatcagaaatgccaccggccccaggcctgccctgtttgtgcctgaggtgtcctttgagctgctggtgaagaggcagatcaagaggctggaggagcccagcctgcgctgtgtggagctggtgcatgaggagatgcagaggatcatccagcactgcagcaactacagcacccaggagctgctgcgcttccccaagctgcatgatgccatcgtggaggtggtgacctgcctgctgaggaagaggctgcctgtgaccaatgagatggtgcacaacctggtggccatcgagctggcctacatcaacaccaagcacccagactttgctgatgcctgtggcctgatgaacaacaacatcgaggagcagaggaggaaccggctggcccgggagctgcccagcgctgtgtcccgggacaagctgatccaggacagccggcgggagaccaagaatgtggccagcggcggcggcggcgtgggagatggagtgcaggagcccaccaccggcaactggaggggcatgctgaagaccagcaaggccgaggagctgctggccgaggagaagagcaagcccatccccatcatgcctgccagcccccagaagggccatgctgtgaacctgctggatgtgcctgtgcctgtggccaggaagctgagcgcccgggagcagagggactgtgaggtgattgagcggctcatcaagagctacttcctgattgtgaggaagaacatccaggacagcgtgcccaaggctgtgatgcacttcctggtgaaccacgtgaaggacaccctgcagagcgagctggtgggccagctgtacaagagcagcctgctggatgacctgctgacagaaagtgaggacatggcccagaggaggaaggaggccgctgacatgctgaaggccctgcagggcgccagccagatcatcgccgagatccgggagacccacctgtggtag

SEQ ID NO: 172333 - DNA, 2133 bp, Artificial Sequence
  derived and/or modified sequence
atggaggccctgatccccgtgatcaacaagctgcaggacgtgttcaacaccgtcggcgccgacatcatccaattacctcaaatcgtggtagttggcacccagtcctcagggaagtcctcagtcctggagagcctagtcggccgtgacttgctgccccgcgggactggcatcgtcacacggcgtccactgatcttgcaacttgttcatgtgtctcaggaggacaagaggaagacaacaggagaagaaaatggagtggaagccgaggaatgggggaagtttctgcacacaaagaataaactctacaccgatttcgacgagattcgtcaggagatagagaacgaaaccgagagaatatctggtaataataaaggcgtgtcgcccgagcctattcacctgaaaatcttttcgcctaatgttgtgaacctgactcttgtggacctgccaggcatgaccaaagtgcccgtgggggatcagccaaaggatatcgaattgcagattagagaattaatcctccgcttcatttctaatcccaactccatcatcctcgccgtcactgctgccaataccgacatggccacctcagaggccctaaagattagtagagaggtggaccctgacggacggcgtaccctcgctgtgatcactaagcttgaccttatggacgctggcaccgatgctatggacgtgctgatgggtcgtgtgatacctgtgaagctgggcatcattggggtggtcaacagatctcaactcgatatcaataataaaaaatcagttaccgactctataagggatgagtatgctttccttcagaaaaagtatccctccttggcaaatagaaatggcacgaagtatcttgccagaacgctaaaccggctccttatgcaccatatacgcgattgccttcccgagttgaagacacgtataaacgtgttggcggctcagtaccaaagcctattgaactcatacggtgagcctgtggatgataaaagtgctactctcctgcagctcattacaaagttcgccacagagtattgtaacaccatcgaaggcactgctaagtatatcgaaacgtccgagctgtgtggaggagctcgcatatgctatattttccacgaaaccttcggccgaactttggaaagtgtcgaccccctgggcggactaaatactattgatattcttaccgctattcggaacgcaaccgggccaaggcctgcattgtttgtgccggaagtctccttcgaactgctggtgaaacggcaaatcaaacggttagaagaaccatctctacggtgtgtggaacttgttcatgaggaaatgcagcggatcattcagcactgtagtaactacagtacacaggaactcctgagattcccgaaactccatgatgccatcgtcgaggtggtcacctgtctgctgagaaaaagactcccggtcactaacgaaatggtccacaacctggtggcgattgagctcgcgtacattaatactaaacacccagactttgccgacgcatgcgggctcatgaataacaacattgaagagcagcgccgcaatcgcttagccagggagctgccatccgcagtatcacgggacaagcttatccaggactctcgcagagagacgaagaatgtagcctccgggggaggaggtgtaggagacggagtacaggagccaaccaccgggaattggaggggaatgttaaagacttctaaggccgaggaactgctggcagaggaaaaaagcaaacccataccaattatgcctgccagtcctcagaaggggcacgcagtaaacctgcttgatgtaccagtccctgtcgcccgaaaattaagcgcccgtgagcagagagactgtgaagtgattgaacgactgataaaatcctacttcttgatagtgagaaagaacatccaagactctgttcctaaggccgttatgcatttcctggtcaaccacgtgaaggacactctccagagcgagctggtgggacagttgtataagagttcccttttggacgaccttttgacggaaagcgaggacatggcccagagacgcaaggaggctgcagacatgttaaaggccctgcagggggctagccagattatcgctgagataagagagacccacctgtggtag

SEQ ID NO: 172334 - DNA, 2133 bp, Artificial Sequence
  derived and/or modified sequence
atggaggcgctgattcctgtgattaataaacttcaggatgttttcaataccgtgggagccgacattatacagctcccgcagattgttgtggtagggacgcagagcagcggtaagagctcagtgcttgaaagccttgtcggaagggatttattgccgagggggaccgggatagtcacacgcagacctttgatactacagctggtgcacgtctcgcaagaagacaaaagaaagaccaccggcgaagaaaatggagtggaagcagaggaatggggaaagttcttgcacacaaaaaataagctgtacacggacttcgacgagatcaggcaggagatcgagaacgagacagaacggatcagcgggaacaataagggcgtgagccctgagcctatacaccttaagattttcagcccaaatgtggtcaacctgacactagtggacctccctggtatgaccaaggtccccgtgggtgatcagcccaaggacattgaactgcagataagagagcttatcctgcggttcataagtaaccccaattccattatcctggcggtgaccgcagccaacacagacatggcaacctccgaagcgctgaagattagtagagaggtagacccggacggtcgcagaactctagccgtgatcaccaagttggatctcatggacgcagggacggacgccatggatgtgctgatgggccgagttatcccggtcaaacttggcattatcggggtggtgaacaggtcccagctcgacataaataacaagaaatccgtgactgactccatccgggacgagtacgcgttcctgcagaagaagtatccaagccttgctaacaggaatggcacgaaatacctagccagaactctgaatagacttcttatgcaccacattagagattgcctgccagagcttaagactagaatcaatgtcctggctgcccagtaccagtctctgttgaacagttatggcgagccggtggacgataagtcagctactctgctgcaattaattaccaagttcgcaaccgagtactgtaatacaatcgaaggcaccgcgaagtatattgaaacatctgagctgtgcggtggggcacggatctgctacatctttcacgagacatttggccgtaccctcgagtcagtcgatccactgggaggacttaacactatcgatatcctcaccgctatccgaaatgccaccggaccaagacccgctctttttgtgcctgaggtgtcgttcgagctgctggtgaaacgtcagatcaagaggctggaggaaccttccttgaggtgtgtggaactggtacacgaggagatgcagcggattatccagcactgtagcaactactccacccaagagctcctccggtttcccaagctgcatgatgctatcgtggaggtggtcacatgtctgctgcgaaagcggctgcctgtgacaaatgaaatggtgcataacttggtagccattgagttggcgtacataaacactaagcacccggacttcgctgatgcctgcggactcatgaacaacaacatcgaggagcaacgcaggaacagactcgcccgagagttgccctcagccgtgtcacgcgacaaactgatccaagatagcagacgggaaactaaaaacgtggcatccgggggaggcggtgttggcgatggagtgcaggagcccacaaccggtaactggaggggaatgctcaaaacttccaaggccgaggaacttctggctgaggagaaaagcaagccgattccgatcatgccagcctctcctcagaagggtcatgcggtgaatctccttgacgtgcccgtgcccgtggccaggaagcttagtgccagggagcagagggattgtgaggtgattgagcggttgatcaagtcctacttccttattgtgcggaaaaatattcaggacagcgtcccgaaggccgtcatgcactttttggtcaaccatgtgaaggacactttgcagtctgagcttgtcgggcaactgtacaaaagtagcctgctggatgatctcttaacagaatccgaagatatggcacagcgcaggaaggaagctgctgatatgcttaaggccttgcaaggcgctagtcagataatcgcagagatcagggaaacccatctgtggtag

SEQ ID NO: 172335 - DNA, 2133 bp, Artificial Sequence
  derived and/or modified sequence
atggaggccctgatccccgtgatcaacaagctgcaggacgtgttcaacaccgtgggcgccgacatcatccagctgccccagatcgtggtggtgggcacccagagcagcggcaagagcagcgtgctggagagcctggtgggcagagacctgctgcccagaggcaccggcatcgtgaccagaagacccctgatcctgcagctggtgcacgtgagccaggaggacaagagaaagaccaccggcgaggagaacggcgtggaggccgaggagtggggcaagttcctgcacaccaagaacaagctgtacaccgacttcgacgagatcagacaggagatcgagaacgagaccgagagaatcagcggcaacaacaagggcgtgagccccgagcccatccacctgaagatcttcagccccaacgtggtgaacctgaccctggtggacctgcccggcatgaccaaggtgcccgtgggcgaccagcccaaggacatcgagctgcagatcagagagctgatcctgagattcatcagcaaccccaacagcatcatcctggccgtgaccgccgccaacaccgacatggccaccagcgaggccctgaagatcagcagagaggtggaccccgacggcagaagaaccctggccgtgatcaccaagctggacctgatggacgccggcaccgacgccatggacgtgctgatgggcagagtgatccccgtgaagctgggcatcatcggcgtggtgaacagaagccagctggacatcaacaacaagaagagcgtgaccgacagcatcagagacgagtacgccttcctgcagaagaagtaccccagcctggccaacagaaacggcaccaagtacctggccagaaccctgaacagactgctgatgcaccacatcagagactgcctgcccgagctgaagaccagaatcaacgtgctggccgcccagtaccagagcctgctgaacagctacggcgagcccgtggacgacaagagcgccaccctgctgcagctgatcaccaagttcgccaccgagtactgcaacaccatcgagggcaccgccaagtacatcgagaccagcgagctgtgcggcggcgccagaatctgctacatcttccacgagaccttcggcagaaccctggagagcgtggaccccctgggcggcctgaacaccatcgacatcctgaccgccatcagaaacgccaccggccccagacccgccctgttcgtgcccgaggtgagcttcgagctgctggtgaagagacagatcaagagactggaggagcccagcctgagatgcgtggagctggtgcacgaggagatgcagagaatcatccagcactgcagcaactacagcacccaggagctgctgagattccccaagctgcacgacgccatcgtggaggtggtgacctgcctgctgagaaagagactgcccgtgaccaacgagatggtgcacaacctggtggccatcgagctggcctacatcaacaccaagcaccccgacttcgccgacgcctgcggcctgatgaacaacaacatcgaggagcagagaagaaacagactggccagagagctgcccagcgccgtgagcagagacaagctgatccaggacagcagaagagagaccaagaacgtggccagcggcggcggcggcgtgggcgacggcgtgcaggagcccaccaccggcaactggagaggcatgctgaagaccagcaaggccgaggagctgctggccgaggagaagagcaagcccatccccatcatgcccgccagcccccagaagggccacgccgtgaacctgctggacgtgcccgtgcccgtggccagaaagctgagcgccagagagcagagagactgcgaggtgatcgagagactgatcaagagctacttcctgatcgtgagaaagaacatccaggacagcgtgcccaaggccgtgatgcacttcctggtgaaccacgtgaaggacaccctgcagagcgagctggtgggccagctgtacaagagcagcctgctggacgacctgctgaccgagagcgaggacatggcccagagaagaaaggaggccgccgacatgctgaaggccctgcagggcgccagccagatcatcgccgagatcagagagacccacctgtggtag

SEQ ID NO: 172336 - DNA, 4439 bp, Artificial Sequence
  derived and/or modified sequence
agcgcatggcctgccgggagggggcaggtagccggcgggcccggtccaatgggtgccggcttccgaggagagggcggaggagaggaggaaggaggcgaactgtgggccccggccccattcattgccgtggccggcgggcactggggccccgtgttttcagagtcatggaggcgctaattcctgtcataaacaagctccaggacgtcttcaacacggtgggcgccgacatcatccagctgcctcaaatcgtcgtagtgggaacgcagagcagcggaaagagctcagtgctagaaagcctggtggggagggacctgcttcccagaggtactggaattgtcacccggagacctctcattctgcaactggtccatgtttcacaagaagataaacggaaaacaacaggagaagaaaatggggtggaagcagaagaatggggtaaatttcttcacaccaaaaataagctttacacggattttgatgaaattcgacaagaaattgaaaatgaaacagaaagaatttcaggaaataataagggagtaagccctgaaccaattcatcttaagattttttcacccaacgttgtcaatttgacacttgtggatttgccaggaatgaccaaggtgcctgtaggtgatcaacctaaggatattgagcttcaaatcagagagctcattcttcggttcatcagtaatcctaattccattatcctcgctgtcactgctgctaatacagatatggcaacatcagaggcacttaaaatttcaagagaggtagatccagatggtcgcagaaccctagctgtaatcactaaacttgatctcatggatgcgggtactgatgccatggatgtattgatgggaagggttattccagtcaaacttggaataattggagtagttaacaggagccagctagatattaacaacaagaagagtgtaactgattcaatccgtgatgagtatgcttttcttcaaaagaaatatccatctctggccaatagaaatggaacaaagtatcttgctaggactctaaacaggttactgatgcatcacatcagagattgtttaccagagttgaaaacaagaataaatgttctagctgctcagtatcagtctcttctaaatagctacggtgaacccgtggatgataaaagtgctactttactccaacttattaccaaatttgccacagaatattgtaacactattgaaggaactgcaaaatatattgaaacttcggagctatgcggtggtgctagaatttgttatattttccatgagacttttgggcgaaccttagaatctgttgatccacttggtggccttaacactattgacattttgactgccattagaaatgctactggtcctcgtcctgctttatttgtgcctgaggtttcatttgagttactggtgaagcggcaaatcaaacgtctagaagagcccagcctccgctgtgtggaactggttcatgaggaaatgcaaaggatcattcagcactgtagcaattacagtacacaggaattgttacgatttcctaaacttcatgatgccatagttgaagtggtgacttgtcttcttcgtaaaaggttgcctgttacaaatgaaatggtccataacttagtggcaattgaactggcttatatcaacacaaaacatccagactttgctgatgcttgtgggctaatgaacaataatatagaggaacaaaggagaaacaggctagccagagaattaccttcagctgtatcacgagacaagttaattcaggacagcagaagagaaactaaaaatgttgcatctggaggtggtggggttggagatggtgttcaagaaccaaccacaggcaactggagaggaatgctgaaaacttcaaaagctgaagagttattagcagaagaaaaatcaaaacccattccaattatgccagccagtccacaaaaaggtcatgccgtgaacctgctagatgtgccagttcctgttgcacgaaaactatctgctcgggaacagcgagattgtgaggttattgaacgactcattaaatcatattttctcattgtcagaaagaatattcaagacagtgtgccaaaggcagtaatgcattttttggttaatcatgtgaaagacactcttcagagtgagctagtaggccagctgtataaatcatccttattggatgatcttctgacagaatctgaggacatggcacagcgcaggaaagaagcagctgatatgctaaaggcattacaaggagccagtcaaattattgctgaaatccgggagactcatctttggtgaagagaactatgtaatactgagactttgttgactcaaaacttgctagttactgcctacctgagtagaatcttatttatgaactcctgtgtattgcaatggtatgaatctgctcatgtggagactggctataaactgaaaagtgtattccaaattgcagaacacatcacacatttaatccaaataataaatggctgtttctaaagtttcccagtatatataaaatacatcaagtctgtcttgtgacagtttcatctgaacttaacttaaaaacaactgttaatgttctagttgtgcaaagcagtttgcctgtggataagatgacctgtgtaataatctttgttagtagtcttaaagctgctgccatagtcctccaagaagaaagcaccaagacaacatttcatatgactataatgcatgtactatataagctgatctggctttgaaagatgtgagttggcaagttcctcacatagagtcattgtattccacctgtccttcaatttagttttttctgagcttctttgcagcctttgatgtgtttttaagaaagctgaatgcacaagaggatctgtgacactgacatggctgtggtgtgcatactgtgtagttacatagcccttccaattctgggtccatttgcactagcaaattaaaatatgctttgattcatacttaaacctgaaagcaggaatgcctacattaattcctacattaaaaacagccatctacccttgattatctagaaagacttggtaatgatggtcagttccttttagatttcagaaaatcaaatgatgacctaaatttcccttaatttgcaaatacagtagtaattaaggtacatctctaaagtggagcacttacaccaggctctaagattcactttgaggtggaacttaaaaccagtgtactgtatgtatgcattggtaatagctacttttgcttcatagcttcataccaacaaaatatatttattagaatagtatgaaagtactggaggagctgaaagaaaaacacccaaggctgggcgtggtggcacacgcctgtaatcccagcactttgggaggccgaggcaggtggatcacctgaggttgggagttggagaccagcttgaccaacatggagaaaccccgtctctactaaaaatacaaaattggccgggcgtggtggcgcatgcctgtaatcccagctactcgggagggtgaggcaggagaattgcttgaccctgggaggtggaggttgtggtgagctaagatcgtgccattgcactccagccttggcaacaagagcgaaactccgtctcaaaaaaaaaaaataaaacaacacccagatagatacacatactccttcagacttacagacctaagctgcatttatggggtagtgatgaggtttagaacatatacatattttgttaaaattccccagatgattcttggtatgaacgactatattataaattttaagatgtacttagaaatccttaagacatctagccccgtctctaatagacaacacatttatattgcagatattacttttttttcagtttatgaccaggtatttatgaaggactattggcagggaaaatatgaatatgttaactttagcttatggcatcaatttactaaggaacaacaggctcaccaactgatgtcaaacataaaaacccccacatcagtctgatacgatatggtactactttgaatctgttactagtaccatcttgacagaggatacatgctcccaaaacgtttgttaccacacttaaaaatcactgccatcattaagcatcagtttcaaaattatagccattcatgatttactttttccagatgactatcattattctagtcctttgaatttgtaaggggaaaaaaaacaaaaacaaaaacttacgatgcacttttctccagcacatcagatttcaaattgaaaattaaagacatgctatggtaatgcacttgctagtactacacactttgtacaacaaaaaacagaggcaagaaacaacggaaagagaaaagccttcctttgttggcccttaaactgagtcaagatctgaaatgtagagatgatctctgacgatacctgtatgttcttattgtgtaaataaaattgctggtatgaaatgacactaaa

SEQ ID NO: 172337 - protein, 263 aa, Artificial Sequence
  derived and/or modified sequence
MWELRSASFWRAIFAEFFATLFYVFFGLGSSLRWAPGPLHVLQVAMAFGLALATLVQSVGHISGAHVNPAVTFAFLVGSQMSLLRAFCYMAAQLLGAVAGAAVLYSVTPPAVRGNLALNTLHPAVSVGQATTVEIFLTLQFVLCIFATYDERRNGQLGSVALAVGFSLALGHLFGMYYTGAGMNPARSFAPAILTGNFTNHWVYWVGPIIGGGLGSLLYDFLLFPRLKSISERLSVLKGAKPDVSNGQPEVTGEPVELNTQAL

SEQ ID NO: 172338 - DNA, 792 bp, Artificial Sequence
  derived and/or modified sequence
atgtgggagcttcgttccgcaagcttttggcgagcgatcttcgctgaattctttgccacactcttttatgtgttctttgggcttggatcttccctcaggtgggcaccgggaccacttcatgtgctgcaggtcgctatggcatttggcctggcactggcaacattggtgcagtctgtaggccacattagcggggcacacgtgaacccggccgtgacattcgccttcttggtcggcagtcagatgagtctgttgcgcgctttctgttatatggcagcccagttgttgggagctgtggctggcgccgctgtgctctatagcgtcactcctccagccgtgagagggaacctggcgctcaacacactgcatcctgccgtcagcgtgggccaagccaccaccgtcgagatatttctgacactgcagtttgtgctgtgtatttttgccacgtatgatgaaagaagaaacgggcagctgggctcggtggccctggctgtagggtttagcttggcgctcggccacctcttcggaatgtactacacaggtgctggcatgaatcctgcccgatcatttgctccggctattctgaccgggaactttactaaccactgggtctattgggtggggccaatcattggtggaggtctgggttcactattatacgactttcttcttttccctcgcctcaaatcaatctctgaacggctgtcagtgttgaaaggagcgaaacccgacgtgtccaatggacaaccagaggttaccggggaacctgtggagctcaacactcaggcactttag

SEQ ID NO: 172339 - DNA, 792 bp, Artificial Sequence
  derived and/or modified sequence
atgtgggagctgcggagcgccagcttctggagggccatctttgctgagttctttgccaccctcttctacgtgttcttcggcctgggcagcagcctgcgctgggcccctggccccctgcacgtgctgcaggtggccatggccttcggcctggccctggccaccctggtgcagagcgtgggccacatcagcggggcccacgtgaacccagctgtgacctttgccttcctggtgggcagccagatgagcctgctgcgggccttctgctacatggccgcccagctgctgggcgctgtggccggggctgctgtgctgtacagcgtgaccccacctgctgtgcggggcaacctggccctgaacaccctgcaccctgctgtgtctgtgggccaggccaccaccgtggagatcttcctgaccctgcagtttgtgctgtgcatctttgccacctatgatgagaggagaaatggccagctgggctctgtggccctggccgtgggcttcagcctggccctgggccacctgtttggcatgtactacacaggagctggcatgaacccagcccggagctttgccccagccatcctgactggaaacttcaccaaccactgggtgtactgggtgggccccatcatcggcggcggcctgggcagcctgctgtatgacttcctgctcttcccccggctgaagagcatcagcgagcggctgtctgtgctgaagggggccaagccagatgtgtccaatggccagcctgaggtgactggagagcctgtggagctgaacacccaggccctgtag

SEQ ID NO: 172340 - DNA, 2599 bp, Artificial Sequence
  derived and/or modified sequence
acccaggcactgtgaccatcccccctgccatgtgggaactgcgatcagcctccttttggagggccatattcgctgagttctttgccaccctcttctatgtcttctttgggctggggtcctcactgcgctgggctcctggacccctgcatgttctgcaggtggctatggcatttggcttggccctggctacactggtgcagtctgtgggccacatcagtggagcccacgtcaatcctgcagtcacttttgctttccttgtgggctcccagatgtccctgctccgtgccttctgctatatggcagcccagctcctgggagctgtggctggggccgctgtgctgtatagcgttaccccacctgctgtccgaggaaacctagcactcaacacgttgcaccctgcggtgagcgtgggccaggcaaccacagtggagatcttcctgacgctccagttcgtgctctgcatctttgccacatacgacgagaggcggaatggccaactgggctccgtggccctggccgttggcttctcccttgccctggggcacctctttgggatgtattatactggtgcaggcatgaatcctgcccgctcctttgctcctgccattctcactgggaacttcactaaccactgggtgtactgggtaggcccaatcattggagggggtctgggcagcctcctgtacgactttcttctcttcccccggctcaagagtatttctgagagactgtctgtcctcaagggtgccaaacccgatgtctccaatggacaaccagaggtcacaggggaacctgttgaactgaacacccaggccctgtagaagctccagctgaatagagggagtagaaagcttctgagtttacgtggaggggtttagccagcccctagatgaagaaagagactgtggggagggtcatgtacttctttattttttaacttatgtatgtggttgttttttttttttttttccttttgctgtgtgaaatctttcaagttgcattcatgagctggttggtgcaaacttcccttcctccccatcccaccacccttcgccgtgtgtgctgattgtgcatatgaatgtgagtgtggctgtgtctgagttttggggcatgagagctaaggaagcaaaaagaggtgccatcctatacctcccttcctcgacccagtatggtgagtactgggtaaccgacaccttaagtttctggcctttaccctgctgccagtcaagtgtgtggctcttgatttctgagggaacagagaagcagggagttactcctcacacgaggcagatggagagaagtggaggagacaaggcttccaagggttaggagaagggactcaagggaggtgggtggtgaaaacggagtattagccccagatcaggatgtaggtgtaccgaagaattggggggaagttaatgggaatatatagcctacttatcttagggatgcttgccccagggacttgggtggggaagtagctctgagaaaagtgaacactaggatttagctgttctgtaaagccacgtaaacctgtctacatccgctggctggttgtgttcattctgacataatggatctcttcagaggtcctgggccaaagagcttccaacctaaatagagcttgggcaagcctagaatctagaaaaattaagcagcttaactggtcagcctgacatccactgttgtggctgcctggcagatggtatttaagccccacaattgttccctaaggccaacacaggaaatctgattcctggagcaaataaatgaacgggtggtagtagggggcatgaggggagaggctttgactctgttctaatttatttagagcaaatcaaaacactcctcaaatggcatctttctgcttttatcactagttccgtgttttttttcttgttttgtgtctgtgtattttcatttctctgtcatccgtcctttcatcttgaagcaaatctcttctaactccctcataccccagaaattgattccttctattcaaatgcttaataattcaggagattattatttgtttgagccctatcttctttttttttttgagagggggtcttactatgttgaccaggttggagtgcaatggatattcacaggcacgatcatcgcacactacagtctagaaatcctgggctcaagcgatcttcctgcttcagcctccccagtagctgggattacagggggccagagcacagccctattttcttttccttttggcaagatcatctcagcagaggccagaagagaccctcaactgttcaatgaatatttacggttgctttcttccttttatgagcctcttgcatactttgaaagctttaaatttatacctataatacaacggacatcccctatcccagaagaccattcctccctgtacttcagctctttacttcctcccaaataaaacctaacttttctaactaactatttaagacttggaatagtccgcttgactagaagaaggggaagaatgtttgtaaattcacctctaatcggactttgattctactataattcagcagaaaattcatagcgctgtgatttttagatcgacctcacataaaacagtccctgcactcgc

SEQ ID NO: 172341 - DNA, 792 bp, Artificial Sequence
  derived and/or modified sequence
atgtgggagctgcggagcgccagcttctggcgggccatcttcgccgagttctttgctaccctgttttatgtctttttcggtttaggctctagcctccgctgggctcctggccctctccatgtcctccaagtggccatggctttcggcctcgctctggcgacgctcgtgcagtccgtgggccatattagtggggcacacgttaatcccgcagtaacattcgcctttcttgttggaagccagatgtcgttactgagagcattttgctatatggccgcacagctgttgggagctgtggcaggcgccgccgtgctgtactcagtaacccctccagccgtccgcggcaatttggcgttaaacaccctacaccccgcagtgagcgtgggacaggccactactgtcgagatcttcctcacgctgcaatttgttctgtgcatttttgcaacctacgatgaacggaggaatggacagctgggaagtgtggctctggctgtaggattctcactcgcactcggacatctgtttgggatgtactacacaggcgctggcatgaaccccgcccgatcttttgcccccgccatattaacgggcaattttactaaccattgggtctactgggtgggtccgataatcggtggtgggcttggcagtctgctgtatgactttcttttgtttccgagactgaagtctatttccgaaaggctgagtgtcttgaaaggggcgaagccagatgtatccaacggccagccagaagtgacaggtgagcccgtcgagctcaatacacaggcgctctag

SEQ ID NO: 172342 - DNA, 792 bp, Artificial Sequence
  derived and/or modified sequence
atgtgggaacttcgcagcgccagtttttggagagccatcttcgcagaattcttcgccaccctgttctacgtgttcttcggactaggatcctcccttaggtgggcccctggaccgttacacgtgttacaggtagccatggcatttggcctcgcactggctacgttggtccagtccgtcggccatatctcaggcgcacacgtcaatccggcagtgacgttcgcctttctggtgggatctcaaatgtccctgctcagagccttctgctacatggctgctcagttactaggggcagtggcaggtgccgctgtcctgtatagcgtcacccctcccgcagttaggggcaacttagccctcaacaccctccacccagccgtgagtgtggggcaggccacaacagtggaaatcttcctaaccctgcaatttgtgctctgcattttcgcgacgtacgatgaacgccgaaatggccagctggggagtgtggccctcgccgtcggcttcagcctagccctgggacacctcttcggtatgtactataccggagctggtatgaaccccgcaaggagcttcgccccagcaattctgactggtaactttactaaccactgggtatattgggtgggaccaattatcggcggaggactgggttcactgctgtatgattttttgttgtttccaagactcaagtcaatttccgaacgcctttccgttttgaaaggcgctaagccagatgtcagcaatggacagcctgaggtcaccggcgaaccagttgagctgaacacgcaggctctgtag

SEQ ID NO: 172343 - DNA, 792 bp, Artificial Sequence
  derived and/or modified sequence
atgtgggagctgagaagcgccagcttctggagagccatcttcgccgagttcttcgccaccctgttctacgtgttcttcggcctgggcagcagcctgagatgggcccccggccccctgcacgtgctgcaggtggccatggccttcggcctggccctggccaccctggtgcagagcgtgggccacatcagcggcgcccacgtgaaccccgccgtgaccttcgccttcctggtgggcagccagatgagcctgctgagagccttctgctacatggccgcccagctgctgggcgccgtggccggcgccgccgtgctgtacagcgtgaccccccccgccgtgagaggcaacctggccctgaacaccctgcaccccgccgtgagcgtgggccaggccaccaccgtggagatcttcctgaccctgcagttcgtgctgtgcatcttcgccacctacgacgagagaagaaacggccagctgggcagcgtggccctggccgtgggcttcagcctggccctgggccacctgttcggcatgtactacaccggcgccggcatgaaccccgccagaagcttcgcccccgccatcctgaccggcaacttcaccaaccactgggtgtactgggtgggccccatcatcggcggcggcctgggcagcctgctgtacgacttcctgctgttccccagactgaagagcatcagcgagagactgagcgtgctgaagggcgccaagcccgacgtgagcaacggccagcccgaggtgaccggcgagcccgtggagctgaacacccaggccctgtag

SEQ ID NO: 172344 - protein, 652 aa, Artificial Sequence
  derived and/or modified sequence
MATSMGLLLLLLLLLTQPGAGTGADTEAVVCVGTACYTAHSGKLSAAEAQNHCNQNGGNLATVKSKEEAQHVQRVLAQLLRREAALTARMSKFWIGLQREKGKCLDPSLPLKGFSWVGGGEDTPYSNWHKELRNSCISKRCVSLLLDLSQPLLPSRLPKWSEGPCGSPGSPGSNIEGFVCKFSFKGMCRPLALGGPGQVTYTTPFQTTSSSLEAVPFASAANVACGEGDKDETQSHYFLCKEKAPDVFDWGSSGPLCVSPKYGCNFNNGGCHQDCFEGGDGSFLCGCRPGFRLLDDLVTCASRNPCSSSPCRGGATCVLGPHGKNYTCRCPQGYQLDSSQLDCVDVDECQDSPCAQECVNTPGGFRCECWVGYEPGGPGEGACQDVDECALGRSPCAQGCTNTDGSFHCSCEEGYVLAGEDGTQCQDVDECVGPGGPLCDSLCFNTQGSFHCGCLPGWVLAPNGVSCTMGPVSLGPPSGPPDEEDKGEKEGSTVPRAATASPTRGPEGTPKATPTTSRPSLSSDAPITSAPLKMLAPSGSPGVWREPSIHHATAASGPQEPAGGDSSVATQNNDGTDGQKLLLFYILGTVVAILLLLALALGLLVYRKRRAKREEKKEKKPQNAADSYSWVPERAESRAMENQYSPTPGTDC

SEQ ID NO: 172345 - protein, 347 aa, Artificial Sequence
  derived and/or modified sequence
MATSMGLLLLLLLLLTQPGAGTGADTEAVVCVGTACYTAHSGKLSAAEAQNHCNQNGGNLATVKSKEEAQHVQRVLAQLLRREAALTARMSKFWIGLQREKGKCLDPSLPLKGFSWVGGGEDTPYSNWHKELRNSCISKRCVSLLLDLSQPLLPSRLPKWSEGPCGSPGSPGSNIEGFVCKFSFKGMCRPLALGGPGQVTYTTPFQTTSSSLEAVPFASAANVACGEGDKDETQSHYFLCKEKAPDVFDWGSSGPLCVSPKYGCNFNNGGCHQDCFEGGDGSFLCGCRPGFRLLDDLVTCASRNPCSSSPCRGGATGLSQAESEEGGEEGEEAPECGRQLLLGSRAS

SEQ ID NO: 172346 - DNA, 1959 bp, Artificial Sequence
  derived and/or modified sequence
atggccaccagcatgggcctgctgctgctgctgctgctgctgctgacccagcccggcgccggcaccggcgccgacaccgaggccgtggtgtgcgtgggcaccgcctgctacaccgcccacagcggcaagctgagcgccgccgaggcccagaaccactgcaaccagaacggcggcaacctggccaccgtgaagagcaaggaggaggcccagcacgtgcagagagtgctggcccagctgctgagaagagaggccgccctgaccgccagaatgagcaagttctggatcggcctgcagagagagaagggcaagtgcctggaccccagcctgcccctgaagggcttcagctgggtgggcggcggcgaggacaccccctacagcaactggcacaaggagctgagaaacagctgcatcagcaagagatgcgtgagcctgctgctggacctgagccagcccctgctgcccagcagactgcccaagtggagcgagggcccctgcggcagccccggcagccccggcagcaacatcgagggcttcgtgtgcaagttcagcttcaagggcatgtgcagacccctggccctgggcggccccggccaggtgacctacaccacccccttccagaccaccagcagcagcctggaggccgtgcccttcgccagcgccgccaacgtggcctgcggcgagggcgacaaggacgagacccagagccactacttcctgtgcaaggagaaggcccccgacgtgttcgactggggcagcagcggccccctgtgcgtgagccccaagtacggctgcaacttcaacaacggcggctgccaccaggactgcttcgagggcggcgacggcagcttcctgtgcggctgcagacccggcttcagactgctggacgacctggtgacctgcgccagcagaaacccctgcagcagcagcccctgcagaggcggcgccacctgcgtgctgggcccccacggcaagaactacacctgcagatgcccccagggctaccagctggacagcagccagctggactgcgtggacgtggacgagtgccaggacagcccctgcgcccaggagtgcgtgaacacccccggcggcttcagatgcgagtgctgggtgggctacgagcccggcggccccggcgagggcgcctgccaggacgtggacgagtgcgccctgggcagaagcccctgcgcccagggctgcaccaacaccgacggcagcttccactgcagctgcgaggagggctacgtgctggccggcgaggacggcacccagtgccaggacgtggacgagtgcgtgggccccggcggccccctgtgcgacagcctgtgcttcaacacccagggcagcttccactgcggctgcctgcccggctgggtgctggcccccaacggcgtgagctgcaccatgggccccgtgagcctgggcccccccagcggcccccccgacgaggaggacaagggcgagaaggagggcagcaccgtgcccagagccgccaccgccagccccaccagaggccccgagggcacccccaaggccacccccaccaccagcagacccagcctgagcagcgacgcccccatcaccagcgcccccctgaagatgctggcccccagcggcagccccggcgtgtggagagagcccagcatccaccacgccaccgccgccagcggcccccaggagcccgccggcggcgacagcagcgtggccacccagaacaacgacggcaccgacggccagaagctgctgctgttctacatcctgggcaccgtggtggccatcctgctgctgctggccctggccctgggcctgctggtgtacagaaagagaagagccaagagagaggagaagaaggagaagaagccccagaacgccgccgacagctacagctgggtgcccgagagagccgagagcagagccatggagaaccagtacagccccacccccggcaccgactgctag

SEQ ID NO: 172347 - DNA, 1044 bp, Artificial Sequence
  derived and/or modified sequence
atggccaccagcatgggcctgctgctgctgctgctgctgctgctgacccagcccggcgccggcaccggcgccgacaccgaggccgtggtgtgcgtgggcaccgcctgctacaccgcccacagcggcaagctgagcgccgccgaggcccagaaccactgcaaccagaacggcggcaacctggccaccgtgaagagcaaggaggaggcccagcacgtgcagagagtgctggcccagctgctgagaagagaggccgccctgaccgccagaatgagcaagttctggatcggcctgcagagagagaagggcaagtgcctggaccccagcctgcccctgaagggcttcagctgggtgggcggcggcgaggacaccccctacagcaactggcacaaggagctgagaaacagctgcatcagcaagagatgcgtgagcctgctgctggacctgagccagcccctgctgcccagcagactgcccaagtggagcgagggcccctgcggcagccccggcagccccggcagcaacatcgagggcttcgtgtgcaagttcagcttcaagggcatgtgcagacccctggccctgggcggccccggccaggtgacctacaccacccccttccagaccaccagcagcagcctggaggccgtgcccttcgccagcgccgccaacgtggcctgcggcgagggcgacaaggacgagacccagagccactacttcctgtgcaaggagaaggcccccgacgtgttcgactggggcagcagcggccccctgtgcgtgagccccaagtacggctgcaacttcaacaacggcggctgccaccaggactgcttcgagggcggcgacggcagcttcctgtgcggctgcagacccggcttcagactgctggacgacctggtgacctgcgccagcagaaacccctgcagcagcagcccctgcagaggcggcgccaccggcctgagccaggccgagagcgaggagggcggcgaggagggcgaggaggcccccgagtgcggcagacagctgctgctgggcagcagagccagctag

SEQ ID NO: 172348 - DNA, 1959 bp, Artificial Sequence
  derived and/or modified sequence
atggccacttccatgggactgctactcctactgctattgctgcttacgcaaccgggggcagggacgggcgcggataccgaggctgtggtgtgtgtcggcaccgcctgttacaccgcccatagcggaaagctaagcgcggcagaggcccagaaccattgcaatcagaacggaggtaacctggccaccgtgaaatccaaggaagaggcccagcacgtccagcgtgtcctggcccaactactgcgccgagaggccgcattgactgctaggatgagcaagttttggatcggtttacagcgcgaaaagggtaagtgtctggatccctctctgcccctgaagggtttcagctgggtgggcggcggggaggacactccatactctaattggcacaaagaacttcggaactcctgcatttccaaaagatgtgtaagtctgctcctcgatctctcacagcctctcttgccaagcaggctgccgaaatggtccgaaggcccctgcggaagccctggatcgcctggatctaacattgaagggttcgtgtgtaagttttcttttaagggcatgtgccgacccttggctttaggtggccccggacaggtcacatataccactccattccagactacttcttcgtctctagaagccgtaccctttgcttctgcagcaaacgttgcttgtggtgaaggtgacaaggatgagacccaatctcactattttctctgcaaggaaaaggctcccgatgtttttgactggggttccagcggaccactatgcgtttccccaaaatacggatgtaattttaataacggcgggtgccatcaggattgttttgaggggggcgacgggtccttcctatgcggatgtcgacccggcttcaggctgctcgacgatctggtgacatgcgcttctcgcaacccttgctcttcctcaccttgtagaggaggcgccacctgtgtgctgggtccacacggcaaaaactatacctgccggtgtccacaagggtatcaactcgactccagtcagttggattgtgtggatgtggatgaatgtcaagacagcccttgcgcccaggaatgcgtgaataccccaggcggttttaggtgcgagtgctgggtgggttacgagcccggcggaccaggcgaaggagcctgccaggatgtggacgagtgcgcgctggggagatcgccttgtgcacagggctgtacgaacacagacgggagctttcattgctcgtgtgaggaggggtatgtgctcgctggagaggacggaacccagtgccaggatgtggatgagtgtgttggtccagggggacctctgtgtgacagtctatgctttaacactcaggggagcttccattgcgggtgccttcccggttgggtccttgcacctaacggggtgtcgtgtacaatgggtcctgtcagcctcgggcccccatctggtcctcctgacgaagaggacaagggggagaaggaaggttccacggtgcctagagctgccactgcctcccccacaagaggtccggaagggacaccgaaagcaacccccactaccagcaggccatccttatcttccgacgcaccaatcacatctgctcccctcaaaatgctagccccctctggctcccccggagtgtggagggagccatctattcaccacgccactgccgccagcggcccacaggagcccgccggaggagatagttcggttgctacacagaataacgatggtaccgatgggcagaaactccttctgttctacattctgggcacagttgtggctattttgttactgctggctctcgccctggggctccttgtctataggaagcggcgggctaaacgagaagagaaaaaagagaagaagcctcagaacgccgcggacagctattcttgggtcccggagcgtgccgagagtcgagcgatggagaaccaatactcccccacacctggaacagactgttag

SEQ ID NO: 172349 - DNA, 1044 bp, Artificial Sequence
  derived and/or modified sequence
atggccacaagcatgggtctccttttgctgctcctgctgttgctcacccagcctggggccggaacaggagccgacacggaggcagtggtttgtgtcggcactgcctgttacacagcccactcgggaaagctgtccgccgccgaggctcagaaccattgtaatcaaaatggcggcaatcttgcaaccgtgaagtcgaaggaggaagcacagcacgtgcagcgggtgctggcccaactgcttagacgggaggctgccctcacggcgcgcatgagcaaattttggataggcctgcagcgcgagaaggggaagtgtctagatccttccttgccactaaaagggtttagctgggtcggcggtggtgaggacacgccatattcaaattggcacaaagaacttcgaaactcatgcatctcaaaaagatgtgtttccctgttgttggacttgagccagcctctgctccctagccgattgcccaagtggtctgagggcccatgcgggagtcccggcagccccggttccaatattgagggttttgtctgtaagttttcctttaagggaatgtgccgtccattggccctgggaggccccggtcaggtcacttatacaacccccttccagaccacctcatccagcctcgaggccgtgccgttcgcatcagccgccaatgtagcttgtggcgaaggcgacaaggatgagacacaaagccattattttttgtgtaaagaaaaggctccggacgtttttgactggggctcttccggacctctctgcgtgagcccgaaatatggatgcaacttcaataacggaggctgtcatcaggactgtttcgaaggcggtgacggctctttcctctgcggatgcagacctgggttcaggctactggatgacctggtaacctgcgccagccggaatccctgcagcagctcaccctgccgtgggggagcgacgggtttgagtcaggctgagagtgaagagggaggggaagaaggcgaggaggctcctgaatgcgggagacagctgctcttgggctcccgggcaagctag

SEQ ID NO: 172350 - DNA, 1959 bp, Artificial Sequence
  derived and/or modified sequence
atggccacctccatgggcctgctgctgctgctgctgctgctgctgacccagcccggggccggcaccggggctgacacagaggccgtggtgtgtgtgggcacagcctgctacacagcccacagcggcaagctgtctgctgctgaggcccagaaccactgcaaccagaatggaggcaacctggccaccgtgaagagcaaggaggaggcccagcacgtgcagagggtgctggcccagctgctgcggcgggaggccgccctgacagccaggatgagcaagttctggattggcctgcagcgggagaagggcaagtgcctggaccccagcctgcccctgaagggcttctcctgggtgggcggcggggaggacaccccctacagcaactggcacaaggagctgaggaacagctgcatcagcaagagatgtgtgtccctgctgctggacctgagccagcccctgctgcccagccggctgcccaagtggagcgagggcccctgtggcagccctggcagccctggcagcaacatcgagggctttgtgtgcaagttctccttcaagggcatgtgccggcccctggccctgggcggccctggccaggtgacctacaccacccccttccagaccaccagcagcagcctggaggccgtgccctttgccagcgctgccaacgtggcctgtggggagggggacaaggatgagacccagagccactacttcctgtgcaaggagaaggccccagatgtgtttgactggggcagcagcggccccctgtgtgtgagccccaagtatggctgcaacttcaacaacggcggctgccaccaggactgctttgagggcggagatggcagcttcctgtgtggctgcaggcctggcttccggctgctggatgacctggtgacctgtgccagcaggaacccctgcagcagcagcccctgccggggcggggccacctgtgtgctgggcccccacggcaagaactacacctgccgctgcccccagggctaccagctggacagcagccagctggactgtgtggatgtggatgagtgccaggacagcccctgtgcccaggagtgtgtgaacacccctgggggcttccgctgtgagtgctgggtgggctatgagcccggcggccctggagagggcgcctgccaggatgtggatgaatgtgccctgggccgcagcccctgtgcccagggctgcaccaacacagatggcagcttccactgcagctgtgaggagggctacgtgctggccggggaggatggcacccagtgccaggatgtggatgaatgtgtgggccctgggggccccctgtgtgacagcctgtgcttcaacacccagggcagcttccactgcggctgcctgcccggctgggtgctggccccaaatggagtgtcctgcaccatgggccctgtgtccctgggcccccccagcggccccccagatgaggaggacaagggggagaaggagggcagcacagtgcccagggctgccacagccagccccacccggggccctgagggcacccccaaggccacccccaccaccagccggcccagcctgagcagtgatgcccccatcaccagcgcccccctgaagatgctggcccccagcggcagccctggggtgtggagggagcccagcatccaccacgccacagctgccagcggcccccaggagcctgctggaggagacagctctgtggccacccagaacaatgatggaacagatggccagaagctgctgctcttctacatcctgggcaccgtggtggccatcctgctgctgctggccctggccctgggcctgctggtgtacaggaagagaagagccaagcgggaggagaagaaggagaagaagccccagaatgctgctgacagctacagctgggtgcctgagagagctgagagccgggccatggagaaccagtacagccccaccccaggcacagactgctag

SEQ ID NO: 172351 - DNA, 1044 bp, Artificial Sequence
  derived and/or modified sequence
atggccacctccatgggcctgctgctgctgctgctgctgctgctgacccagcccggggccggcaccggggctgacacagaggccgtggtgtgtgtgggcacagcctgctacacagcccacagcggcaagctgtctgctgctgaggcccagaaccactgcaaccagaatggaggcaacctggccaccgtgaagagcaaggaggaggcccagcacgtgcagagggtgctggcccagctgctgcggcgggaggccgccctgacagccaggatgagcaagttctggattggcctgcagcgggagaagggcaagtgcctggaccccagcctgcccctgaagggcttctcctgggtgggcggcggggaggacaccccctacagcaactggcacaaggagctgaggaacagctgcatcagcaagagatgtgtgtccctgctgctggacctgagccagcccctgctgcccagccggctgcccaagtggagcgagggcccctgtggcagccctggcagccctggcagcaacatcgagggctttgtgtgcaagttctccttcaagggcatgtgccggcccctggccctgggcggccctggccaggtgacctacaccacccccttccagaccaccagcagcagcctggaggccgtgccctttgccagcgctgccaacgtggcctgtggggagggggacaaggatgagacccagagccactacttcctgtgcaaggagaaggccccagatgtgtttgactggggcagcagcggccccctgtgtgtgagccccaagtatggctgcaacttcaacaacggcggctgccaccaggactgctttgagggcggagatggcagcttcctgtgtggctgcaggcctggcttccggctgctggatgacctggtgacctgtgccagcaggaacccctgcagcagcagcccctgccggggcggggccaccggcctgagccaggccgagagcgaggagggcggggaggagggggaggaggccccagaatgtggccggcagctgctgctgggcagccgggccagctag

SEQ ID NO: 172352 - DNA, 1959 bp, Artificial Sequence
  derived and/or modified sequence
atggccaccagcatgggcctgctgctgctgctgctgctgctgctgacacaacccggcgcaggaactggagctgatacagaagccgttgtgtgcgtgggaaccgcatgttacaccgcccattctggaaagctctccgcagccgaggctcagaatcactgcaaccagaacggaggcaacctggcaacagtgaagtccaaagaggaggctcagcacgtgcagcgggtgctagctcagctcctgaggagggaggccgccctaacagctcgcatgagtaagttctggattggtctgcagcgcgaaaaaggcaagtgtctggatccgagcctgcccctgaagggcttctcttgggtgggtggcggcgaggacactccctactccaattggcacaaggaactccggaatagctgcatatcaaagcgctgtgtgtccttgcttctggacctctcccaacctctgctgccctcccgactgcctaaatggtctgaggggccttgtggttccccagggtctcctgggtccaacatcgagggattcgtttgtaagttttctttcaagggcatgtgtcgccccttagccctcgggggacctggccaggtgacatacactacccctttccaaaccactagctcttcccttgaggccgtccctttcgccagtgccgctaacgtggcttgcggggagggtgacaaggatgaaacccaatcccactatttcttgtgcaaggaaaaagcccccgacgtgtttgactggggtagctccggaccgctgtgcgttagtcctaaatacggctgtaatttcaataacggtggatgccaccaggactgcttcgagggcggagacggcagtttcttatgcgggtgtaggccggggtttagattgctggacgacctggtgacctgcgcctccaggaacccctgcagctcatcgccttgccggggaggcgcaacatgcgtccttggaccccatgggaagaattatacatgcaggtgtccccaggggtaccagctagatagctctcagcttgattgtgtggacgttgacgagtgccaggattcaccctgcgcacaagaatgtgtgaacactccaggcgggtttcgatgtgagtgttgggttggctatgagccaggaggccctggggagggagcatgccaggatgtagacgagtgcgccctcgggcggagtccttgcgcacagggctgtaccaataccgacggcagcttccattgtagctgcgaggagggttacgtgctggctggcgaagatggcacacaatgtcaagatgtcgatgaatgcgttggccccgggggaccattgtgcgactctctgtgcttcaacacccaaggctccttccattgtgggtgtctgccaggctgggttctggcgccaaatggagtgagttgcactatgggcccagtgtcccttggccctccaagtggtcctcctgatgaagaagataaaggggaaaaggagggatcaaccgtacctcgggcggccaccgcttcccctacccgcggcccagaggggaccccaaaggctacacccaccacctccaggcctagtctatctagcgacgccccaatcacttctgctcccctgaaaatgctagcaccaagcggatcacctggtgtgtggcgggaaccatccatacatcacgccactgcggcttccgggcctcaagagccagccggtggcgatagctctgtggctacccaaaacaatgatggtacggacgggcagaagctcctactgttctatatcttaggcaccgtcgtggccatcctgttgctgttagcattagccctcggcctgttagtatatagaaagcgcagggccaaacgtgaggagaaaaaggaaaagaagccccagaacgcggccgatagttattcctgggtacctgagagggccgagagtcgagcaatggagaaccagtattctccaaccccaggcacagattgttag

SEQ ID NO: 172353 - DNA, 1044 bp, Artificial Sequence
  derived and/or modified sequence
atggccaccagcatgggcctgctgctgctgctgctgctgctgctgacccaaccgggcgcgggcacaggtgctgatactgaagctgtcgtttgcgtgggtactgcctgctacacagctcacagtggcaagctgtccgccgcagaggctcaaaaccactgtaatcagaatggaggaaatctggcaaccgtaaagagtaaagaggaggcacagcatgtgcaaagagtgctggcacagctgctcagaagggaggcagctctcaccgcacgcatgtctaaattctggatcggacttcagcgtgaaaaggggaagtgccttgatcctagcctcccacttaagggcttcagttgggtgggggggggagaagacaccccgtactctaattggcataaggagcttagaaacagctgcatcagcaaacggtgcgttagtcttctcctggacctgtcccaaccactcttaccatctcgactgcccaagtggtcggagggcccgtgcggttctcccggtagccccggcagtaacatcgaggggttcgtttgtaaattctctttcaaaggaatgtgtcgtcccctagctctggggggcccagggcaggtcacatacaccacgccctttcagacgacatcatcttctcttgaggctgtccctttcgcttcagccgctaacgtcgcttgcggagaaggagacaaggacgagactcagtcgcactactttctttgcaaggagaaggctccggacgttttcgactggggctcatccggacctctctgcgtgtcaccaaaatacgggtgtaattttaacaacggagggtgtcatcaagattgtttcgaaggaggagacggtagctttttgtgcggctgccgcccaggtttcaggctgctggacgacctggtaacctgtgcttcaaggaatccttgcagcagcagcccctgcaggggaggggctaccgggttgagccaggcagagagcgaggaggggggtgaggaaggagaggaagcaccagaatgcggaaggcagttactacttgggagccgagctagttag

SEQ ID NO: 172354 - DNA, 1959 bp, Artificial Sequence
  derived and/or modified sequence
atggccacttctatggggctgctgctgctgctgctgcttctgctgactcagccgggagcagggacaggcgctgataccgaagccgtggtgtgtgtgggaaccgcctgttacacagcccacagtggcaagctgtctgccgctgaggctcagaatcactgtaatcaaaatggcggtaatcttgctactgtcaaaagcaaggaggaagcccagcacgttcagcgagtcctcgcacagctgcttcgtagggaagccgcactcaccgctcgtatgtcaaaattctggatcggactgcagagagaaaagggaaagtgtctggatccaagcttgcccttaaagggattctcttgggtaggcggaggcgaggatacaccatattccaattggcacaaggagctgagaaactcctgcatctctaaacggtgtgtgtcccttcttctggacctctctcaacccctcctgccttcaaggctccctaaatggagcgagggaccatgtgggtcacctggaagccctggtagtaatatcgagggttttgtttgtaagttctcctttaagggcatgtgccggcctcttgccctgggaggccctggacaggtcacgtacactaccccattccagacaaccagcagttcactggaagctgtaccgtttgccagcgccgctaatgttgcatgcggagagggtgacaaggatgaaacccagagccactatttcttatgcaaagagaaggcacctgatgtgttcgattggggcagcagcggtcccctgtgcgttagtccaaaatatgggtgtaatttcaacaacgggggttgccaccaagactgctttgagggtggagacggatcattcctgtgtgggtgccgccctggattcagactccttgacgatctcgtgacttgtgcttctagaaatccatgcagttcctccccttgccgcggtggcgctacatgtgtcctgggccctcatggaaaaaattatacgtgcagatgccctcagggataccagctagacagctcccagctcgattgtgtcgacgtcgacgagtgtcaagactctccttgtgctcaggagtgcgtcaacacaccagggggattccgctgtgagtgttgggtgggatacgaacctgggggtccaggagagggtgcttgccaggacgtcgatgagtgcgcgttgggcagaagcccgtgtgcccaggggtgcacaaacaccgatggatcgtttcattgtagttgtgaggaaggctacgtgttagccggtgaagatgggactcaatgccaggacgtggacgagtgcgtaggaccaggagggcctctttgtgattccctgtgctttaatacacagggctccttccactgtggatgcttgccaggatgggtgcttgccccaaacggggtgtcttgcaccatgggtcccgtaagtctgggccctccatctggaccacctgacgaggaggacaagggcgagaaagagggcagtacagtgcctcgggctgcaaccgcctcgcccacccggggtcctgaaggtacgccaaaggccactcctacaaccagccgtccctctttaagcagcgacgcaccaattaccagtgcccctctgaagatgcttgctccaagcggctcacccggagtatggcgcgaaccttcgattcaccatgcaacagctgcttccggccctcaggaacctgctggcggtgacagctcagtggcaacccagaataacgatgggacggacggtcagaaacttcttttattttacattttaggaacagttgtggctatcttgttactcctggccctcgcactggggcttctggtgtacaggaaaaggagggcaaagcgggaagagaaaaaagagaaaaagccccagaacgcagctgactcttatagctgggtccccgagcgggcagagtctcgcgctatggagaaccaatactcgccaaccccaggtacagactgctag

SEQ ID NO: 172355 - DNA, 1044 bp, Artificial Sequence
  derived and/or modified sequence
atggccacttctatgggcttgctgttactgcttttgctgttgcttacccagccaggggctgggacaggagccgatactgaagcagtcgtatgtgttggcactgcatgttataccgctcactctggaaaactgagtgctgccgaggcccagaaccattgtaatcagaacgggggaaatctagccactgtgaaaagtaaagaggaagcacagcatgtgcagcgcgtcctggcacagctgttgagaagggaagctgccctgaccgctagaatgagtaagttttggattgggttgcaaagagaaaaagggaagtgcctggatccatcattaccactcaaggggttttcttgggtgggtgggggtgaagatactccatactcaaattggcacaaggagctgaggaactcctgcatttcaaaaaggtgcgtgagcctccttctggacctctctcagccccttctcccttctcggctacctaagtggtccgagggtccttgcgggagtcccggatcccctggatctaatatcgaaggatttgtttgtaagttctcctttaagggcatgtgtcgtccattggcactcggtgggccaggtcaggtaacctatacaacaccctttcagaccactagtagttctttagaggcagtccccttcgcgtcggccgcaaacgtcgcatgtggcgagggcgacaaggacgaaacccagtcgcactacttcctgtgtaaggagaaggcgccagacgtctttgattgggggagtagtggaccactctgtgtatctcctaagtatggctgtaacttcaataatggtggatgccatcaagattgctttgagggcggtgacggcagcttcctctgtggatgccgacctggcttcaggttactggacgatctggtcacttgtgcctcccggaatccttgttccagctccccctgcaggggaggcgcaaccggcctgtctcaagccgagtctgaggaaggtggcgaggaaggcgaggaggccccagagtgcggtagacagttgctccttggatctagagctagctag

SEQ ID NO: 172356 - DNA, 6708 bp, Artificial Sequence
  derived and/or modified sequence
aaagccctcagcctttgtgtccttctctgcgccggagtggctgcagctcacccctcagctccccttggggcccagctgggagccgagatagaagctcctgtcgccgctgggcttctcgcctcccgcagagggccacacagagaccgggatggccacctccatgggcctgctgctgctgctgctgctgctcctgacccagcccggggcggggacgggagctgacacggaggcggtggtctgcgtggggaccgcctgctacacggcccactcgggcaagctgagcgctgccgaggcccagaaccactgcaaccagaacgggggcaacctggccactgtgaagagcaaggaggaggcccagcacgtccagcgagtactggcccagctcctgaggcgggaggcagccctgacggcgaggatgagcaagttctggattgggctccagcgagagaagggcaagtgcctggaccctagtctgccgctgaagggcttcagctgggtgggcgggggggaggacacgccttactctaactggcacaaggagctccggaactcgtgcatctccaagcgctgtgtgtctctgctgctggacctgtcccagccgctccttcccagccgcctccccaagtggtctgagggcccctgtgggagcccaggctcccccggaagtaacattgagggcttcgtgtgcaagttcagcttcaaaggcatgtgccggcctctggccctggggggcccaggtcaggtgacctacaccacccccttccagaccaccagttcctccttggaggctgtgccctttgcctctgcggccaatgtagcctgtggggaaggtgacaaggacgagactcagagtcattatttcctgtgcaaggagaaggcccccgatgtgttcgactggggcagctcgggccccctctgtgtcagccccaagtatggctgcaacttcaacaatgggggctgccaccaggactgctttgaagggggggatggctccttcctctgcggctgccgaccaggattccggctgctggatgacctggtgacctgtgcctctcgaaacccttgcagctccagcccatgtcgtgggggggccacgtgcgtcctgggaccccatgggaaaaactacacgtgccgctgcccccaagggtaccagctggactcgagtcagctggactgtgtggacgtggatgaatgccaggactccccctgtgcccaggagtgtgtcaacacccctgggggcttccgctgcgaatgctgggttggctatgagccgggcggtcctggagagggggcctgtcaggatgtggatgagtgtgctctgggtcgctcgccttgcgcccagggctgcaccaacacagatggctcatttcactgctcctgtgaggagggctacgtcctggccggggaggacgggactcagtgccaggacgtggatgagtgtgtgggcccggggggccccctctgcgacagcttgtgcttcaacacacaagggtccttccactgtggctgcctgccaggctgggtgctggccccaaatggggtctcttgcaccatggggcctgtgtctctgggaccaccatctgggccccccgatgaggaggacaaaggagagaaagaagggagcaccgtgccccgtgctgcaacagccagtcccacaaggggccccgagggcacccccaaggctacacccaccacaagtagaccttcgctgtcatctgacgcccccatcacatctgccccactcaagatgctggcccccagtgggtccccaggcgtctggagggagcccagcatccatcacgccacagctgcctctggcccccaggagcctgcaggtggggactcctccgtggccacacaaaacaacgatggcactgacgggcaaaagctgcttttattctacatcctaggcaccgtggtggccatcctactcctgctggccctggctctggggctactggtctatcgcaagcggagagcgaagagggaggagaagaaggagaagaagccccagaatgcggcagacagttactcctgggttccagagcgagctgagagcagggccatggagaaccagtacagtccgacacctgggacagactgctgaaagtgaggtggccctagagacactagagtcaccagccaccatcctcagagctttgaactccccattccaaaggggcacccacatttttttgaaagactggactggaatcttagcaaacaattgtaagtctcctccttaaaggccccttggaacatgcaggtattttctacgggtgtttgatgttcctgaagtggaagctgtgtgttggcgtgccacggtggggatttcgtgactctataatgattgttactccccctcccttttcaaattccaatgtgaccaattccggatcagggtgtgaggaggccggggctaaggggctcccctgaatatcttctctgctcacttccaccatctaagaggaaaaggtgagttgctcatgctgattaggattgaaatgatttgtttctcttcctaggatgaaaactaaatcaattaattattcaattaggtaagaagatctggttttttggtcaaagggaacatgttcggactggaaacatttctttacatttgcattcctccatttcgccagcacaagtcttgctaaatgtgatactgttgacatcctccagaatggccagaagtgcaattaacctcttaggtggcaaggaggcaggaagtgcctctttagttcttacatttctaatagccttgggtttatttgcaaaggaagcttgaaaaatatgagaaaagttgcttgaagtgcattacaggtgtttgtgaagtcacataatctacggggctagggcgagagaggccagggatttgttcacagatacttgaattaattcatccaaatgtactgaggttaccacacacttgactacggatgtgatcaacactaacaaggaaacaaattcaaggacaacctgtctttgagccagggcaggcctcagacaccctgcctgtggccccgcctccacttcatcctgcccggaatgccagtgctccgagctcagacagaggaagccctgcagaaagttccatcaggctgtttcctaaaggatgtgtgaacgggagatgatgcactgtgttttgaaagttgtcattttaaagcattttagcacagttcatagtccacagttgatgcagcatcctgagattttaaatcctgaagtgtgggtggcgcacacaccaagtagggagctagtcaggcagtttgcttaaggaacttttgttctctgtctcttttccttaaaattgggggtaaggagggaaggaagagggaaagagatgactaactaaaatcatttttacagcaaaaactgctcaaagccatttaaattatatcctcattttaaaagttacatttgcaaatatttctccctatgataatgtagtcgatagtgtgcactctttctctctctctctctctctcacacacacacacacacacacacacacacacacagagacacggcaccattctgcctggggcactggaacacattcctgggggtcaccgatggtcagagtcactagaagttacctgagtatctctgggaggcctcatgtctcctgtgggctttttaccaccactgtgcaggagaacagacagaggaaatgtgtctccctccaaggccccaaagcctcagagaaagggtgtttctggttttgccttagcaatgcatcggtctctgaggtgacactctggagtggttgaagggccacaaggtgcagggttaatactcttgccagttttgaaatatagatgctatggttcagattgtttttaatagaaaactaaaggggcaggggaagtgaaaggaaagatggaggttttgtgcggctcgatggggcatttggaacttctttttaaagtcatctcatggtctccagttttcagttggaactctggtgtttaacacttaagggagacaaaggctgtgtccatttggcaaaacttccttggccacgagactctaggtgatgtgtgaagctgggcagtctgtggtgtggagagcagccatctgtctggccattcagaggattctaaagacatggctggatgcgctgctgaccaacatcagcacttaaataaatgcaaatgcaacatttctccctctgggccttgaaaatccttgcccttatcatttggggtgaaggagacatttctgtccttggcttcccacagccccaacgcagtctgtgtatgattcctgggatccaacgagccctcctattttcacagtgttctgattgctctcacagcccaggcccatcgtctgttctctgaatgcagccctgttctcaacaacagggaggtcatggaacccctctgtggaacccacaaggggagaaatgggtgataaagaatccagttcctcaaaaccttccctggcaggctgggtccctctcctgctgggtggtgctttctcttgcacaccactcccaccacggggggagagccagcaacccaaccagacagctcaggttgtgcatctgatggaaaccactgggctcaaacacgtgctttattctcctgtttatttttgctgttactttgaagcatggaaattcttgtttgggggatcttggggctacagtagtgggtaaacaaatgcccaccggccaagaggccattaacaaatcgtccttgtcctgaggggccccagcttgctcgggcgtggcacagtggggaatccaagggtcacagtatggggagaggtgcaccctgccacctgctaacttctcgctagacacagtgtttctgcccaggtgacctgttcagcagcagaacaagccagggccatggggacgggggaagttttcacttggagatggacaccaagacaatgaagatttgttgtccaaataggtcaataattctgggagactcttggaaaaaactgaatatattcaggaccaactctctccctcccctcatcccacatctcaaagcagacaatgtaaagagagaacatctcacacacccagctcgccatgcctactcattcctgaatttcaggtgccatcactgctctttctttcttctttgtcatttgagaaaggatgcaggaggacaattcccacagataatctgaggaatgcagaaaaaccagggcaggacagttatcgacaatgcattagaacttggtgagcatcctctgtagagggactccacccctgctcaacagcttggcttccaggcaagaccaaccacatctggtctctgccttcggtggcccacacacctaagcgtcatcgtcattgccatagcatcatgatgcaacacatctacgtgtagcactacgacgttatgtttgggtaatgtggggatgaactgcatgaggctctgattaaggatgtggggaagtgggctgcggtcactgtcggccttgcaaggccacctggaggcctgtctgttagccagtggtggaggagcaaggcttcaggaagggccagccacatgccatcttccctgcgatcaggcaaaaaagtggaattaaaaagtcaaacctttatatgcatgtgttatgtccattttgcaggatgaactgagtttaaaagaatttttttttctcttcaagttgctttgtcttttccatcctcatcacaagcccttgtttgagtgtcttatccctgagcaatctttcgatggatggagatgatcattaggtacttttgtttcaacctttattcctgtaaatatttctgtgaaaactaggagaacagagatgagatttgacaaaaaaaaattgaattaaaaataacacagtctttttaaaactaacataggaaagcctttcctattatttctcttcttagcttctccattgtctaaatcaggaaaacaggaaaacacagctttctagcagctgcaaaatggtttaatgccccctacatatttccatcaccttgaacaatagctttagcttgggaatctgagatatgatcccagaaaacatctgtctctacttcggctgcaaaacccatggtttaaatctatatggtttgtgcattttctcaactaaaaatagagatgataatccgaattctccatatattcactaatcaaagacactattttcatactagattcctgagacaaatactcactgaagggcttgtttaaaaataaattgtgttttggtctgttcttgtagataatgcccttctattttaggtagaagctctggaatccctttattgtgctgttgctcttatctgcaaggtggcaagcagttcttttcagcagattttgcccactattcctctgagctgaagttctttgcatagatttggcttaagcttgaattagatccctgcaaaggcttgctctgtgatgtcagatgtaattgtaaatgtcagtaatcacttcatgaatgctaaatgagaatgtaagtatttttaaatgtgtgtatttcaaatttgtttgactaattctggaattacaagatttctatgcaggatttaccttcatcctgtgcatgtttcccaaactgtgaggagggaaggctcagagatcgagcttctcctctgagttctaacaaaatggtgctttgagggtcagcctttaggaaggtgcagctttgttgtcctttgagctttctgttatgtgcctatcctaataaactcttaaacacattgattgtgaa

SEQ ID NO: 172357 - DNA, 1673 bp, Artificial Sequence
  derived and/or modified sequence
gtgtccttctctgcgccggagtggctgcagctcacccctcagctccccttggggcccagctgggagccgagatagaagctcctgtcgccgctgggcttctcgcctcccgcagagggccacacagagaccgggatggccacctccatgggcctgctgctgctgctgctgctgctcctgacccagcccggggcggggacgggagctgacacggaggcggtggtctgcgtggggaccgcctgctacacggcccactcgggcaagctgagcgctgccgaggcccagaaccactgcaaccagaacgggggcaacctggccactgtgaagagcaaggaggaggcccagcacgtccagcgagtactggcccagctcctgaggcgggaggcagccctgacggcgaggatgagcaagttctggattgggctccagcgagagaagggcaagtgcctggaccctagtctgccgctgaagggcttcagctgggtgggcgggggggaggacacgccttactctaactggcacaaggagctccggaactcgtgcatctccaagcgctgtgtgtctctgctgctggacctgtcccagccgctccttcccagccgcctccccaagtggtctgagggcccctgtgggagcccaggctcccccggaagtaacattgagggcttcgtgtgcaagttcagcttcaaaggcatgtgccggcctctggccctggggggcccaggtcaggtgacctacaccacccccttccagaccaccagttcctccttggaggctgtgccctttgcctctgcggccaatgtagcctgtggggaaggtgacaaggacgagactcagagtcattatttcctgtgcaaggagaaggcccccgatgtgttcgactggggcagctcgggccccctctgtgtcagccccaagtatggctgcaacttcaacaatgggggctgccaccaggactgctttgaagggggggatggctccttcctctgcggctgccgaccaggattccggctgctggatgacctggtgacctgtgcctctcgaaacccttgcagctccagcccatgtcgtgggggggctactggtctatcgcaagcggagagcgaagagggaggagaagaaggagaagaagccccagaatgcggcagacagttactcctgggttccagagcgagctgagagcagggccatggagaaccagtacagtccgacacctgggacagactgctgaaagtgaggtggccctagagacactagagtcaccagccaccatcctcagagctttgaactccccattccaaaggggcacccacatttttttgaaagactggactggaatcttagcaaacaattgtaagtctcctccttaaaggccccttggaacatgcaggtattttctacgggtgtttgatgttcctgaagtggaagctgtgtgttggcgtgccacggtggggatttcgtgactctataatgattgttactccccctcccttttcaaattccaatgtgaccaattccggatcagggtgtgaggaggccggggctaaggggctcccctgaatatcttctctgctcacttccaccatctaagaggaaaaggtgagttgctcatgctgattaggattgaaatgatttgtttctcttcctaggatgaaaactaaatcaattaattattc

SEQ ID NO: 172358 - protein, 541 aa, Artificial Sequence
  derived and/or modified sequence
MASMGTLAFDEYGRPFLIIKDQDRKSRLMGLEALKSHIMAAKAVANTMRTSLGPNGLDKMMVDKDGDVTVTNDGATILSMMDVDHQIAKLMVELSKSQDDEIGDGTTGVVVLAGALLEEAEQLLDRGIHPIRIADGYEQAARVAIEHLDKISDSVLVDIKDTEPLIQTAKTTLGSKVVNSCHRQMAEIAVNAVLTVADMERRDVDFELIKVEGKVGGRLEDTKLIKGVIVDKDFSHPQMPKKVEDAKIAILTCPFEPPKPKTKHKLDVTSVEDYKALQKYEKEKFEEMIQQIKETGANLAICQWGFDDEANHLLLQNNLPAVRWVGGPEIELIAIATGGRIVPRFSELTAEKLGFAGLVQEISFGTTKDKMLVIEQCKNSRAVTIFIRGGNKMIIEEAKRSLHDALCVIRNLIRDNRVVYGGGAAEISCALAVSQEADKCPTLEQYAMRAFADALEVIPMALSENSGMNPIQTMTEVRARQVKEMNPALGIDCLHKGTNDMKQQHVIETLIGKKQQISLATQMVRMILKIDDIRKPGESEE

SEQ ID NO: 172359 - protein, 514 aa, Artificial Sequence
  derived and/or modified sequence
MASMGTLAFDEYGRPFLIIKDQDRKSRLMGLEALKSHIMAAKAVANTMRTSLGPNGLDKMMVDKDGDVTVTNDEIGDGTTGVVVLAGALLEEAEQLLDRGIHPIRIADGYEQAARVAIEHLDKISDSVLVDIKDTEPLIQTAKTTLGSKVVNSCHRQMAEIAVNAVLTVADMERRDVDFELIKVEGKVGGRLEDTKLIKGVIVDKDFSHPQMPKKVEDAKIAILTCPFEPPKPKTKHKLDVTSVEDYKALQKYEKEKFEEMIQQIKETGANLAICQWGFDDEANHLLLQNNLPAVRWVGGPEIELIAIATGGRIVPRFSELTAEKLGFAGLVQEISFGTTKDKMLVIEQCKNSRAVTIFIRGGNKMIIEEAKRSLHDALCVIRNLIRDNRVVYGGGAAEISCALAVSQEADKCPTLEQYAMRAFADALEVIPMALSENSGMNPIQTMTEVRARQVKEMNPALGIDCLHKGTNDMKQQHVIETLIGKKQQISLATQMVRMILKIDDIRKPGESEE

SEQ ID NO: 172360 - DNA, 1626 bp, Artificial Sequence
  derived and/or modified sequence
atggcatcaatgggaactttagcctttgacgagtacggaagaccttttctcattatcaaggaccaagatcgtaagtctcgtctgatgggattggaggctctcaagtctcacattatggctgcgaaagcagtagctaacactatgcgcacatccctggggcccaacggtctggacaagatgatggttgacaaggacggagacgtcaccgtgaccaacgacggagcaacgattctaagcatgatggatgtcgatcatcagatagcaaaacttatggtcgagctatccaaaagtcaggacgatgaaataggcgacggaacaacaggcgtagtcgtgctggcgggggccctgctggaagaggccgaacagctcctcgatcgaggaatccaccctatacgcatcgccgacgggtacgaacaggctgcacgcgttgcgatcgagcatctggataagattagcgattccgtgcttgtagacattaaggatactgaacctctgatccaaaccgctaagactacacttggctccaaagtggtaaatagctgccataggcagatggccgaaattgccgtcaacgccgtactcactgtcgcagacatggaaagaagggacgtggatttcgagctgatcaaggtggaggggaaagtcggtggacggctggaggacacaaagctgatcaaaggggtgattgttgataaagatttttcgcatcctcagatgccgaagaaagtagaggacgccaagatcgcaatccttacttgtcccttcgagcctccaaaacctaaaaccaaacacaagctggacgtgacttccgtcgaggattataaggccctgcaaaaatatgaaaaggaaaagttcgaggagatgattcagcagattaaggagaccggcgctaacctggccatctgtcagtggggatttgacgatgaagccaatcaccttttgctgcaaaataacttgcccgctgtgcgctgggttggtggcccagagattgagctgatagcaattgcaaccggggggaggatagtgcccagattctccgaactgaccgctgagaagcttgggtttgccggtctggtgcaagagattagcttcggcacaaccaaagacaaaatgttagtgatcgaacaatgtaaaaactcacgtgctgtcactatcttcatcagagggggcaacaagatgatcattgaagaggccaaacggtccctgcacgatgccttgtgtgtgataaggaacctaatccgggataatagagttgtgtatggaggtggagctgctgagatcagctgcgccctggccgtttcacaggaagctgacaagtgtcctaccctcgagcagtatgccatgcgcgctttcgccgacgccctagaagtgattccgatggcattatcagagaactctggcatgaacccaatccaaacgatgaccgaggttagagctcgacaagtcaaagagatgaaccccgctctgggtatcgactgcctccacaagggcaccaatgatatgaaacagcaacacgtgatagaaactcttatcgggaaaaagcagcagattagcctcgccactcaaatggtgcgaatgattctgaaaatagatgatatcagaaagcccggcgagagcgaagagtag

SEQ ID NO: 172361 - DNA, 1545 bp, Artificial Sequence
  derived and/or modified sequence
atggcaagtatgggcaccctcgctttcgacgagtacgggaggcctttccttattattaaagaccaggaccgcaaaagccgactgatggggctcgaggccttgaaaagccatattatggctgccaaggccgttgcaaacaccatgcggacatctctcgggccaaacggtctggacaagatgatggttgacaaggacggggacgtcacagtgactaacgatgagataggagatggcaccactggcgttgtggtcttggccggtgccctgttagaggaagccgaacaattgctagaccgtgggatacatcctattaggattgctgatggatatgaacaggccgcacgggtcgcgattgagcatcttgataaaatctctgatagtgtcctggtggacataaaggacaccgagcctctgattcagaccgctaaaactactttgggctccaaagtcgttaatagttgtcaccgacagatggccgagattgccgttaacgcagtgctcaccgtggctgatatggagcgcagggatgtcgatttcgagttaatcaaagtggaaggtaaagtgggtggccgcctagaagacaccaagctgatcaagggggtaatcgtggataaagacttttcccatccacagatgccaaagaaagtggaagatgctaagattgccatcctcacttgccctttcgagccacccaagccaaaaactaaacataagctggacgtaacatcagtcgaggactacaaggcgctgcagaaatacgagaaagagaaatttgaagaaatgatccagcagatcaaggagaccggagctaatctggcaatctgccagtggggcttcgatgacgaggccaaccaccttctgcttcagaataatcttcccgccgtgaggtgggttggaggcccagagatcgagctgattgcaatcgcgaccggggggaggattgtgcctagatttagcgagttgaccgctgagaagctgggttttgccggtctcgtccaggaaatatcgtttggcactaccaaagacaagatgctagtgatagagcaatgcaaaaatagcagagctgtgactatcttcattcgcggcggaaataagatgattatcgaagaggccaagagaagcctgcatgacgcattgtgtgtgatccggaatcttatccgcgacaaccgagtcgtctatggcggtggagctgccgagataagctgcgctctggctgtttcccaggaggccgacaagtgcccaacccttgagcaatatgcaatgagagccttcgccgacgctcttgaagtgattcccatggcgctctctgagaattccggcatgaatcctatccaaactatgaccgaagtccgagcccgccaggttaaggagatgaatccagccctcgggatcgattgtctgcacaaaggcacaaatgacatgaagcagcagcacgtcatcgaaaccctcattggaaagaaacagcagatatctcttgcaacccaaatggtcaggatgattttaaagatcgacgatattagaaaacctggggagtccgaagaatag

SEQ ID NO: 172362 - DNA, 1512 bp, Artificial Sequence
  derived and/or modified sequence
atggcagccaaagctgtggcaaacacaatgcgaacatcacttggacctaacgggcttgacaagatgatggttgacaaagacggcgatgtgacagtgaccaatgatggagctacaatcctgagcatgatggatgtggatcaccagattgcaaaactcatggttgagctgtccaagtcccaggacgacgaaataggtgacggaacaacaggggtggtcgtcctcgcaggcgcgctgttggaggaggccgaacagctccttgatcggggcattcatcccatccgcatcgccgatggatatgaacaggcggctcgcgtcgccatagagcacttggataagatctctgacagcgttctggtcgacattaaggatacggagccgctcattcagaccgccaaaaccaccctgggcagcaaagtggtcaatagctgccaccggcaaatggcggagattgcagtgaacgcagtcctgacagtagcagacatggagaggagagacgtggattttgaactcattaaggtggagggaaaagtggggggcaggctggaggatactaaactgattaagggagtcattgttgataaggacttctcccacccacagatgcctaagaaggtggaagacgcgaagattgctattctcacatgtcccttcgagcctcccaagcctaagacaaaacacaagctcgacgtgacgtctgtggaggactacaaggccctacagaagtacgagaaggagaagttcgaagaaatgattcagcaaatcaaggagaccggcgcaaatctcgcaatatgtcaatggggcttcgacgatgaagcaaaccacctcttactccagaataacttgccagccgtgcgatgggtgggggggcctgagatcgagctcatcgccattgccacgggcgggaggattgtgccgcgattctctgagctgactgctgagaagctgggatttgcaggtctggtccaagagatttccttcggcacaactaaagataagatgctcgtgatcgaacaatgcaaaaattctcgcgctgtgacaatcttcatacgcggaggaaataaaatgattatcgaggaggcgaaacgcagtctgcacgatgcactgtgtgtcattaggaatctaatcagagacaacagagtggtatacggagggggcgccgcggaaatctcctgtgcactggctgtgtctcaggaagccgataagtgccccactctcgagcaatacgcgatgagggcttttgccgatgccctggaagtgatcccaatggcgctgagtgagaacagcggtatgaatcctattcagaccatgacggaagtgcgagcacgtcaggttaaagaaatgaatcccgccctgggcattgattgtctgcacaaagggacaaacgacatgaaacagcaacatgtgatagaaacactgatcggtaaaaaacagcaaatctccctcgccacccagatggtgcggatgatcctaaagatcgatgacatcagaaaaccgggcgaaagcgaagaatag

SEQ ID NO: 172363 - DNA, 1626 bp, Artificial Sequence
  derived and/or modified sequence
atggcctccatgggcaccctggcctttgatgaatatggccggcccttcctgatcatcaaggaccaggacaggaagagccggctgatgggcctggaggccctgaagagccacatcatggccgccaaggctgtggccaacaccatgaggaccagcctgggccccaacggcctggacaagatgatggtggacaaggatggagatgtgacagtgaccaatgatggagccaccatcctgtccatgatggatgtggaccaccagatcgccaagctgatggtggagctgagcaagagccaggatgatgaaattggagatggcaccactggagtggtggtgctggccggggccctgctggaggaggccgagcagctgctggaccggggcatccaccccatcagaattgctgatggctatgagcaggccgcccgggtggccatcgagcacctggacaagatcagtgacagcgtgctggtggacatcaaggacacagagcccctcatccagacagccaagaccaccctgggcagcaaggtggtgaacagctgccaccggcagatggccgagattgctgtgaatgctgtgctgactgtggccgacatggagaggagagatgtggactttgagctgatcaaggtggagggcaaggtgggcggccgcctggaggacaccaagctgatcaagggcgtgattgtggacaaggacttcagccacccccagatgcccaagaaggtggaggatgccaagatcgccatcctgacctgcccctttgagccccccaagcccaagaccaagcacaagctggatgtgacctctgtggaggactacaaggccctgcagaagtatgagaaggagaagtttgaggagatgatccagcagatcaaggagactggagccaacctggccatctgccagtggggctttgatgatgaggccaaccacctgctgctgcagaacaacctgcctgctgtgcgctgggtgggcggccctgagattgagctgattgccatcgccactggaggaagaattgtgccccgcttcagcgagctgacagctgagaagctgggctttgctggcctggtgcaggagatcagctttggcaccaccaaggacaagatgctggtgattgagcagtgcaagaacagcagagctgtgaccatcttcatccggggcggcaacaagatgatcatcgaggaggccaagaggagcctgcatgatgccctgtgtgtgatccggaacctgatccgggacaacagagtggtgtatggaggaggagctgctgagatcagctgtgccctggccgtgtcccaggaggccgacaagtgccccaccctggagcagtatgccatgagggcctttgctgatgccctggaggtgatccccatggccctgtctgagaacagcggcatgaaccccatccagaccatgacagaggtgcgggcccggcaggtgaaggagatgaacccagccctgggcatcgactgcctgcacaagggcaccaatgacatgaagcagcagcacgtgattgagaccctgattggcaagaagcagcagatcagcctggccacccagatggtgaggatgatcctgaagattgatgacatcaggaagccaggagagagcgaggagtag

SEQ ID NO: 172364 - DNA, 1545 bp, Artificial Sequence
  derived and/or modified sequence
atggcctccatgggcaccctggcctttgatgaatatggccggcccttcctgatcatcaaggaccaggacaggaagagccggctgatgggcctggaggccctgaagagccacatcatggccgccaaggctgtggccaacaccatgaggaccagcctgggccccaacggcctggacaagatgatggtggacaaggatggagatgtgacagtgaccaatgatgaaattggagatggcaccaccggggtggtggtgctggccggggccctgctggaggaggccgagcagctgctggaccggggcatccaccccatcagaattgctgatggctatgagcaggccgcccgggtggccatcgagcacctggacaagatcagtgacagcgtgctggtggacatcaaggacacagagcccctcatccagacagccaagaccaccctgggcagcaaggtggtgaacagctgccaccggcagatggccgagattgctgtgaatgctgtgctgactgtggccgacatggagaggagagatgtggactttgagctgatcaaggtggagggcaaggtgggcggccgcctggaggacaccaagctgatcaagggcgtcatcgtggacaaggacttcagccacccccagatgcccaagaaggtggaggatgccaagatcgccatcctgacctgcccctttgagccccccaagcccaagaccaagcacaagctggatgtgacctctgtggaggactacaaggccctgcagaagtatgagaaggagaagtttgaggagatgatccagcagatcaaggagaccggggccaacctggccatctgccagtggggctttgatgatgaggccaaccacctgctgctgcagaacaacctgcctgctgtgcgctgggtgggcggccctgagattgagctgattgccatcgccaccggcggccgcatcgtgccccgcttcagcgagctgacagctgagaagctgggctttgctggcctggtgcaggagatcagctttggcaccaccaaggacaagatgctggtgattgagcagtgcaagaacagcagagctgtgaccatcttcatccggggcggcaacaagatgatcatcgaggaggccaagaggagcctgcatgatgccctgtgtgtgatccggaacctgatccgggacaacagagtggtgtatggaggaggagctgctgagatcagctgtgccctggccgtgtcccaggaggccgacaagtgccccaccctggagcagtatgccatgagggcctttgctgatgccctggaggtgatccccatggccctgtctgaaaattctggcatgaaccccatccagaccatgacagaggtgcgggcccggcaggtgaaggagatgaacccagccctgggcatcgactgcctgcacaagggcaccaatgacatgaagcagcagcacgtgattgagaccctcatcggcaagaagcagcagatcagcctggccacccagatggtgaggatgatcctgaagattgatgacatcaggaagccaggagagagcgaggagtag

SEQ ID NO: 172365 - DNA, 1512 bp, Artificial Sequence
  derived and/or modified sequence
atggccgccaaggctgtggccaacaccatgaggaccagcctgggccccaacggcctggacaagatgatggtggacaaggatggagatgtgacagtgaccaatgatggagccaccatcctgtccatgatggatgtggaccaccagatcgccaagctgatggtggagctgagcaagagccaggatgatgaaattggagatggcaccactggagtggtggtgctggccggggccctgctggaggaggccgagcagctgctggaccggggcatccaccccatcagaattgctgatggctatgagcaggccgcccgggtggccatcgagcacctggacaagatcagtgacagcgtgctggtggacatcaaggacacagagcccctcatccagacagccaagaccaccctgggcagcaaggtggtgaacagctgccaccggcagatggccgagattgctgtgaatgctgtgctgactgtggccgacatggagaggagagatgtggactttgagctgatcaaggtggagggcaaggtgggcggccgcctggaggacaccaagctgatcaagggcgtgattgtggacaaggacttcagccacccccagatgcccaagaaggtggaggatgccaagatcgccatcctgacctgcccctttgagccccccaagcccaagaccaagcacaagctggatgtgacctctgtggaggactacaaggccctgcagaagtatgagaaggagaagtttgaggagatgatccagcagatcaaggagactggagccaacctggccatctgccagtggggctttgatgatgaggccaaccacctgctgctgcagaacaacctgcctgctgtgcgctgggtgggcggccctgagattgagctgattgccatcgccactggaggaagaattgtgccccgcttcagcgagctgacagctgagaagctgggctttgctggcctggtgcaggagatcagctttggcaccaccaaggacaagatgctggtgattgagcagtgcaagaacagcagagctgtgaccatcttcatccggggcggcaacaagatgatcatcgaggaggccaagaggagcctgcatgatgccctgtgtgtgatccggaacctgatccgggacaacagagtggtgtatggaggaggagctgctgagatcagctgtgccctggccgtgtcccaggaggccgacaagtgccccaccctggagcagtatgccatgagggcctttgctgatgccctggaggtgatccccatggccctgtctgagaacagcggcatgaaccccatccagaccatgacagaggtgcgggcccggcaggtgaaggagatgaacccagccctgggcatcgactgcctgcacaagggcaccaatgacatgaagcagcagcacgtgattgagaccctgattggcaagaagcagcagatcagcctggccacccagatggtgaggatgatcctgaagattgatgacatcaggaagccaggagagagcgaggagtag

SEQ ID NO: 172366 - DNA, 1626 bp, Artificial Sequence
  derived and/or modified sequence
atggccagcatgggcaccctggccttcgacgagtacggccggccctttctcattattaaggatcaggacagaaagtccaggctaatgggactagaggcccttaagtctcacatcatggccgcgaaagctgtggctaacacaatgcgaactagcctcggaccaaatggtcttgacaaaatgatggtcgacaaggatggagacgtcactgtgactaatgatggggcgaccatattgagcatgatggacgttgatcaccagatcgctaaacttatggtcgaactgtccaaaagccaggacgacgaaatcggggacgggaccacaggagtagtggttttggctggcgctctgctggaagaggcagaacagttactcgaccgggggattcatccgatacgcatcgcggacgggtacgaacaggccgctagggtcgccattgagcacctcgacaaaatcagcgattctgttctggtggatattaaggacaccgagcctctcatccagaccgcaaaaactacactgggctccaaggttgtgaactcttgccaccgtcagatggcagagattgccgttaacgctgtgttaaccgtggctgacatggaaaggcgagacgttgattttgaactgatcaaggttgaagggaaggtgggcggtagactggaggacaccaagctcattaagggagtgatcgtggataaagatttcagtcatccccagatgccaaagaaagtagaggacgcaaagatcgccattctaacttgccccttcgaaccccctaagccgaagacaaaacataagttagatgtcacgtccgtcgaagactacaaagctttgcagaaatatgagaaggaaaagttcgaagaaatgatccagcaaataaaggaaactggcgctaatttggcaatttgccagtggggttttgatgacgaagcaaaccatctgctcctacaaaacaatctaccagccgtcagatgggtaggcggtccagagatcgaacttattgccatcgccacaggagggaggatcgtgcccagatttagcgagctgaccgccgaaaaattgggctttgccggcctggtgcaagaaatcagctttggaaccacaaaggacaaaatgctcgttattgagcagtgtaagaactcacgcgcagtcaccatctttattcgaggaggcaacaagatgattattgaagaggccaaacggtcgctccatgacgctttatgcgtgataagaaatctcatacgtgataatcgcgtggtttatggcggaggagcagcagaaattagctgcgccctggcggtcagccaggaggcggacaaatgtcccactttagagcagtatgcgatgcgtgctttcgctgatgccctcgaggtgatccctatggccctcagcgagaatagtgggatgaatcccattcagactatgaccgaggtgcgggcccgtcaggtgaaggagatgaacccagctctgggcattgattgtctccacaagggaaccaacgatatgaagcagcagcatgtcattgagactttaatcggtaagaagcaacagatctcccttgccacacagatggtccggatgatcttgaagatagatgacatccggaagccaggtgagagcgaagagtag

SEQ ID NO: 172367 - DNA, 1545 bp, Artificial Sequence
  derived and/or modified sequence
atggccagcatgggcaccctggccttcgacgagtacggccggccctttcttataattaaggaccaggaccgtaaatctcgcctgatggggctcgaggctttaaaaagccacattatggcggcaaaagctgtagctaacactatgagaacctccctgggaccaaatggcctggataagatgatggtagataaagacggcgacgtaaccgttaccaatgacgagatcggtgacggaacgactggtgtggtggtgttagcaggggccctacttgaagaggccgaacagttgctggatcgcggtatccacccaattcgaatcgcagatggctatgagcaggcagcaagagtggctatagaacacttagataagattagtgatagtgtcctcgtggatatcaaggatactgagccgctgatacagacagccaaaacaacgctcggctccaaagtagtcaattcatgccacagacagatggccgaaatcgccgtcaatgcagttttgacagtcgcagatatggaaagacgagacgtcgacttcgaactgattaaggtagagggtaaggtcggaggccgcctggaggatactaagttaataaagggggttatcgttgataaagatttctctcaccctcaaatgcctaaaaaggttgaggacgctaaaattgcgatattgacttgccccttcgaaccccccaaaccgaagaccaaacacaagctggatgttacaagcgtggaggactacaaagccctgcagaagtacgaaaaagagaaattcgaggagatgattcagcagattaaggagacaggggcaaacttagccatttgtcagtggggcttcgacgacgaggcaaaccatctgctcttacagaacaatcttccagccgtgcgttgggttggtggacccgagattgagctgatcgccatcgccaccggtggcaggattgtgcctagatttagcgagctcaccgccgagaaactggggttcgccgggctcgttcaggaaattagctttggtactacaaaagacaagatgctggttatagaacagtgcaagaattcccgcgccgtcaccatttttatccgggggggaaacaagatgattatcgaggaggcaaagagatcccttcatgatgccctctgcgtaatacgtaacttgatacgagataatagagtggtttatggggggggggccgcagaaatcagttgtgcgctcgctgtgagccaggaagctgacaaatgcccaacccttgaacagtatgccatgagagctttcgctgatgcactcgaggtaatcccaatggctctgtcagagaattccggcatgaatcccatacagacaatgacggaggttagagctcggcaagtgaaagagatgaatccggccctgggaatagattgcctgcataaaggcaccaacgatatgaaacagcagcacgtcatagagactctgattggcaagaagcagcagatctctctggctacacagatggtgcgcatgatacttaagatcgatgacatccggaagcctggagagtctgaggaatag

SEQ ID NO: 172368 - DNA, 1512 bp, Artificial Sequence
  derived and/or modified sequence
atggccgccaaggccgtggccaacaccatgcggaccagcctgggcccgaatggtttggataaaatgatggtagataaggacggcgatgtcaccgtgactaatgacggcgcgacgatactgagcatgatggacgttgatcaccagatagccaagcttatggtggaacttagtaaaagtcaggatgacgagattggagacggcaccactggcgttgtggtattggctggtgcactgttggaagaagccgaacagctcctagatcgggggatccatccgatcaggatcgcggacggatacgagcaggccgcgcgagtcgccattgaacaccttgataaaatatccgactccgtactcgtggatataaaggataccgaacccctgattcagaccgccaaaaccaccctaggcagcaaggtcgtcaattcctgccaccgtcagatggcagagatcgccgtgaacgccgtgctcacagtggctgatatggagaggcgggacgtcgattttgaactcattaaagtcgagggtaaggtgggtggcagactagaggacactaaactcataaaaggagtaatcgtagataaagattttagccacccccagatgcccaaaaaagtcgaggatgccaaaattgccatactcacttgtccattcgagccccctaagcccaagacaaagcataaactggacgtgactagcgtggaagattataaagcattgcagaaatacgagaaagaaaagttcgaagaaatgattcaacagatcaaggagacaggggctaatctggccatctgccagtggggtttcgacgatgaggccaaccatctgctcctccaaaacaacctgcccgccgttagatgggtcggaggcccagaaatcgaattaatcgcaatagctaccggaggaaggattgtgccccggtttagtgagctgacagccgagaaactaggattcgcaggcctcgtgcaagagatcagcttcgggaccacaaaggataagatgttggtgatagaacagtgcaaaaatagtcgcgcagtaacaattttcatacgcggaggaaacaaaatgatcattgaagaagccaaaaggtctcttcacgatgctctgtgcgtgattcgcaatctgatccgcgataacagggtcgtatacggcggaggtgctgcagaaatcagctgtgctttagctgtgtcacaggaggcagataaatgccctacactcgaacagtacgccatgagggcctttgctgatgccttggaggtaatccccatggccctctctgagaactctggcatgaatccaatccagacgatgaccgaggttcgtgccaggcaagttaaggagatgaatcctgcactggggatcgactgcttacacaaagggacaaatgacatgaagcagcagcacgtaatagaaaccttaataggaaaaaaacagcagatctcgctcgcgacgcagatggtccgaatgatattgaaaatagatgatatcagaaagccaggggagagcgaagaatag

SEQ ID NO: 172369 - DNA, 1626 bp, Artificial Sequence
  derived and/or modified sequence
atggccagcatggggaccctcgcatttgatgagtacgggaggccatttctcatcatcaaagatcaggacagaaagtctcggctgatgggactcgaagccctgaaatcacacataatggccgcaaaagctgtggcaaatacgatgaggacatctcttgggcctaatggattagacaagatgatggtcgataaagatggtgatgtgacggtcacaaatgacggcgcaaccatcctcagcatgatggacgtcgaccaccagatcgccaaactgatggttgaattgtcaaaatctcaagatgacgagatcggggacgggacgacaggcgtagtagtgttggctggcgctctgctcgaagaagccgagcaattgttagatcgcggaatacacccaatcaggattgccgatggctacgaacaggccgctagggttgctatagagcacctggacaaaataagcgactcagtgttagtagatatcaaggacacagagcctctgattcaaactgcaaagactaccctgggctcgaaagtagtgaattcttgccacaggcagatggctgagattgccgtgaacgccgtgcttacagtagctgatatggagagaagagatgtggacttcgagctgattaaagtggaaggcaaggtaggaggacgattagaagatacaaagcttattaagggagtcatagttgacaaggatttcagccatccccagatgcccaagaaggtggaagatgcgaaaattgctatcctaacttgtcctttcgagccacccaagccgaagacaaagcataagctggatgtgaccagcgtggaggactataaggcactgcagaaatatgagaaggagaagtttgaagagatgatccaacaaataaaggagacaggtgctaaccttgctatttgtcagtggggatttgatgatgaggctaaccacctactactccagaacaatcttcccgctgtgcgatgggtgggcggaccagagatagagctgatcgccatagcaaccggagggagaatagtgcccaggttttccgagcttactgctgagaagctcggattcgctgggctggtgcaagagattagcttcggaactactaaggacaagatgctagtgatagaacagtgcaaaaactcaagagcagtaactattttcatcagaggagggaataagatgatcatagaggaggctaagagaagccttcatgatgcgctgtgtgttattcggaacctgatacgggacaatagagttgtctacggcggtggtgcagccgaaataagctgcgcactggcagtgagtcaagaggccgataagtgtcctacactcgagcagtacgcaatgagagctttcgccgatgccctggaggtcatcccaatggcactgtcagaaaatagcggcatgaacccgatccagactatgacggaagtgcgagccaggcaggtgaaggaaatgaacccagccctcggcatcgactgcctccataaagggactaacgacatgaaacaacagcacgtcatagagacacttatcggtaaaaagcagcagattagcctggccacacagatggtgcggatgattcttaaaatcgatgatatacgcaaacctggtgagagtgaagaatag

SEQ ID NO: 172370 - DNA, 1545 bp, Artificial Sequence
  derived and/or modified sequence
atggcctctatggggaccttggcgtttgacgaatatgggaggcccttcctgatcatcaaagaccaagaccggaagtctcggctgatgggtctggaggccctgaaatcccacataatggcagcaaaggccgtcgccaacaccatgaggaccagtctcggccctaacggactggacaagatgatggtcgataaggacggtgatgtcacagtcacaaacgatgagataggggatggcacgactggcgtcgtggttctcgctggggcactactggaagaagccgagcagctgctcgataggggtatccacccgatccgcatagccgacggctacgagcaagccgctcgtgtcgcaatcgagcatcttgataagatcagcgactctgttctcgtagatattaaagataccgaaccactcatccagaccgccaagacaactctgggttccaaggtcgttaattcttgtcacaggcagatggccgaaatcgccgtcaatgccgtcctcaccgtggctgacatggaaagaagggacgtcgacttcgaattaatcaaggtagaaggaaaagtggggggaagactagaggatacaaaactgatcaagggtgtgatcgtggataaagatttctctcatcctcagatgcccaagaaggtggaggacgccaaaattgccatccttacttgcccatttgagcccccaaagcctaaaactaaacataagttagacgtcacctcggtggaagactataaggcactgcagaagtacgagaaggagaagttcgaagagatgatccaacagataaaggaaaccggcgcaaacctggctatttgtcagtggggattcgacgacgaggccaaccacctgctgttgcagaacaatttaccagccgtgcgatgggtcggcggaccagagattgagctgatcgctatcgccacaggcggtaggatcgtacccaggtttagcgaactcactgctgagaagctgggctttgcaggtttggtgcaggaaattagctttgggaccactaaagacaagatgttggtcattgagcagtgcaagaacagcagagcggttactatattcattcggggaggcaacaaaatgatcatcgaagaagctaaaaggagcctccacgatgctttgtgtgtgatccgcaacctgatcagagataacagggtggtgtacgggggtggagccgctgagatatcatgcgctctggccgtgagccaagaggccgataagtgtcctaccctggaacagtatgcaatgcgcgcattcgctgatgcccttgaggtcattccaatggcgttatctgagaattctggcatgaacccgatacagactatgacagaggttagagcacgccaagtgaaggagatgaatcctgcgcttggaatcgactgcctccataagggaactaacgatatgaaacaacagcatgtgatcgaaacgctaattggaaaaaaacagcagatttcgctggcaactcaaatggtgcgaatgatcttgaaaatagatgatatacgcaagcctggcgaatcagaggaatag

SEQ ID NO: 172371 - DNA, 1512 bp, Artificial Sequence
  derived and/or modified sequence
atggctgccaaagccgttgctaatactatgcggactagcctgggcccaaatgggctggacaagatgatggttgataaagacggggatgtgacagtgaccaacgatggtgccactattctctccatgatggacgtggatcaccagatcgccaagctgatggtcgaactgtctaaatctcaggatgatgagataggcgatgggaccacaggcgttgtggtgctggccggtgctctactggaggaggctgaacagctcctcgacaggggaattcaccccattcgtatcgccgatggctacgagcaggctgcccgtgtggcaatcgaacacttggacaaaataagcgattccgtgttggttgacatcaaggataccgaaccattaatccaaacggcaaaaaccaccctgggatctaaggtggttaactcgtgccatcgccaaatggcagagatcgccgtgaacgctgtactgactgtcgcagacatggaaagacgcgatgtcgactttgagctgattaaggttgaggggaaggtcggcggaaggctggaggacacaaagctgatcaaaggcgtgattgtggataaagatttttcacatccccagatgccaaaaaaagtcgaagatgcaaaaatagccattctgacttgcccctttgagccaccgaaaccgaaaacaaagcataagctcgacgtgacaagcgtggaagactacaaggcacttcagaaatatgaaaaggagaaatttgaagagatgatccaacagattaaagagactggcgctaacctggctatttgtcagtgggggttcgacgatgaggccaatcacctgctcttacagaacaatctcccagcagtaagatgggtcggaggacccgaaattgagttgattgccatagcaactggtggcagaatagtgccccgtttctccgagctgacagcagaaaaacttgggtttgcagggttggtgcaagaaatatcttttggcacaaccaaagacaaaatgctggtaattgaacaatgcaaaaacagtcgagcggtgactatctttattcgaggcggaaacaaaatgatcatcgaagaagccaaacggagtctgcatgatgctctgtgcgttatacggaacctgattagagataatcgcgtcgtgtacggcggtggtgcggcagagatttcctgtgccctagctgtatcccaagaggctgacaagtgcccaacgctcgagcaatatgctatgagggcgttcgccgatgccctggaggtcatacctatggccctatcagagaactccggtatgaatcctattcagactatgacagaggtgcgagcacgtcaagtcaaagagatgaaccctgctttgggtatcgattgccttcacaagggcacgaatgacatgaaacaacagcacgtaatcgagacactgatcggaaaaaaacaacagatatccctcgctacgcagatggtccgcatgattctcaagattgacgatattcgtaaaccgggtgaatctgaggagtag

SEQ ID NO: 172372 - DNA, 3675 bp, Artificial Sequence
  derived and/or modified sequence
aaaaaaaaaaaaaaccggaaatgggtcctaccatcttctcggagccggagtgcgaagaaataaagaaatagtgctttaagtcaatgaattcctccttgggacccactatcgagaaactatcagtggtaacgttttaaaaaatgacaaattcaatctgctcttgacttgtgtgtcctaagatttccactaagtgtcttcaaacctccccctccccggcttcctggataatagaagttcccgaaggccgccgattccagaagatactgtctggcgtgaaattagtctcagtagaaacataagtcccgcgcgtcttgtgctgcgcgtgcgcaagcttttgggccctcccgagaaagggaagtgcattctcgcttccgtagcggtctccgccggttggggggaagtaattccggttgttgcaccatggcgtccatggggaccctcgccttcgatgaatatgggcgccctttcctcatcatcaaggatcaggaccgcaagtcccgtcttatgggacttgaggccctcaagtctcatataatggcagcaaaggctgtagcaaatacaatgagaacatcacttggaccaaatgggcttgataagatgatggtggataaggatggagatgtgactgtaactaatgatggggccaccatcttaagcatgatggatgttgatcatcagattgccaagctgatggtggaactgtccaagtctcaggatgatgaaattggagatggaaccacaggagtggttgtcctggctggtgccttgttagaagaagcggagcaattgctagaccgaggcattcacccaatcagaatagccgatggctatgagcaggctgctcgtgttgctattgaacacctggacaagatcagcgatagcgtccttgttgacataaaggacaccgaacccctgattcagacagcaaaaaccacgctgggctccaaagtggtcaacagttgtcaccgacagatggctgagattgctgtgaatgccgtcctcactgtagcagatatggagcggagagacgttgactttgagcttatcaaagtagaaggcaaagtgggcggcaggctggaggacactaaactgattaagggcgtgattgtggacaaggatttcagtcacccacagatgccaaaaaaagtggaagatgcgaagattgcaattctcacatgtccatttgaaccacccaaaccaaaaacaaagcataagctggatgtgacctctgtcgaagattataaagcccttcagaaatacgaaaaggagaaatttgaagagatgattcaacaaattaaagagactggtgctaacctagcaatttgtcagtggggctttgatgatgaagcaaatcacttacttcttcagaacaacttgcctgcggttcgctgggtaggaggacctgaaattgagctgattgccatcgcaacaggagggcggatcgtccccaggttctcagagctcacagccgagaagctgggctttgctggtcttgtacaggagatctcatttgggacaactaaggataaaatgctggtcatcgagcagtgtaagaactccagagctgtaaccatttttattagaggaggaaataagatgatcattgaggaggcgaaacgatcccttcacgatgctttgtgtgtcatccggaacctcatccgcgataatcgtgtggtgtatggaggaggggctgctgagatatcctgtgccctggcagttagccaagaggcggataagtgccccaccttagaacagtatgccatgagagcgtttgccgacgcactggaggtcatccccatggccctctctgaaaacagtggcatgaatcccatccagactatgaccgaagtccgagccagacaggtgaaggagatgaaccctgctcttggcatcgactgtttgcacaaggggacaaatgatatgaagcaacagcatgtcatagaaaccttgattggcaaaaagcaacagatatctcttgcaacacaaatggttagaatgattttgaagattgatgacattcgtaagcctggagaatctgaagaatgaagacattgagaaaactatgtagcaagatccacttctgtgattaagtaaatggatgtctcgtgatgcatctacagttatttattgttacatccttttccagacactgtagatgctataataaaaatagctgtttggtaaccatagtttcacttgttcaaagctgtgtaatcgtgggggtaccatctcaactgcttttgtattcattgtattaaaagaatctgtttaaacaacctttatcttctcttcgggtttaagaaacgtttattgtaacagtaattaaatgctgccttaattgaaggggtttgggtggatttttttttctcaaaataagctgtagggactattttaacagcttaaacaggagctctcaagatgcactttcatattgagaggaatatgggcttgatcctcttcctatctaaatgggtgggccatttgattgtagagggtccaccacagaattatgggatgccttaagtgctgttactaggttgctcacagcctaacctggcgtgttgtttagggctgatggagacccatgtgagcctttgctttcctctggccccggccccaccctgaacacagctcatacacagaatcaggaccagcatgtgcagagctggccaccagcacaggcttagggcagttcagaacccacttgtttccctatcagagggacacagtgaagtggaggttaaagtaaattacaggaaataagggagaaatcttgcagttaccatgttcagatagagtgactgaaattaattgtacttactaaagtattaactagctaacagtgatgggccaagacgctccgagaactctaccgggattgtctgttctgacaacccagtgaggcagatacactttcttactgctcacatcttacaggtgagtactcataattggccagcatctcaccaccagcaagtagtagggccaggtcaatcccaggcagtctgaccccagagtggcccagctcatcccctactctgttatttgcttgttaatgattctctagattttctaaaataatgtttcttagcattgtgatgataaagctcatgatgaactttatcactagttatgccaccttaactagtcagatttcctagaattaggaaatggtgactcttgtctaaatttggttaagtgatgaatttgggttaccgtctcatgtgaacctggagattcaccagtcttaacttttgggtcattgtgttttctctacattcatgcattggatgttttgctaaataactcctgtggatttaggaatgtgtgctaatagcaatcttcctaattttcatgtttatatggaactatgcagttgagtattgaaagctttaaactgagtttatttacaaggactgagtctagcctacagagaacatacagcagccttctttggaccacagtcttatccgaggggtctgtggttgtatcagaagagccactaaaccaatccccctttccaaaattgaacctcacagacgttcctgttttttgtgattgagaaactggtcaatgaacaggaagacttagagatgtttcacaagcctttgatttttgtttcatttatttgtaataaacctcttccacgtgatgtcttttatttttcacgttcca

SEQ ID NO: 172373 - DNA, 1812 bp, Artificial Sequence
  derived and/or modified sequence
attctcgcttccgtagcggtctccgccggttggggggaagtaattccggttgttgcaccatggcgtccatggggaccctcgccttcgatgaatatgggcgccctttcctcatcatcaaggatcaggaccgcaagtcccgtcttatgggacttgaggccctcaagtctcatataatggcagcaaaggctgtagcaaatacaatgagaacatcacttggaccaaatgggcttgataagatgatggtggataaggatggagatgtgactgtaactaatgatgaaattggagatggaaccacaggagtggttgtcctggctggtgccttgttagaagaagcggagcaattgctagaccgaggcattcacccaatcagaatagccgatggctatgagcaggctgctcgtgttgctattgaacacctggacaagatcagcgatagcgtccttgttgacataaaggacaccgaacccctgattcagacagcaaaaaccacgctgggctccaaagtggtcaacagttgtcaccgacagatggctgagattgctgtgaatgccgtcctcactgtagcagatatggagcggagagacgttgactttgagcttatcaaagtagaaggcaaagtgggcggcaggctggaggacactaaactgattaagggcgtgattgtggacaaggatttcagtcacccacagatgccaaaaaaagtggaagatgcgaagattgcaattctcacatgtccatttgaaccacccaaaccaaaaacaaagcataagctggatgtgacctctgtcgaagattataaagcccttcagaaatacgaaaaggagaaatttgaagagatgattcaacaaattaaagagactggtgctaacctagcaatttgtcagtggggctttgatgatgaagcaaatcacttacttcttcagaacaacttgcctgcggttcgctgggtaggaggacctgaaattgagctgattgccatcgcaacaggagggcggatcgtccccaggttctcagagctcacagccgagaagctgggctttgctggtcttgtacaggagatctcatttgggacaactaaggataaaatgctggtcatcgagcagtgtaagaactccagagctgtaaccatttttattagaggaggaaataagatgatcattgaggaggcgaaacgatcccttcacgatgctttgtgtgtcatccggaacctcatccgcgataatcgtgtggtgtatggaggaggggctgctgagatatcctgtgccctggcagttagccaagaggcggataagtgccccaccttagaacagtatgccatgagagcgtttgccgacgcactggaggtcatccccatggccctctctgaaaacagtggcatgaatcccatccagactatgaccgaagtccgagccagacaggtgaaggagatgaaccctgctcttggcatcgactgtttgcacaaggggacaaatgatatgaagcaacagcatgtcatagaaaccttgattggcaaaaagcaacagatatctcttgcaacacaaatggttagaatgattttgaagattgatgacattcgtaagcctggagaatctgaagaatgaagacattgagaaaactatgtagcaagatccacttctgtgattaagtaaatggatgtctcgtgatgcatctacagttatttattgttacatccttttccagacactgtagatgctataataaaaatagctgtttggtaaccatagtttcacttgttcaaagctgtgtaatcgtgggggtaccatctcaactgcttttgtattcattgta

SEQ ID NO: 172374 - DNA, 1997 bp, Artificial Sequence
  derived and/or modified sequence
atgtgctccccggaaaggtcgagaatctccgtctccctgcggtctccggccgctcagcccgcttactgagctcgggagacgccggcgcctaatcctgggctcggaatgtgggggccagccaggctgggccgccagcgcccttcggagctgggtggggccgctcagtccggtcgcccgcgggagcaaagcgggaccgcctccccgcccggctcctccagcctgacggccgcgtgggactgcgctccagtgggagggcgccggggagatgctctgtcacctgtcggttaaggcgctgctgcttaacctttcgctggtccacccgcaacggcccttccgttttctttgtcactcgtaaagtctcatataatggcagcaaaggctgtagcaaatacaatgagaacatcacttggaccaaatgggcttgataagatgatggtggataaggatggagatgtgactgtaactaatgatggggccaccatcttaagcatgatggatgttgatcatcagattgccaagctgatggtggaactgtccaagtctcaggatgatgaaattggagatggaaccacaggagtggttgtcctggctggtgccttgttagaagaagcggagcaattgctagaccgaggcattcacccaatcagaatagccgatggctatgagcaggctgctcgtgttgctattgaacacctggacaagatcagcgatagcgtccttgttgacataaaggacaccgaacccctgattcagacagcaaaaaccacgctgggctccaaagtggtcaacagttgtcaccgacagatggctgagattgctgtgaatgccgtcctcactgtagcagatatggagcggagagacgttgactttgagcttatcaaagtagaaggcaaagtgggcggcaggctggaggacactaaactgattaagggcgtgattgtggacaaggatttcagtcacccacagatgccaaaaaaagtggaagatgcgaagattgcaattctcacatgtccatttgaaccacccaaaccaaaaacaaagcataagctggatgtgacctctgtcgaagattataaagcccttcagaaatacgaaaaggagaaatttgaagagatgattcaacaaattaaagagactggtgctaacctagcaatttgtcagtggggctttgatgatgaagcaaatcacttacttcttcagaacaacttgcctgcggttcgctgggtaggaggacctgaaattgagctgattgccatcgcaacaggagggcggatcgtccccaggttctcagagctcacagccgagaagctgggctttgctggtcttgtacaggagatctcatttgggacaactaaggataaaatgctggtcatcgagcagtgtaagaactccagagctgtaaccatttttattagaggaggaaataagatgatcattgaggaggcgaaacgatcccttcacgatgctttgtgtgtcatccggaacctcatccgcgataatcgtgtggtgtatggaggaggggctgctgagatatcctgtgccctggcagttagccaagaggcggataagtgccccaccttagaacagtatgccatgagagcgtttgccgacgcactggaggtcatccccatggccctctctgaaaacagtggcatgaatcccatccagactatgaccgaagtccgagccagacaggtgaaggagatgaaccctgctcttggcatcgactgtttgcacaaggggacaaatgatatgaagcaacagcatgtcatagaaaccttgattggcaaaaagcaacagatatctcttgcaacacaaatggttagaatgattttgaagattgatgacattcgtaagcctggagaatctgaagaatgaagacattgagaaaactatgtagcaagatccacttctgtgattaagtaaatggatgtctcgtgatgcatctacagttatttattgttacatccttttccagacactgtagatgctataat

SEQ ID NO: 172375 - DNA, 1626 bp, Artificial Sequence
  derived and/or modified sequence
atggccagcatgggcaccctggccttcgacgagtacggcagacccttcctgatcatcaaggaccaggacagaaagagcagactgatgggcctggaggccctgaagagccacatcatggccgccaaggccgtggccaacaccatgagaaccagcctgggccccaacggcctggacaagatgatggtggacaaggacggcgacgtgaccgtgaccaacgacggcgccaccatcctgagcatgatggacgtggaccaccagatcgccaagctgatggtggagctgagcaagagccaggacgacgagatcggcgacggcaccaccggcgtggtggtgctggccggcgccctgctggaggaggccgagcagctgctggacagaggcatccaccccatcagaatcgccgacggctacgagcaggccgccagagtggccatcgagcacctggacaagatcagcgacagcgtgctggtggacatcaaggacaccgagcccctgatccagaccgccaagaccaccctgggcagcaaggtggtgaacagctgccacagacagatggccgagatcgccgtgaacgccgtgctgaccgtggccgacatggagagaagagacgtggacttcgagctgatcaaggtggagggcaaggtgggcggcagactggaggacaccaagctgatcaagggcgtgatcgtggacaaggacttcagccacccccagatgcccaagaaggtggaggacgccaagatcgccatcctgacctgccccttcgagccccccaagcccaagaccaagcacaagctggacgtgaccagcgtggaggactacaaggccctgcagaagtacgagaaggagaagttcgaggagatgatccagcagatcaaggagaccggcgccaacctggccatctgccagtggggcttcgacgacgaggccaaccacctgctgctgcagaacaacctgcccgccgtgagatgggtgggcggccccgagatcgagctgatcgccatcgccaccggcggcagaatcgtgcccagattcagcgagctgaccgccgagaagctgggcttcgccggcctggtgcaggagatcagcttcggcaccaccaaggacaagatgctggtgatcgagcagtgcaagaacagcagagccgtgaccatcttcatcagaggcggcaacaagatgatcatcgaggaggccaagagaagcctgcacgacgccctgtgcgtgatcagaaacctgatcagagacaacagagtggtgtacggcggcggcgccgccgagatcagctgcgccctggccgtgagccaggaggccgacaagtgccccaccctggagcagtacgccatgagagccttcgccgacgccctggaggtgatccccatggccctgagcgagaacagcggcatgaaccccatccagaccatgaccgaggtgagagccagacaggtgaaggagatgaaccccgccctgggcatcgactgcctgcacaagggcaccaacgacatgaagcagcagcacgtgatcgagaccctgatcggcaagaagcagcagatcagcctggccacccagatggtgagaatgatcctgaagatcgacgacatcagaaagcccggcgagagcgaggagtag

SEQ ID NO: 172376 - DNA, 1545 bp, Artificial Sequence
  derived and/or modified sequence
atggccagcatgggcaccctggccttcgacgagtacggcagacccttcctgatcatcaaggaccaggacagaaagagcagactgatgggcctggaggccctgaagagccacatcatggccgccaaggccgtggccaacaccatgagaaccagcctgggccccaacggcctggacaagatgatggtggacaaggacggcgacgtgaccgtgaccaacgacgagatcggcgacggcaccaccggcgtggtggtgctggccggcgccctgctggaggaggccgagcagctgctggacagaggcatccaccccatcagaatcgccgacggctacgagcaggccgccagagtggccatcgagcacctggacaagatcagcgacagcgtgctggtggacatcaaggacaccgagcccctgatccagaccgccaagaccaccctgggcagcaaggtggtgaacagctgccacagacagatggccgagatcgccgtgaacgccgtgctgaccgtggccgacatggagagaagagacgtggacttcgagctgatcaaggtggagggcaaggtgggcggcagactggaggacaccaagctgatcaagggcgtgatcgtggacaaggacttcagccacccccagatgcccaagaaggtggaggacgccaagatcgccatcctgacctgccccttcgagccccccaagcccaagaccaagcacaagctggacgtgaccagcgtggaggactacaaggccctgcagaagtacgagaaggagaagttcgaggagatgatccagcagatcaaggagaccggcgccaacctggccatctgccagtggggcttcgacgacgaggccaaccacctgctgctgcagaacaacctgcccgccgtgagatgggtgggcggccccgagatcgagctgatcgccatcgccaccggcggcagaatcgtgcccagattcagcgagctgaccgccgagaagctgggcttcgccggcctggtgcaggagatcagcttcggcaccaccaaggacaagatgctggtgatcgagcagtgcaagaacagcagagccgtgaccatcttcatcagaggcggcaacaagatgatcatcgaggaggccaagagaagcctgcacgacgccctgtgcgtgatcagaaacctgatcagagacaacagagtggtgtacggcggcggcgccgccgagatcagctgcgccctggccgtgagccaggaggccgacaagtgccccaccctggagcagtacgccatgagagccttcgccgacgccctggaggtgatccccatggccctgagcgagaacagcggcatgaaccccatccagaccatgaccgaggtgagagccagacaggtgaaggagatgaaccccgccctgggcatcgactgcctgcacaagggcaccaacgacatgaagcagcagcacgtgatcgagaccctgatcggcaagaagcagcagatcagcctggccacccagatggtgagaatgatcctgaagatcgacgacatcagaaagcccggcgagagcgaggagtag

SEQ ID NO: 172377 - DNA, 1512 bp, Artificial Sequence
  derived and/or modified sequence
atggccgccaaggccgtggccaacaccatgagaaccagcctgggccccaacggcctggacaagatgatggtggacaaggacggcgacgtgaccgtgaccaacgacggcgccaccatcctgagcatgatggacgtggaccaccagatcgccaagctgatggtggagctgagcaagagccaggacgacgagatcggcgacggcaccaccggcgtggtggtgctggccggcgccctgctggaggaggccgagcagctgctggacagaggcatccaccccatcagaatcgccgacggctacgagcaggccgccagagtggccatcgagcacctggacaagatcagcgacagcgtgctggtggacatcaaggacaccgagcccctgatccagaccgccaagaccaccctgggcagcaaggtggtgaacagctgccacagacagatggccgagatcgccgtgaacgccgtgctgaccgtggccgacatggagagaagagacgtggacttcgagctgatcaaggtggagggcaaggtgggcggcagactggaggacaccaagctgatcaagggcgtgatcgtggacaaggacttcagccacccccagatgcccaagaaggtggaggacgccaagatcgccatcctgacctgccccttcgagccccccaagcccaagaccaagcacaagctggacgtgaccagcgtggaggactacaaggccctgcagaagtacgagaaggagaagttcgaggagatgatccagcagatcaaggagaccggcgccaacctggccatctgccagtggggcttcgacgacgaggccaaccacctgctgctgcagaacaacctgcccgccgtgagatgggtgggcggccccgagatcgagctgatcgccatcgccaccggcggcagaatcgtgcccagattcagcgagctgaccgccgagaagctgggcttcgccggcctggtgcaggagatcagcttcggcaccaccaaggacaagatgctggtgatcgagcagtgcaagaacagcagagccgtgaccatcttcatcagaggcggcaacaagatgatcatcgaggaggccaagagaagcctgcacgacgccctgtgcgtgatcagaaacctgatcagagacaacagagtggtgtacggcggcggcgccgccgagatcagctgcgccctggccgtgagccaggaggccgacaagtgccccaccctggagcagtacgccatgagagccttcgccgacgccctggaggtgatccccatggccctgagcgagaacagcggcatgaaccccatccagaccatgaccgaggtgagagccagacaggtgaaggagatgaaccccgccctgggcatcgactgcctgcacaagggcaccaacgacatgaagcagcagcacgtgatcgagaccctgatcggcaagaagcagcagatcagcctggccacccagatggtgagaatgatcctgaagatcgacgacatcagaaagcccggcgagagcgaggagtag

SEQ ID NO: 172378 - protein, 357 aa, Artificial Sequence
  derived and/or modified sequence
MATVIHNPLKALGDQFYKEAIEHCRSYNSRLCAERSVRLPFLDSQTGVAQNNCYIWMEKRHRGPGLAPGQLYTYPARCWRKKRRLHPPEDPKLRLLEIKPEVELPLKKDGFTSESTTLEALLRGEGVEKKVDAREEESIQEIQRVLENDENVEEGNEEEDLEEDIPKRKNRTRGRARGSAGGRRRHDAASQEDHDKPYVCDICGKRYKNRPGLSYHYAHTHLASEEGDEAQDQETRSPPNHRNENHRPQKGPDGTVIPNNYCDFCLGGSNMNKKSGRPEELVSCADCGRSAHLGGEGRKEKEAAAAARTTEDLFGSTSESDTSTFHGFDEDDLEEPRSCRGRRSGRGSPTADKKGSC

SEQ ID NO: 172379 - DNA, 2271 bp, Artificial Sequence
  derived and/or modified sequence
acattgtagcaaaatggcgactgtcattcacaaccccctgaaagcgctcggggaccagttctacaaggaagccattgagcactgccggagttacaactcacggctgtgtgcagagcgcagcgtgcgtcttcccttcctggactcacagactggggtggcccagaacaactgctacatctggatggagaagaggcaccgaggcccaggccttgccccgggccagctgtatacataccctgcccgctgctggcgcaagaagagacgattgcacccacctgaagatccaaaactgcggctgctggagataaaacctgaagtggagcttcccctgaagaaggatgggttcacctcagagagcaccacgctggaagccttgctccgtggcgagggggttgagaagaaggtggatgccagggaggaggaaagcatccaggaaatacagagggttttggaaaatgatgaaaatgtagaagaagggaatgaagaagaggatttggaagaggatattcccaagcgaaagaacaggactagaggacgggctcgcggctctgcagggggcaggaggaggcacgacgccgcctctcaggaagaccacgacaaaccttacgtctgtgacatctgtggcaagcgctacaagaaccgaccggggctcagctaccactatgctcacactcacctggccagcgaggagggggatgaagctcaagaccaggagactcggtccccacccaaccacagaaatgagaaccacaggccccagaaaggaccggatggaacagtcattcccaataactactgtgacttctgcttggggggctccaacatgaacaagaagagtgggcggcctgaagagctggtgtcctgcgcagactgtggacgctctgctcatttgggaggagaaggcaggaaggagaaggaggcagcggccgcagcacgtaccacggaggacttattcggttccacgtcagaaagtgacacgtcaactttccacggctttgatgaggacgatttggaagagcctcgctcctgtcgaggacgccgcagtggccggggttcgcccacagcagataaaaagggcagttgctaaacccacggaacagactctctgggcaattagccatccccctctgactttggtcattgtgctggttctgatatatattttttttaatgaaaggcaactttagattttccctctatccttgctttttttcccttcacctcccacgtgtccctccatccctccccccacccctctgttttgggtatgtacaacagaagcacaaactactgaaacaaaacaaaacagcagaatgagcgttcttccgagagatggcatcgtgatgcgctatttattttccatagaaataggaagttagacggattgtctcttttctgaggggagggggtctttttgacaggagcagagttgatgtcctcaattttcatatttattggcaaaaggaagagaagaggaactttgggttggaaacaaagaaccaataacattaaaacattattatttatatattctagctgttattagaatcagactttttttgcgagagagagagagagagagagagaagggaaatcaaagaaatcgaagcaatatcctgtttagaggcaagccgcccggtggggagaatttcctcaatgggagacggttgcactattctgtgccccacggagtttgcggctccccgcggcagacccctccctcattctcctccctgacctttccatcttcctctctgcttgcgagaaaatgtcagtagttccagagaagtcggggtgcctatgcctggcctccctccacacctgggccctgaccagccgcctcctgggctcctcctcctccgtcagtagagctgctgttttgttattgctggtttttcctcactttcctcctggcaaagaacgacttccaaatgcagggatggaatataagcagaacgtcatgggctcagcagtgactccaccacccgaggccgaggccgtgcttctggaagatagaaggagacatcatcgtgtgtttcccctccccttgcccctgttaagaaacgtatcaatacccattggatgatcaaggctaccgtatttcttctatttttttttatagtgcctgccaggcactttgttttatgtttccaatagcacttcctgaaataaaccaaagcaacactgctcaaggcccctggggcgatggagaaggccacccacctcactgacagtcccaagaatgaccggctgcgaggtcctagtcaaaag

SEQ ID NO: 172380 - DNA, 1074 bp, Artificial Sequence
  derived and/or modified sequence
atggccacagtaatccataaccccctcaaggctctgggggaccagttctacaaagaggctattgagcattgtagatcttacaatagcaggctctgtgctgaacgcagtgtccgcttgcctttcctcgactcccaaacaggagttgctcagaataactgctatatatggatggaaaaacgtcatagaggcccagggctggctcctggccaactttatacctatcctgccaggtgctggcggaagaaaaggcgattgcaccctccagaagatcccaagcttcgtctcctagagattaagcccgaggttgagcttccactgaagaaagacgggttcacatccgagagtacaacccttgaggcactcctgcgtggggaaggcgtcgagaagaaggtagatgcccgcgaggaagagtcaatccaggagattcagcgtgttctcgagaacgatgagaatgttgaagaggggaatgaggaggaggacctcgaggaggacatcccaaagcgaaagaaccgcacccgcggtagagccaggggctcagccggggggagaaggcgccacgatgctgcctcgcaggaggaccacgacaaaccttacgtatgtgacatttgcggcaaacggtacaagaatcgccccgggctatcataccactacgcacatacccatctggctagcgaggagggcgacgaagctcaagaccaggagaccagaagcccgccaaatcatagaaacgagaaccaccggcctcaaaaagggccagacggtactgtcataccaaacaattactgtgacttttgcttgggaggctcgaatatgaataagaagtctggccggcctgaggagctcgtgagctgcgctgactgcggaagatccgcccacctggggggcgaggggcggaaggagaaagaggccgccgccgccgcccgcacaaccgaagacctgtttgggagtaccagcgaatccgacacctccacgttccacgggttcgacgaggatgacttggaagagccaaggagctgtcgtggccgcaggtcaggtagaggtagtcccactgcggacaaaaagggttcttgttag

SEQ ID NO: 172381 - DNA, 1074 bp, Artificial Sequence
  derived and/or modified sequence
atggccactgtgattcataaccccctcaaagccctcggggatcaattttataaggaggctatcgaacattgccgatcttacaactcacgcctgtgcgctgaacgatccgtcaggctgccctttctggattctcagactggcgtcgctcaaaataattgttatatttggatggagaaaaggcacagaggcccgggactcgcacccggtcaactgtatacctatcccgcaagatgttggaggaaaaagcgtcgactgcaccctccagaggatccaaaacttcgtctcctggagatcaaaccagaggtggaacttcctttaaagaaagacggattcacttccgaaagcaccaccctggaggcgctgcttagaggggaaggcgttgagaaaaaggtggacgcccgggaagaggagtctatccaagagatccagagagtactggagaatgacgaaaacgtggaggagggtaatgaggaagaagacctggaggaggatatccccaaacgtaagaataggacccgaggacgggcccgaggcagcgccggagggcggcgacgccacgacgcagcatcccaggaagaccacgataagccgtacgtttgcgacatctgtggtaagcggtacaaaaatcggcctgggctcagctatcattatgcccacactcacctggcgtccgaggagggggacgaagcacaagaccaggagaccaggtctccacctaatcacaggaatgagaaccatagaccacagaaaggcccagatggcactgtcattcccaacaattattgcgatttctgcctgggagggtccaatatgaacaagaagagtgggcgccctgaggaattggtgagttgtgctgactgcggccgcagcgctcatctgggtggagaaggacgcaaagagaaagaagctgcagctgctgccagaactactgaagatctctttggatccacatccgagtccgatactagcactttccatggattcgacgaggacgaccttgaggagccgcggagctgtcgtggcaggcgctctgggcgtggctctccaacagcagataagaaaggcagttgttag

SEQ ID NO: 172382 - DNA, 1074 bp, Artificial Sequence
  derived and/or modified sequence
atggccaccgtcatccacaaccccctgaaggccctgggggaccagttctacaaggaggccatcgagcactgccgcagctacaacagccggctgtgtgccgagaggtctgtgcggctgcccttcctggacagccagacaggagtggcccagaacaactgctacatctggatggagaagaggcaccggggccctggcctggcccctggccagctgtacacctacccagcccgctgctggaggaagaagaggcggctgcaccccccagaggaccccaagctgcggctgctggagatcaagccagaggtggagctgcccctgaagaaggatggcttcaccagcgagagcaccaccctggaggccctgctgcggggggagggcgtggagaagaaggtggatgcccgggaggaggagagcatccaggagatccagagggtgctggagaatgatgaaaatgtggaggagggcaatgaggaggaggacctggaggaggacatccccaagaggaagaacagaacccggggccgggcccggggcagcgctgggggcagaagaagacatgatgctgccagccaggaggaccatgacaagccctacgtgtgtgacatctgtgggaagcgctacaagaacagacctggcctgagctaccactacgcccacacccacctggccagcgaggagggagatgaggcccaggaccaggagaccaggagcccccccaaccacagaaatgaaaaccaccggccccagaagggcccagatggcaccgtcatccccaacaactactgtgacttctgcctgggcggcagcaacatgaacaagaagagcggccggcctgaggagctggtgtcctgtgccgactgtggccgcagcgcccacctgggcggggagggcaggaaggagaaggaggccgctgctgctgcccggaccacagaggacctgtttggcagcaccagcgagagtgacaccagcaccttccacggctttgatgaagatgacctggaggagcccaggagctgccggggccgccgcagcggccggggcagccccacagctgacaagaagggcagctgctag

SEQ ID NO: 172383 - DNA, 1074 bp, Artificial Sequence
  derived and/or modified sequence
atggccaccgtgatccacaaccccctgaaggccctgggcgaccagttttacaaagaggctatagagcactgtcgatcttacaattcacgtctctgtgccgaaaggagcgtcagattgcccttcctggattctcagaccggggtagctcaaaataattgttatatatggatggagaagagacatcgcggtcccgggttggcacccggtcagctgtacacttaccccgctcgatgctggcgcaagaagagacgcctccacccacctgaagatcctaagctccggcttctggagattaaaccagaggttgaactgcctctgaagaaagacgggtttaccagcgaaagcacaacactcgaagcactgcttaggggcgaaggcgtagagaaaaaggtggacgcaagagaggaagaaagcatacaggagatccagagagtgctagagaacgatgagaatgtcgaggaaggcaacgaggaggaggatttagaggaggatattccaaaacgtaaaaatcgtacacgcgggcgggcacgtgggtctgcgggcggccgtagaagacatgatgccgctagccaagaagaccacgataagccatatgtgtgcgatatctgcggaaaaagatataagaaccgtcccggactaagctaccactacgcacacacgcacctggcttccgaggagggcgatgaagctcaagaccaggagactcgctccccaccaaatcacagaaatgagaaccaccgcccgcagaagggaccagatggtactgtgatccctaacaactattgcgatttttgcctgggtggctctaatatgaacaaaaaaagcgggcggcccgaagagctcgtgagctgcgctgattgcggcaggtccgcccacttaggaggcgagggacggaaggaaaaggaagctgcggctgccgcccgcacaacagaggatctgtttggtagcacttcggagagtgacacatcaacgttccatgggttcgacgaagatgacctggaagagccacggtcgtgccgtggcagacgatctggtaggggtagcccaacggcggacaaaaaggggtcttgttag

SEQ ID NO: 172384 - DNA, 1074 bp, Artificial Sequence
  derived and/or modified sequence
atggccaccgtgatccacaaccccctgaaggccctgggcgaccagttctacaaagaagctatagaacattgccgcagttacaatagtcgtctctgtgccgagcgcagtgtccgcttgccttttctggacagccagaccggggtggctcagaacaattgctacatctggatggaaaagagacatagagggccaggactagctcccggccagctgtatacataccccgcacggtgctggcgtaagaagcgaaggctccatccccccgaggatcccaaactgaggttgctcgagatcaaacccgaggtggaattacctcttaaaaaggacggttttacgagtgaatccactaccttggaagcattgctacgcggagaaggcgtcgaaaagaaggtcgacgcacgcgaggaagaatccatccaggaaatccaaagagtactggagaacgatgagaatgtggaggaaggtaacgaagaggaggacttagaagaggacattcctaagcgtaaaaatcggacccgcggccgagctcggggaagtgccggggggcgccgccgtcatgatgctgcctcacaggaggatcatgacaagccctacgtgtgtgatatttgcggcaagcggtataaaaacaggccgggactctcctatcattacgcccatacacacctagcatcagaggagggagacgaggcacaggaccaggagacacgatctccacctaaccatcgcaatgagaatcaccgaccccagaaagggccagatggcacagtgatccctaataactattgcgatttttgtctcgggggcagcaacatgaacaagaaaagcggccgccccgaagaactagtctcatgcgccgattgcggaagatctgctcatctgggaggcgagggtcgtaaggaaaaggaggccgctgcagcagcccgcaccactgaagatctctttgggtcaacgagtgagtccgacacttccacctttcacgggttcgacgaggacgatttggaagaaccccggtcctgtcgcgggagacggtcaggtagaggttcgccaaccgccgacaaaaaaggcagttgttag

SEQ ID NO: 172385 - DNA, 1074 bp, Artificial Sequence
  derived and/or modified sequence
atggccaccgtaattcataacccccttaaagcactcggcgatcagttctacaaagaggctatcgaacactgcaggtcctacaactcccgcctgtgtgccgagaggtcggttcgcctgccattcctcgactcccagaccggagttgcacagaacaactgttatatctggatggaaaaacgacacagaggacctggcctggcaccaggccagctttacacgtatcccgcacgctgctggcggaaaaaaaggagactgcacccaccggaggatcccaaactgcgcctgcttgagatcaaacctgaggtggaactgcctctgaagaaagacggcttcacctctgagtcgacaactttggaggccctgcttcgtggcgaaggcgtcgaaaaaaaggttgacgccagagaggaggagtccattcaggagattcagcgtgtccttgaaaatgatgagaacgttgaagaaggaaatgaggaagaggacctagaggaagacataccaaaacggaaaaaccggactcgaggacgcgcacgaggatctgccggagggaggagaagacacgacgctgccagccaggaggatcatgacaaaccgtacgtgtgcgatatctgcggtaaaagatacaaaaacagacccggattgtcttatcactatgcccatacgcatctggcctccgaggaaggtgacgaggcgcaggatcaggagacccggagtccccctaaccataggaatgaaaaccacaggccacagaaggggccagatgggactgtaatccctaacaactactgcgatttttgcctggggggaagcaatatgaataagaaaagcggcaggccagaggaactggtctcatgtgctgactgcggtcgctcagcacacctgggtggagagggtcgtaaagaaaaagaggccgctgccgctgcgaggacaaccgaggacctctttgggtccacatcagaatccgatacgagcacttttcacggcttcgatgaagatgacctcgaggagcctaggagctgtaggggaaggagatccggaagaggttcgccaactgccgataagaagggctcctgttag

SEQ ID NO: 172386 - DNA, 1074 bp, Artificial Sequence
  derived and/or modified sequence
atggcaactgttattcataatccacttaaggccttgggggaccagttttataaggaagcaattgaacattgtcgttcctataacagtagactgtgcgctgagagatccgtgaggctgccatttttggactcacagacaggcgtcgcccagaacaactgctacatatggatggagaagcgtcaccgcggacctggtctggcgcctggccagctttacacttaccccgctcgatgctggaggaagaaaaggcggttgcaccctcccgaagaccctaagctgcgtctattggagatcaagcctgaagtggagttgcctttgaaaaaggacggctttacttccgagtccacaactctggaggccctcctgcgcggtgaaggcgtcgagaagaaggttgatgcacgggaagaggagtcgatccaggagatccaaagggtgctagagaatgatgaaaatgtggaagaggggaacgaggaggaggatctggaagaagacattccaaagcgaaagaacagaaccagaggcagagctcgcggttcagcaggaggtaggcgtcgacacgacgcggcaagccaagaggatcatgacaagccctacgtgtgcgatatatgtggaaagaggtacaagaacagacccggattgagttatcattatgcacatactcacctggctagtgaagaaggtgatgaggctcaagaccaggagacacgatctccacctaaccaccggaacgagaatcaccggccacagaaaggacccgatggaacagtgatcccgaataattattgtgacttttgcctggggggttcaaatatgaacaagaagtccggaagaccagaggagttagtgtcgtgtgctgattgtgggcgaagcgcccatttgggcggtgagggcaggaaagaaaaagaggctgccgctgccgcacgcaccacagaggaccttttcggctctactagtgagtccgacacatctacgtttcacgggtttgacgaagatgacctggaggaaccaaggtcatgccgagggaggcgatccggccgaggctctcctacagctgacaagaagggttcctgttag

SEQ ID NO: 172387 - DNA, 3229 bp, Artificial Sequence
  derived and/or modified sequence
acattgtagcaaaatggcgactgtcattcacaaccccctgaaagcgctcggggaccagttctacaaggaagccattgagcactgccggagttacaactcacggctgtgtgcagagcgcagcgtgcgtcttcccttcctggactcacagactggggtggcccagaacaactgctacatctggatggagaagaggcaccgaggcccaggccttgccccgggccagctgtatacataccctgcccgctgctggcgcaagaagagacgattgcacccacctgaagatccaaaactgcggctgctggagataaaacctgaagtggagcttcccctgaagaaggatgggttcacctcagagagcaccacgctggaagccttgctccgtggcgagggggttgagaagaaggtggatgccagggaggaggaaagcatccaggaaatacagagggttttggaaaatgatgaaaatgtagaagaagggaatgaagaagaggatttggaagaggatattcccaagcgaaagaacaggactagaggacgggctcgcggctctgcagggggcaggaggaggcacgacgccgcctctcaggaagaccacgacaaaccttacgtctgtgacatctgtggcaagcgctacaagaaccgaccggggctcagctaccactatgctcacactcacctggccagcgaggagggggatgaagctcaagaccaggagactcggtccccacccaaccacagaaatgagaaccacaggccccagaaaggaccggatggaacagtcattcccaataactactgtgacttctgcttggggggctccaacatgaacaagaagagtgggcggcctgaagagctggtgtcctgcgcagactgtggacgctctgctcatttgggaggagaaggcaggaaggagaaggaggcagcggccgcagcacgtaccacggaggacttattcggttccacgtcagaaagtgacacgtcaactttccacggctttgatgaggacgatttggaagagcctcgctcctgtcgaggacgccgcagtggccggggttcgcccacagcagataaaaagggcagttgctaaacccacggaacagactctctgggcaattagccatccccctctgactttggtcattgtgctggttctgatatatattttttttaatgaaaggcaactttagattttccctctatccttgctttttttcccttcacctcccacgtgtccctccatccctccccccacccctctgttttgggtatgtacaacagaagcacaaactactgaaacaaaacaaaacagcagaatgagcgttcttccgagagatggcatcgtgatgcgctatttattttccatagaaataggaagttagacggattgtctcttttctgaggggagggggtctttttgacaggagcagagttgatgtcctcaattttcatatttattggcaaaaggaagagaagaggaactttgggttggaaacaaagaaccaataacattaaaacattattatttatatattctagctgttattagaatcagactttttttgcgagagagagagagagagagagagaagggaaatcaaagaaatcgaagcaatatcctgtttagaggcaagccgcccggtggggagaatttcctcaatgggagacggttgcactattctgtgccccacggagtttgcggctccccgcggcagacccctccctcattctcctccctgacctttccatcttcctctctgcttgcgagaaaatgtcagtagttccagagaagtcggggtgcctatgcctggcctccctccacacctgggccctgaccagccgcctcctgggctcctcctcctccgtcagtagagctgctgttttgttattgctggtttttcctcactttcctcctggcaaagaacgacttccaaatgcagggatggaatataagcagaacgtcatgggctcagcagtgactccaccacccgaggccgaggccgtgcttctggaagatagaaggagacatcatcgtgtgtttcccctccccttgcccctgttaagaaacgtatcaatacccattggatgatcaaggctaccgtatttcttctatttttttttatagtgcctgccaggcactttgttttatgtttccaatagcacttcctgaaataaaccaaagcaacactgctcaaggcccctggggcgatggagaaggccacccacctcactgacagtcccaagaatgaccggctgcgaggtcctagtcaaaagtcaacattatgacctggggactccagcatccttcaagcaagccatttccgaagaaggtgaaaagaagccaggatgattggcacctcctcctcctcctcctcttcttcctcttcccttgcccagccccctcctgtgcgtgtgtttcagacaacacaggagccagcacaggagtggaaaatcctgcagcgcaactcagctcagcccacagaagccttgggaatggcctcagtttgtgcaataagaagattttttttttctttttaaatcttcattatattttctttgattgtctgtgagaaagtacccaggtccgcctggaattactctacagtagaaataactgaacacaaacaaactgatggaaaaaaagagttaactattttatttatttcaatatttaaaaggaaaaaagtgctgacatggcacagtatttttgtttaaagtacctcctacttcaaaagttaagcgcaattttgtgaagacatgaaatcataagagtacttaatgtaaaataaaagactgcatattaactctaaagaaaaatgccccacattttaaataagaaaataaagatcaactctgctctctcaggctttttaaaaagccattcatgtatgtgctttaggtatttttatttctgcgagttggatgtggtaagtgaggagtgctcagtttttttttcctccttcaaaagtctattgaaagtgttggtgatgttaaatgattgtgtgttaagatttgactgaaataacttagccacaaatcagcagtttcccccaccctcattgccccctcaccccaggcaagccccttttatctgaatgtcagaagcagcctgcctcctagttatcatgtctgatgaggtctagctcaggaaggaattccatctattgatggaatatatcccctcaagttcaatagattcgaacacagagagctttgtttaaaataatgcagc

SEQ ID NO: 172388 - DNA, 1074 bp, Artificial Sequence
  derived and/or modified sequence
atggccaccgtgatccacaaccccctgaaggccctgggcgaccagttctacaaggaggccatcgagcactgcagaagctacaacagcagactgtgcgccgagagaagcgtgagactgcccttcctggacagccagaccggcgtggcccagaacaactgctacatctggatggagaagagacacagaggccccggcctggcccccggccagctgtacacctaccccgccagatgctggagaaagaagagaagactgcacccccccgaggaccccaagctgagactgctggagatcaagcccgaggtggagctgcccctgaagaaggacggcttcaccagcgagagcaccaccctggaggccctgctgagaggcgagggcgtggagaagaaggtggacgccagagaggaggagagcatccaggagatccagagagtgctggagaacgacgagaacgtggaggagggcaacgaggaggaggacctggaggaggacatccccaagagaaagaacagaaccagaggcagagccagaggcagcgccggcggcagaagaagacacgacgccgccagccaggaggaccacgacaagccctacgtgtgcgacatctgcggcaagagatacaagaacagacccggcctgagctaccactacgcccacacccacctggccagcgaggagggcgacgaggcccaggaccaggagaccagaagcccccccaaccacagaaacgagaaccacagaccccagaagggccccgacggcaccgtgatccccaacaactactgcgacttctgcctgggcggcagcaacatgaacaagaagagcggcagacccgaggagctggtgagctgcgccgactgcggcagaagcgcccacctgggcggcgagggcagaaaggagaaggaggccgccgccgccgccagaaccaccgaggacctgttcggcagcaccagcgagagcgacaccagcaccttccacggcttcgacgaggacgacctggaggagcccagaagctgcagaggcagaagaagcggcagaggcagccccaccgccgacaagaagggcagctgctag

SEQ ID NO: 172389 - protein, 488 aa, Artificial Sequence
  derived and/or modified sequence
MGDRGSSRRRRTGSRPSSHGGGGPAAAEEEVRDAAAGPDVGAAGDAPAPAPNKDGDAGVGSGHWELRCHRLQDSLFSSDSGFSNYRGILNWCVVMLILSNARLFLENLIKYGILVDPIQVVSLFLKDPYSWPAPCLVIAANVFAVAAFQVEKRLAVGALTEQAGLLLHVANLATILCFPAAVVLLVESITPVGSLLALMAHTILFLKLFSYRDVNSWCRRARAKAASAGKKASSAAAPHTVSYPDNLTYRDLYYFLFAPTLCYELNFPRSPRIRKRFLLRRILEMLFFTQLQVGLIQQWMVPTIQNSMKPFKDMDYSRIIERLLKLAVPNHLIWLIFFYWLFHSCLNAVAELMQFGDREFYRDWWNSESVTYFWQNWNIPVHKWCIRHFYKPMLRRGSSKWMARTGVFLASAFFHEYLVSVPLRMFRLWAFTGMMAQIPLAWFVGRFFQGNYGNAAVWLSLIIGQPIAVLMYVHDYYVLNYEAPAAEA

SEQ ID NO: 172390 - DNA, 1467 bp, Artificial Sequence
  derived and/or modified sequence
atgggagaccgggggagtagccgcaggagacgaacgggctcccgtccgtcatcccacggcggagggggcccagcagccgcagaagaggaagtcagggacgcagccgccgggcccgatgtcggtgcggccggagatgctcctgcccctgccccaaataaggacggggacgccggagttgggtcgggtcattgggagctcaggtgtcatcgccttcaagactccctctttagctcagatagcggattcagcaattacagagggatcttaaactggtgcgttgtgatgctgattctttctaacgccaggctgttcctggaaaacttaattaagtacggcattttggtggaccctatacaagtggtgagtttgtttctgaaggatccatactcatggcccgctccatgcctggtgatagccgctaatgtatttgcagtggccgccttccaggtggaaaagagacttgctgtgggggccctgacagaacaggccgggcttctcctgcatgtggctaacttagctacaatactgtgtttccctgccgcagttgtgctgttggtggaatctattactcccgttgggtccttactcgccctaatggcacatacaattctctttcttaaactgttttcttaccgagatgtgaacagctggtgccgtagggctcgcgctaaagcagcttctgctgggaagaaggcttcatctgcagcagccccccatacagtgtcctaccctgacaatctcacttacagagacctctattactttctgtttgcccccaccttgtgttatgagctgaactttcccagatctccccgaattaggaagaggttcctcttgcgacgaattcttgaaatgctcttttttacccagctgcaggttggactaatccagcagtggatggtgccgactattcaaaattccatgaagccttttaaggacatggattacagcaggatcatcgaaagattgctgaagctggctgtgcccaaccacttaatctggctgatttttttctactggctattccactcatgtctgaacgctgtcgctgagttaatgcagtttggagaccgggagttctatagagattggtggaactcagagtccgttacatatttttggcagaactggaacattcccgtgcacaagtggtgcatcaggcatttctacaaaccaatgctgagaaggggatctagcaaatggatggcccgtacaggcgtatttctagcgtcagcattctttcatgagtacctcgttagcgtgccgctccgaatgtttagactttgggcatttaccggcatgatggctcagattccccttgcctggtttgtgggtcgcttcttccaaggcaactatggaaacgctgccgtgtggctctcactcatcattggacagccgattgccgtgctgatgtatgttcatgactactacgtccttaattatgaagcgccagccgcggaggcatag

SEQ ID NO: 172391 - DNA, 1467 bp, Artificial Sequence
  derived and/or modified sequence
atgggagaccggggcagcagcagaagaagaagaacaggcagccggcccagcagccatggaggcggcggccctgctgctgctgaggaggaggtgagagatgctgctgctggcccagatgtgggcgctgctggagatgccccagccccagcccccaacaaggatggagatgctggggtgggcagcggccactgggagctgcgctgccaccggctgcaggacagcctcttcagcagtgacagcggcttcagcaactaccggggcatcctgaactggtgtgtggtgatgctgatcctgagcaatgcccggctcttcctggagaacctgatcaagtatggcatcctggtggaccccatccaggtggtgtccctcttcctgaaggacccctacagctggccagccccctgcctggtgattgctgccaacgtgtttgctgtggccgccttccaggtggagaagaggctggccgtgggcgccctgacagagcaggccggcctgctgctgcacgtggccaacctggccaccatcctgtgcttccctgctgctgtggtgctgctggtggagagcatcacccctgtgggcagcctgctggccctgatggcccacaccatcctcttcctgaagctgttctcctacagagatgtgaacagctggtgcagaagagcccgggccaaggccgccagcgctgggaagaaggccagcagcgctgctgccccccacacagtgtcctacccagacaacctgacctacagagacctgtactacttcctgtttgcccccaccctgtgctatgagctgaacttccccaggagcccccgcatcaggaagcgcttcctgctgcggcgcatcctggagatgctgttcttcacccagctgcaggtgggcctcatccagcagtggatggtgcccaccatccagaacagcatgaagcccttcaaggacatggactacagccgcatcatcgagcggctgctgaagctggccgtgcccaaccacctgatctggctgatcttcttctactggctgttccacagctgcctgaatgctgtggccgagctgatgcagtttggagaccgggagttctacagagactggtggaacagcgagagcgtgacctacttctggcagaactggaacatccctgtgcacaagtggtgcatccgccacttctacaagcccatgctgcggcggggcagcagcaagtggatggccaggactggagtcttcctggccagcgccttcttccacgagtacctggtgtctgtgcccctgaggatgttccggctgtgggccttcaccggcatgatggcccagatccccctggcctggtttgtgggccgcttcttccagggcaactatggaaatgctgctgtgtggctgagcctcatcatcggccagcccatcgctgtgctgatgtatgtgcatgactactacgtgctgaactatgaggccccagctgctgaggcctag

SEQ ID NO: 172392 - DNA, 1467 bp, Artificial Sequence
  derived and/or modified sequence
atgggcgaccggggcagcagccggcggcggcggaccggcagccggccctcctctcatgggggtgggggccccgcggcggccgaagaagaagtgagggatgctgctgcagggcccgatgtcggagccgccggagatgctcccgctccagctcccaacaaggacggcgacgcaggcgtcggcagtgggcattgggagctccgttgccatcgattacaggattccctcttttccagcgattctggcttctcaaactatcgtggcatcctgaattggtgcgtcgttatgctcattttgtccaacgcccggctcttcctggagaacctgattaaatacgggatcctggtagaccccatccaagttgtgtctctctttttaaaggatccttactcctggccagcgccctgccttgttatagcggcaaacgtgttcgcggtagcggcctttcaagtggaaaagcgtctggccgtaggtgcgcttaccgaacaggcagggctgctgctgcacgtggcaaatctggccaccatactgtgcttccctgctgctgtcgtgttattagtcgaaagcataacccccgtggggtctctcttggcactaatggctcataccattctcttcctaaagctcttttcttaccgtgatgtgaactcctggtgtagacgcgctcgagccaaagctgcatcggccggaaagaaggctagctctgccgcggccccacacactgttagctaccccgacaacctgacataccgagatctgtactactttctgtttgcaccaacgctgtgctatgagctgaattttcctcggagcccccggatccgtaagcgatttctgctgcggcggattttagagatgttgttcttcacacagctgcaggtgggcttaatccagcaatggatggtgcctaccatccagaatagcatgaagcccttcaaggatatggactactcgagaattatagagcgactattgaaattagcggtcccgaatcatctgatttggctgatcttcttttactggctcttccactcttgccttaatgcggtcgccgaactaatgcagtttggcgacagagagttttatcgggattggtggaactcagaaagcgtgacctatttctggcagaactggaacatccctgtgcataaatggtgcataaggcacttctacaaaccaatgctccggcggggtagctcaaagtggatggctcggaccggagtgttcctggccagcgcgtttttccacgaatatttagtgagcgtgccccttaggatgtttagactgtgggccttcacaggtatgatggcgcagatccccctggcatggttcgtgggcaggtttttccagggcaactacggcaatgccgccgtgtggctaagccttatcatcggccaacccattgcagtgttgatgtacgtacatgactactatgtgcttaactatgaagcgccagccgctgaggcttag

SEQ ID NO: 172393 - DNA, 1467 bp, Artificial Sequence
  derived and/or modified sequence
atgggtgatagaggctccagccggcgaaggcgcacgggttcacgtccttcctctcatggtggcggaggccctgcagccgcagaggaagaggtgcgcgatgccgcagcagggccagacgtcggggcagccggtgacgcccctgcgccagctcccaacaaagacggcgacgctggagtcggctcggggcactgggagctgaggtgccatagattgcaggacagcctgttctcatcagactccggtttttcgaattatcgcggtatcttgaattggtgcgtggtgatgcttatcctcagtaatgcaaggctctttctggaaaatctgatcaagtacggcatcctggtggatcctatacaagttgtgtctctgtttctgaaggacccatacagctggcctgccccttgtcttgtcatcgccgctaacgtattcgctgttgccgcattccaggttgagaagcggctggcggtgggagcactaacagagcaggcaggcctgctgcttcatgtggccaatctcgctactatcctctgcttccctgctgccgtggttctcttagtggagagcatcaccccggtggggtcactactggctctgatggcacacaccattctgttcctgaaacttttctcatatcgggatgtaaacagttggtgcaggcgggcacgcgcaaaggccgcttctgccggaaaaaaagcttctagtgccgctgctccacacaccgtgtcctacccagataacctgacctaccgggatctgtactactttctgttcgcccctactctctgttatgaattaaactttccaagatcaccacgaatcagaaaacgcttcctcctaagaagaatccttgagatgctttttttcacccaactccaggttgggttgatccagcagtggatggtccctacaattcagaacagcatgaagccctttaaagatatggactattcaagaataatagaaagactcctaaagctcgcagttccaaaccacctcatatggctcatctttttctactggctgtttcactcttgcctgaatgcagtagctgagctcatgcagtttggggaccgcgagttctacagagactggtggaatagtgaatccgttacctacttctggcagaactggaatattcccgttcataagtggtgtatccgtcacttctataaaccaatgctgagacggggttcgtctaaatggatggcacgcaccggcgtgtttttagctagtgcattctttcatgagtacctggtctcagtgccgcttaggatgttcagactctgggcctttaccggaatgatggcccagatccccctggcctggtttgtcggaagatttttccaagggaactacggcaatgccgcagtgtggttaagccttattattggtcagcctattgcagtgctaatgtatgtgcatgattactacgtccttaactatgaggctccggctgccgaagcatag

SEQ ID NO: 172394 - DNA, 1467 bp, Artificial Sequence
  derived and/or modified sequence
atgggcgacagaggcagcagcagaagaagaagaaccggcagcagacccagcagccacggcggcggcggccccgccgccgccgaggaggaggtgagagacgccgccgccggccccgacgtgggcgccgccggcgacgcccccgcccccgcccccaacaaggacggcgacgccggcgtgggcagcggccactgggagctgagatgccacagactgcaggacagcctgttcagcagcgacagcggcttcagcaactacagaggcatcctgaactggtgcgtggtgatgctgatcctgagcaacgccagactgttcctggagaacctgatcaagtacggcatcctggtggaccccatccaggtggtgagcctgttcctgaaggacccctacagctggcccgccccctgcctggtgatcgccgccaacgtgttcgccgtggccgccttccaggtggagaagagactggccgtgggcgccctgaccgagcaggccggcctgctgctgcacgtggccaacctggccaccatcctgtgcttccccgccgccgtggtgctgctggtggagagcatcacccccgtgggcagcctgctggccctgatggcccacaccatcctgttcctgaagctgttcagctacagagacgtgaacagctggtgcagaagagccagagccaaggccgccagcgccggcaagaaggccagcagcgccgccgccccccacaccgtgagctaccccgacaacctgacctacagagacctgtactacttcctgttcgcccccaccctgtgctacgagctgaacttccccagaagccccagaatcagaaagagattcctgctgagaagaatcctggagatgctgttcttcacccagctgcaggtgggcctgatccagcagtggatggtgcccaccatccagaacagcatgaagcccttcaaggacatggactacagcagaatcatcgagagactgctgaagctggccgtgcccaaccacctgatctggctgatcttcttctactggctgttccacagctgcctgaacgccgtggccgagctgatgcagttcggcgacagagagttctacagagactggtggaacagcgagagcgtgacctacttctggcagaactggaacatccccgtgcacaagtggtgcatcagacacttctacaagcccatgctgagaagaggcagcagcaagtggatggccagaaccggcgtgttcctggccagcgccttcttccacgagtacctggtgagcgtgcccctgagaatgttcagactgtgggccttcaccggcatgatggcccagatccccctggcctggttcgtgggcagattcttccagggcaactacggcaacgccgccgtgtggctgagcctgatcatcggccagcccatcgccgtgctgatgtacgtgcacgactactacgtgctgaactacgaggcccccgccgccgaggcctag

SEQ ID NO: 172395 - DNA, 2004 bp, Artificial Sequence
  derived and/or modified sequence
aggccccgcctcaggtcggccgcggactacaaatggacgagagaggcggccgtccattagttagcggctccggagcaacgcagccgttgtccttgaggccgacgggcctgacgcgggcgggttgaacgcgctggtgaggcggtcacccgggctacggcggccggcagggggcagtggcggccgttgtctagggcccggaggtggggccgcgcgcctcgggcgctacgaacccggcaggcccacgcttggctgcggccgggtgcgggctgaggccatgggcgaccgcggcagctcccggcgccggaggacagggtcgcggccctcgagccacggcggcggcgggcctgcggcggcggaagaggaggtgcgggacgccgctgcgggccccgacgtgggagccgcgggggacgcgccagccccggcccccaacaaggacggagacgccggcgtgggcagcggccactgggagctgaggtgccatcgcctgcaggattctttattcagctctgacagtggcttcagcaactaccgtggcatcctgaactggtgtgtggtgatgctgatcttgagcaatgcccggttatttctggagaacctcatcaagtatggcatcctggtggaccccatccaggtggtttctctgttcctgaaggatccctatagctggcccgccccatgcctggttattgcggccaatgtctttgctgtggctgcattccaggttgagaagcgcctggcggtgggtgccctgacggagcaggcgggactgctgctgcacgtggccaacctggccaccattctgtgtttcccagcggctgtggtcttactggttgagtctatcactccagtgggctccctgctggcgctgatggcgcacaccatcctcttcctcaagctcttctcctaccgcgacgtcaactcatggtgccgcagggccagggccaaggctgcctctgcagggaagaaggccagcagtgctgctgccccgcacaccgtgagctacccggacaatctgacctaccgcgatctctactacttcctcttcgcccccaccttgtgctacgagctcaactttccccgctctccccgcatccggaagcgctttctgctgcgacggatccttgagatgctgttcttcacccagctccaggtggggctgatccagcagtggatggtccccaccatccagaactccatgaagcccttcaaggacatggactactcacgcatcatcgagcgcctcctgaagctggcggtccccaatcacctcatctggctcatcttcttctactggctcttccactcctgcctgaatgccgtggctgagctcatgcagtttggagaccgggagttctaccgggactggtggaactccgagtctgtcacctacttctggcagaactggaacatccctgtgcacaagtggtgcatcagacacttctacaagcccatgcttcgacggggcagcagcaagtggatggccaggacaggggtgttcctggcctcggccttcttccacgagtacctggtgagcgtccctctgcgaatgttccgcctctgggcgttcacgggcatgatggctcagatcccactggcctggttcgtgggccgctttttccagggcaactatggcaacgcagctgtgtggctgtcgctcatcatcggacagccaatagccgtcctcatgtacgtccacgactactacgtgctcaactatgaggccccagcggcagaggcctgagctgcacctgagggcctggcttctcactgccacctcacacccgctgccagagcccacctctcctcctaggcctcgagtgctggggatgggcctggctgcacagcatcctcctctggtcccagggaggcctctctgcccctatggggctctgtcctgcacccctcagggatggcgacagcaggccagacacagtctgatgccagctgggagtcttgctgaccctgccccgggtccgagggtgtcaataaagtgctgtccagtga

SEQ ID NO: 172396 - protein, 228 aa, Artificial Sequence
  derived and/or modified sequence
MAAPPQPVTHLIFDMDGLLLDTERLYSVVFQEICNRYDKKYSWDVKSLVMGKKALEAAQIIIDVLQLPMSKEELVEESQTKLKEVFPTAALMPGAEKLIIHLRKHGIPFALATSSGSASFDMKTSRHKEFFSLFSHIVLGDDPEVQHGKPDPDIFLACAKRFSPPPAMEKCLVFEDAPNGVEAALAAGMQVVMVPDGNLSRDLTTKATLVLNSLQDFQPELFGLPSYE

SEQ ID NO: 172397 - DNA, 687 bp, Artificial Sequence
  derived and/or modified sequence
atggccgcccccccccagcccgtgacccacctgatcttcgacatggacggcctgctgctggacaccgagagactgtacagcgtggtgttccaggagatctgcaacagatacgacaagaagtacagctgggacgtgaagagcctggtgatgggcaagaaggccctggaggccgcccagatcatcatcgacgtgctgcagctgcccatgagcaaggaggagctggtggaggagagccagaccaagctgaaggaggtgttccccaccgccgccctgatgcccggcgccgagaagctgatcatccacctgagaaagcacggcatccccttcgccctggccaccagcagcggcagcgccagcttcgacatgaagaccagcagacacaaggagttcttcagcctgttcagccacatcgtgctgggcgacgaccccgaggtgcagcacggcaagcccgaccccgacatcttcctggcctgcgccaagagattcagccccccccccgccatggagaagtgcctggtgttcgaggacgcccccaacggcgtggaggccgccctggccgccggcatgcaggtggtgatggtgcccgacggcaacctgagcagagacctgaccaccaaggccaccctggtgctgaacagcctgcaggacttccagcccgagctgttcggcctgcccagctacgagtag

SEQ ID NO: 172398 - DNA, 687 bp, Artificial Sequence
  derived and/or modified sequence
atggcagcacctccacagcccgtgacacacctcatttttgatatggatgggttgctgctcgatacagaaagactgtattccgtagtgttccaggaaatctgtaaccggtatgacaagaagtactcatgggatgtcaagtcactcgtcatgggtaaaaaggctcttgaggccgcccaaatcatcattgacgtgctgcagctgccaatgagtaaagaggagctggttgaagaatcccagactaagctgaaggaagtatttcccacagctgccctcatgcccggcgcagagaaactgataatccacctgagaaaacacggcatcccttttgcgttggccacctcatcaggttccgcctcgtttgatatgaaaacttcccgtcataaggaatttttctcgctcttcagccacatcgtcctgggcgacgaccccgaggttcagcatgggaagcccgatcccgatattttcctggcttgcgctaagcggttcagtccccctcctgctatggaaaagtgcctggtctttgaagatgcaccaaacggcgttgaggccgcactcgccgccgggatgcaggtagttatggttccggacgggaatctgtctcgcgatcttactacaaaggctactcttgtgctgaattcgctgcaagactttcagccggagctgttcggactgccatcgtatgaatag

SEQ ID NO: 172399 - DNA, 687 bp, Artificial Sequence
  derived and/or modified sequence
atggccgccccaccccagcctgtgacccacctgatctttgacatggatggcctgctgctggacacagagcggctgtacagcgtggtgttccaggagatctgcaacagatatgacaagaagtacagctgggatgtgaagagcctggtgatgggcaagaaggccctggaggccgcccagatcatcattgatgtgctgcagctgcccatgagcaaggaggagctggtggaggagagccagaccaagctgaaggaggtgttccccacagctgccctgatgcctggagctgagaagctgatcatccacctgaggaagcacggcatcccctttgccctggccaccagcagcggcagcgccagctttgacatgaagaccagccgccacaaggagttcttcagcctcttcagccacatcgtgctgggagatgatcctgaggtgcagcacggcaagccagaccctgacatcttcctggcctgtgccaagcgcttcagccccccaccagccatggagaagtgcctggtgtttgaagatgccccaaatggagtggaggccgccctggccgccggcatgcaggtggtgatggtgcctgatggcaacctgagccgggacctgaccaccaaggccaccctggtgctgaacagcctgcaggacttccagcctgagctgtttggcctgcccagctatgaatag

SEQ ID NO: 172400 - DNA, 2140 bp, Artificial Sequence
  derived and/or modified sequence
ctcagtgcgcgtgcgcggggcgggcgggtgcgcgcgcacttcctcctcgcccccacccagacccagaaggcgccaccatggcggcgcccccgcagcccgtcacccacctcatctttgacatggacggacttcttctggatactgaacggctgtattcagtggtgtttcaagaaatatgtaatcgctatgacaagaaatacagctgggatgtaaagtccctggttatgggtaagaaggcattagaggcggcacagattataatagacgtcttgcagctcccgatgtccaaagaggagctggtggaagaaagccaaacgaagttaaaggaagtgttccccacggctgcgctcatgccaggggcggagaaactcatcatccacctgcggaaacatggcatcccctttgcactggccaccagctcggggtccgcgtcgttcgatatgaagacaagccgccacaaggagttcttcagcttgttttcccacattgtgctgggagatgaccccgaagtgcagcatggcaagccagacccggacatcttcctagcttgtgccaagaggttctctccccctcctgctatggagaagtgccttgtctttgaagatgctcccaatggggtggaggcggccctggcagctgggatgcaggtggtcatggttcctgacggaaacttgagccgagatctgacaacaaaggccaccctggtgctgaattccctgcaggacttccagcccgagctgtttggtttgccctcctatgagtgagagggagggcctcagtcttccgcccccagcccactctcatggtccacactgctgggggaaagggaaaggaaatcagcaactcttcaatcccaacctgcgctgtgattttagcctcctgagattggagtttccatcccatgttggtttgtcccagtctaacgtgttgataaaatgtgacttgacggttgagacaaaaaatacagtagagacagaaacgaagcccagaacaaagatgaaacttgaattaccatctcagaagtcaagctgatggagtatgtgataaagtgaatgtacatgtatatacacacacacctccatatatacatgtgtgtatcagtttggtaatatgcaggtaggcattacatgcatatgtatgtagacatatgcatgcatgtatatgtaaaatatatacttttccaagacaaaatggaacatcacttctctcttctagtttttctgaacactggctgggaaatgtaaactgtgtatgcatataagtatatgctttatgtatgcatatgtatgtagatatgtttatatctatcgtctgcatcactctcctcagtgttgatgtcaacatgcaatgacaactgataaagcgagatggtagttctgcctggtttgcagtctgagtgggaaagtcctgtttttgatgagcactccttgttagctaacatttaaattctttttgtgacctcagaatgtctctggatctttcctcattgactgactctgtgccacgtcatccatagtttattgttagtatgaacacaactgtaacatttacctggtatctacatccttacctgcattggaaaatgtttgctacctcacaacaaccatttgcctcctttaagaacactgatgggctgcactttttggatagaaatagaatttgatttcagaatgtatgcttggtgagtctcagtgcccaggaacacttttggaataatttatcagacattgaacttctgtgattaatcgcttttatagatttactcagtctttaaaattcgtctctgatttgccagagaaaaacggtggtagccatggaaatcgggagtgaaggagcactgcttcattgtggctcagcccttcctaggggcctctgccctttgatgtccttgagctactcttcagctctggaagttgtggacaaaccgtaggaatgtatgtgtgcgtgtggtggagtgattgtctgtgaatgacaggccctggctattgattgatgttgcatcaatttagcaaattcatttcctcattcttgatggcctgaatatatgtctgcacttttaatgctcctcttaaccagttgtaacatcttaccatttccctaacaaattgaattagtttaataaaatcttttgacacatgtt

SEQ ID NO: 172401 - DNA, 687 bp, Artificial Sequence
  derived and/or modified sequence
atggccgcccccccccagcccgtgacccacctgatcttcgacatggacggcctcctactagacacagagcgactgtactcggtcgtctttcaagagatttgtaatcgctacgataagaagtactcttgggacgtgaaatctctggtgatgggcaagaaagctctcgaggcggcacagatcattatcgatgttctccagttgcctatgtcgaaggaagaactggtggaagagtctcagacaaaactgaaggaggtcttcccaacggcagcactcatgcccggagctgagaaactgattattcacctgagaaaacacgggatcccctttgccttagcaaccagctcaggtagcgcctctttcgacatgaagacctctcgccataaagagttcttcagtctcttcagtcatatcgtgttgggcgatgaccccgaagtgcagcacggcaagcccgacccagacatctttctcgcgtgcgctaagaggttctccccgccacccgcgatggagaaatgtctggtgttcgaggatgcacccaatggggtggaggccgcactcgccgccggcatgcaggtagtgatggttcccgacggaaacctcagcagggatttaactacaaaggccacgctggtgctgaatagcctgcaggactttcagccagagttatttggacttccaagctatgagtag

SEQ ID NO: 172402 - DNA, 687 bp, Artificial Sequence
  derived and/or modified sequence
atggccgctcctccacagcccgtgacacatctaatatttgacatggatggcctgctgctagatacagagcgcctgtactcggtggtgtttcaggagatttgtaaccgctatgataaaaagtattcctgggacgtgaaatcactggttatgggtaagaaggcccttgaagcagctcagatcatcattgatgtgttacagctgccaatgagcaaggaggaactcgtggaggagtcacagacgaaattgaaagaggtgttccctactgctgcactaatgcccggagcggaaaaactgatcatacacctgagaaagcacgggataccctttgcccttgccaccagcagcggatcagcctcatttgatatgaaaacttcacgccataaagagttcttttcactgtttagccatatcgttttaggcgatgatccagaggttcaacacggcaaacccgatcctgacatattcctggcatgcgctaaaagattttctccgcctcccgctatggagaaatgcctcgtctttgaagatgccccaaatggtgttgaagccgcactagctgccggtatgcaggtggtgatggtgcctgacggcaacttgtcaagggacttaaccactaaagccaccctagtcctgaatagcctccaagactttcaacctgagctcttcggcctgccatcctacgagtag

SEQ ID NO: 172403 - protein, 640 aa, Artificial Sequence
  derived and/or modified sequence
MAAGGTGGLREEQRYGLSCGRLGQDNITVLHVKLTETAIRALETYQSHKNLIPFRPSIQFQGLHGLVKIPKNDPLNEVHNFNFYLSNVGKDNPQGSFDCIQQTFSSSGASQLNCLGFIQDKITVCATNDSYQMTRERMTQAEEESRNRSTKVIKPGGPYVGKRVQIRKAPQAVSDTVPERKRSTPMNPANTIRKTHSSSTISQRPYRDRVIHLLALKAYKKPELLARLQKDGVNQKDKNSLGAILQQVANLNSKDLSYTLKDYVFKELQRDWPGYSEIDRRSLESVLSRKLNPSQNAAGTSRSESPVCSSRDAVSSPQKRLLDSEFIDPLMNKKARISHLTNRVPPTLNGHLNPTSEKSAAGLPLPPAAAAIPTPPPLPSTYLPISHPPQIVNSNSNSPSTPEGRGTQDLPVDSFSQNDSIYEDQQDKYTSRTSLETLPPGSVLLKCPKPMEENHSMSHKKSKKKSKKHKEKDQIKKHDIETIEEKEEDLKREEEIAKLNNSSPNSSGGVKEDCTASMEPSAIELPDYLIKYIAIVSYEQRQNYKDDFNAEYDEYRALHARMETVARRFIKLDAQRKRLSPGSKEYQNVHEEVLQEYQKIKQSSPNYHEEKYRCEYLHNKLAHIKRLIGEFDQQQAESWS

SEQ ID NO: 172404 - DNA, 1923 bp, Artificial Sequence
  derived and/or modified sequence
atggccgcaggtggtacgggcggcctgcgggaggaacagcgatacggcctttcgtgcggcagactgggccaggacaatatcactgtattacatgtcaaactcacagagacagctatccgtgcactcgagacataccagagccacaaaaacttaattccattcaggccctccatccaattccagggactccatgggttggtcaaaatccctaagaatgatcccttgaacgaagtgcataacttcaacttttacttgtcgaatgttgggaaggacaacccacaagggtcattcgactgcatccaacaaacattcagtagcagcggggcatcccagctgaattgtctgggattcatccaggacaaaattaccgtatgcgccacaaacgattcataccagatgactcgggaaagaatgacacaggccgaggaagagagcaggaacaggtcaaccaaagtcattaaacccggtggaccctatgtggggaaacgtgtccagatacgcaaagcaccacaggcagtctcagatacggttcccgagaggaaaagatcgacaccaatgaaccccgctaataccatcaggaaaacccacagttcttcaactatttcacagcgcccctacagagatcgcgtgatccacctgctggccttgaaggcctacaagaagccagaactcctcgccaggctacagaaagatggagtgaatcagaaggacaagaatagcctgggcgctatactgcaacaggtagccaatctgaatagcaaggacttgtcctacacattgaaggactacgtgttcaaagagctgcaaagagattggcccggatactctgagatagatagaaggagcctcgaaagtgtgctgtcacggaagctaaatccaagtcaaaatgccgccgggacaagtagaagcgaaagtcccgtgtgttcttcacgagatgcggtctccagtcctcagaaaagactgctcgattccgagtttatagatcccctgatgaacaagaaggctaggattagccacctgactaatagggtgcccccgactcttaacggtcacttaaatccgacctcagaaaaatccgccgcagggctcccactgcccccagctgccgcggccatccccacaccgcctccacttcccagtacatacctccccataagccaccctcctcaaatagtgaattcaaactctaatagtccttcaactcctgagggccgcggtacccaagacctccccgtagattcatttagccagaacgactctatttacgaagatcagcaggataagtataccagcagaacctcgctagaaaccctgccgcccggcagcgtactgctgaaatgcccaaaacctatggaggagaatcattccatgagccataaaaagtccaagaagaaatccaagaagcacaaagaaaaagatcagatcaaaaaacatgatatcgagactattgaggaaaaagaagaggacctaaagcgtgaggaggaaattgcaaagctgaataattcatctcccaattcatctggcggagtgaaagaggactgtactgcatcgatggaaccttccgctatcgagctgccggactaccttattaagtatatcgctattgtgagttatgaacagagacagaattataaggatgatttcaatgctgagtacgacgaatacagagctctgcatgcccgaatggaaaccgtggccagacggttcatcaaactcgacgcccagcggaagaggctgtcaccagggtccaaagagtaccagaatgtacacgaggaggtgttacaggaataccagaagattaagcaaagctcccccaactaccatgaggagaagtaccgctgcgaataccttcacaacaagctcgcccacataaaacggctgatcggcgaatttgatcagcagcaggctgagagctggtcttag

SEQ ID NO: 172405 - DNA, 1923 bp, Artificial Sequence
  derived and/or modified sequence
atggctgctgggggcaccggcggcctgcgggaggagcagagatatggcctgagctgtggccgcctgggccaggacaacatcaccgtgctgcacgtgaagctgacagaaacagccatccgggccctggagacctaccagagccacaagaacctgatccccttccggcccagcatccagttccagggcctgcacggcctggtgaagatccccaagaatgaccccctgaatgaggtgcacaacttcaacttctacctgagcaatgtgggcaaggacaacccccagggcagctttgactgcatccagcagaccttcagcagcagcggggccagccagctgaactgcctgggcttcatccaggacaagatcaccgtgtgtgccaccaatgacagctaccagatgacccgggagaggatgacccaggccgaggaggagagcaggaacagaagcaccaaggtgatcaagccaggcggcccctacgtgggcaagagggtgcagatcaggaaggccccccaggccgtgtctgacacagtgcctgagaggaagaggagcacccccatgaacccagccaacaccatcaggaagacccacagcagcagcaccatcagccagaggccctacagagacagagtcatccacctgctggccctgaaggcctacaagaagccagagctgctggcccggctgcagaaggatggagtgaaccagaaggacaagaacagcctgggcgccatcctgcagcaggtggccaacctgaacagcaaggacctgagctacaccctgaaggactatgtgttcaaggagctgcagagggactggccaggctacagcgagattgaccggcgcagcctggagagcgtgctgagcaggaagctgaaccccagccagaatgctgctggcaccagccgctctgagagccctgtgtgcagcagcagagatgctgtgagcagcccccagaagaggctgctggacagcgagttcatcgaccccctgatgaacaagaaggcccgcatcagccacctgaccaacagagtgccccccaccctgaatggccacctgaaccccaccagcgagaagtctgctgctggcctgcccctgcccccagctgctgctgccatccccaccccaccacccctgcccagcacctacctgcccatcagccaccccccccagatcgtgaacagcaacagcaacagccccagcaccccagagggccggggcacccaggacctgcctgtggacagcttcagccagaatgacagcatctatgaggaccagcaggacaagtacaccagcaggaccagcctggagaccctgcccccaggctctgtgctgctgaagtgccccaagcccatggaggagaaccacagcatgagccacaagaagagcaagaagaagagcaagaagcacaaggagaaggaccagatcaagaagcatgacatcgagaccatcgaggagaaggaggaggacctgaagcgggaggaggagatcgccaagctgaacaacagcagccccaacagcagtggaggagtgaaggaggactgcacagcctccatggagcccagcgccatcgagctgcctgactacctgatcaagtacatcgccatcgtgtcctatgagcagaggcagaactacaaggatgacttcaatgcagaatatgatgagtaccgggccctgcacgccaggatggagaccgtggcccggcgcttcatcaagctggatgcccagaggaagaggctgagccctggcagcaaggagtaccagaatgtgcatgaggaggtgctgcaggagtaccagaagatcaagcagagcagccccaactaccacgaggagaagtaccgctgtgagtacctgcacaacaagctggcccacatcaagaggctcatcggggagtttgaccagcagcaggccgagagctggagctag

SEQ ID NO: 172406 - DNA, 1923 bp, Artificial Sequence
  derived and/or modified sequence
atggccgccggcggcaccggcggcctgcgggaggagcagcggtacggcctgagttgtggtaggctaggccaagacaacattaccgttctgcacgtgaagctgacagagaccgccataagagccctcgagacctaccagtcccataagaatctgatcccatttcgcccgtctatccaattccagggtctgcacggcctggtgaaaatccccaagaacgacccacttaatgaggtgcataactttaatttctatttatccaatgtagggaaggataaccctcaaggtagttttgattgcattcaacagacgttttcttcatctggagccagtcagttgaattgcttgggtttcattcaagataagatcactgtgtgtgccacaaacgatagctatcagatgacccgggaacgtatgacccaagcagaggaagagtctcgcaacagatcgaccaaggtgatcaagccaggagggccgtacgtgggcaagagggtgcagatccggaaagccccccaggcagtaagtgatacagtgcccgagcgcaaaagatccacacccatgaacccagccaacactatcagaaaaacccatagttcttctaccataagccagcgaccttaccgggaccgcgttatccatctcctcgcgctgaaagcttataagaagccagaactcctggctcgcctgcagaaggatggcgttaatcaaaaagacaagaattctttgggcgccattctacagcaagtggcgaatctgaatagcaaagatctttcttatactttaaaggattatgttttcaaagagctgcagcgcgattggccaggatatagcgagatcgacaggagatccctggaatccgtgttatctaggaaactaaacccctcccagaatgctgctgggacctctagatctgagagcccggtgtgctcttctcgggacgccgtgtcctcaccccaaaagaggctgttggatagtgaattcattgatcctctgatgaacaagaaagcccgcattagccacctgaccaatcgggttcctccaaccctaaacgggcatcttaatcccaccagcgagaaaagcgcggccggcctcccccttcccccagctgccgccgcgatacctaccccccctcctctcccctctacctatctgccaatttcacatccaccccagatcgtcaactctaatagcaactcaccttctactcccgaagggcgaggcactcaggatctgccagtagactcgtttagtcagaatgatagcatttatgaagatcaacaggataaatacacatctaggacatccctcgaaaccctccctcccgggtctgtcttgctgaagtgtcctaagcccatggaggaaaaccatagcatgagtcacaagaagtctaaaaaaaagtccaagaaacacaaggaaaaagaccaaattaagaagcatgacatcgaaaccattgaggaaaaggaagaagacctgaaacgggaggaggagattgccaaactgaacaattcttcaccaaatagttctggaggggtgaaagaggattgcacggcctccatggaaccctccgccattgagctgcccgattacctgattaagtatatcgccattgtgagttacgaacagcgccagaattacaaggacgacttcaacgccgagtatgacgagtatagagccttgcacgcccggatggagactgtggcacgcaggtttataaaactggacgcccagcggaagcggctgagtccagggtctaaagagtaccagaacgtgcacgaggaagtgctgcaagaataccagaagatcaaacaatcctcccctaattaccacgaggagaaatacaggtgcgagtatctgcataacaagctggctcatatcaagcggctaataggagagttcgatcagcaacaggcagagtcatggagctag

SEQ ID NO: 172407 - DNA, 1923 bp, Artificial Sequence
  derived and/or modified sequence
atggcagctggcggtacaggcggtcttcgcgaagaacagcggtatggcctgagctgcggtcgattgggccaggataacattaccgtactgcacgtaaagctcactgaaacagccatccgcgcactcgaaacttatcagtcgcataaaaacttgatcccatttcgaccctccatacaatttcaggggcttcatggcctcgtcaaaattccaaagaacgatcctcttaacgaggttcataactttaatttctatctgagcaacgtgggcaaggacaacccccaggggtcattcgattgtattcagcagacattcagctctagcggagcctctcaacttaactgtttgggctttatccaggataagatcacagtgtgtgccactaacgatagctatcagatgacacgggaacggatgacccaggctgaggaggagagccgcaaccgctccacaaaagtcattaaaccagggggtccttacgtcgggaagcgcgtgcaaatcaggaaagctccacaagcggtatccgatacggtgcctgaacggaagagatccacacccatgaatcccgctaacacgattcgaaagacccattcttcatccaccataagtcagcggccatatcgagatcgcgtgatccacctcctcgctctgaaggcatacaagaagccagagctgctcgctcgcctgcagaaggatggagtcaaccagaaagacaagaattccctgggcgctattctgcagcaggtggccaacctgaatagtaaggatctgtcgtacaccctaaaagattatgtctttaaggaactgcagcgcgattggccgggatatagcgagattgataggaggtctctggagtccgtgctgtcccgtaaactcaatcctagccagaacgccgcaggcaccagccgcagtgaatcaccagtctgtagtagcagagacgccgtttccagtccacagaaaaggttgctcgactccgagtttatcgaccctctgatgaataagaaggccagaatatcccatctgacaaacagggtaccacccaccctcaatgggcatcttaacccaacctctgagaaatcagcggctggccttcccttgccacctgcagccgctgccatccccacacccccacccttaccaagcacatatctgccgatttctcacccgccacagattgtgaactcaaattctaactctccctctaccccggaggggaggggaacccaagacttgcccgtggattctttcagccagaacgatagtatttatgaagaccagcaagacaaatataccagcaggaccagccttgaaacattgcccccaggaagtgtgttgctcaaatgccctaagcccatggaggagaaccacagtatgagccacaaaaagtcaaagaaaaagtccaagaaacacaaggaaaaagatcagatcaaaaagcacgacatcgagacaattgaggagaaggaagaggatctgaagcgagaggaagagatcgccaaacttaacaacagtagtcccaattcaagtggaggcgtgaaggaagactgcacggcaagtatggaaccatctgctattgagctcccagactacctcataaagtatattgccatcgtttcgtatgagcagagacagaattataaggacgacttcaatgcggaatacgacgagtaccgagctttgcacgcaaggatggagaccgtcgccaggcgctttatcaaactggatgcccagcgtaaaagattgagtccaggttccaaagagtaccagaatgtgcacgaggaagttctgcaggaataccaaaagataaagcagagtagtcccaactatcacgaagaaaaatatcgctgcgagtacctccacaataaactggcccatattaaacgcttaattggtgaatttgaccagcagcaagctgagagttggtcctag

SEQ ID NO: 172408 - DNA, 1923 bp, Artificial Sequence
  derived and/or modified sequence
atggccgccggcggcaccggcggcctgagagaggagcagagatacggcctgagctgcggcagactgggccaggacaacatcaccgtgctgcacgtgaagctgaccgagaccgccatcagagccctggagacctaccagagccacaagaacctgatccccttcagacccagcatccagttccagggcctgcacggcctggtgaagatccccaagaacgaccccctgaacgaggtgcacaacttcaacttctacctgagcaacgtgggcaaggacaacccccagggcagcttcgactgcatccagcagaccttcagcagcagcggcgccagccagctgaactgcctgggcttcatccaggacaagatcaccgtgtgcgccaccaacgacagctaccagatgaccagagagagaatgacccaggccgaggaggagagcagaaacagaagcaccaaggtgatcaagcccggcggcccctacgtgggcaagagagtgcagatcagaaaggccccccaggccgtgagcgacaccgtgcccgagagaaagagaagcacccccatgaaccccgccaacaccatcagaaagacccacagcagcagcaccatcagccagagaccctacagagacagagtgatccacctgctggccctgaaggcctacaagaagcccgagctgctggccagactgcagaaggacggcgtgaaccagaaggacaagaacagcctgggcgccatcctgcagcaggtggccaacctgaacagcaaggacctgagctacaccctgaaggactacgtgttcaaggagctgcagagagactggcccggctacagcgagatcgacagaagaagcctggagagcgtgctgagcagaaagctgaaccccagccagaacgccgccggcaccagcagaagcgagagccccgtgtgcagcagcagagacgccgtgagcagcccccagaagagactgctggacagcgagttcatcgaccccctgatgaacaagaaggccagaatcagccacctgaccaacagagtgccccccaccctgaacggccacctgaaccccaccagcgagaagagcgccgccggcctgcccctgccccccgccgccgccgccatccccacccccccccccctgcccagcacctacctgcccatcagccaccccccccagatcgtgaacagcaacagcaacagccccagcacccccgagggcagaggcacccaggacctgcccgtggacagcttcagccagaacgacagcatctacgaggaccagcaggacaagtacaccagcagaaccagcctggagaccctgccccccggcagcgtgctgctgaagtgccccaagcccatggaggagaaccacagcatgagccacaagaagagcaagaagaagagcaagaagcacaaggagaaggaccagatcaagaagcacgacatcgagaccatcgaggagaaggaggaggacctgaagagagaggaggagatcgccaagctgaacaacagcagccccaacagcagcggcggcgtgaaggaggactgcaccgccagcatggagcccagcgccatcgagctgcccgactacctgatcaagtacatcgccatcgtgagctacgagcagagacagaactacaaggacgacttcaacgccgagtacgacgagtacagagccctgcacgccagaatggagaccgtggccagaagattcatcaagctggacgcccagagaaagagactgagccccggcagcaaggagtaccagaacgtgcacgaggaggtgctgcaggagtaccagaagatcaagcagagcagccccaactaccacgaggagaagtacagatgcgagtacctgcacaacaagctggcccacatcaagagactgatcggcgagttcgaccagcagcaggccgagagctggagctag

SEQ ID NO: 172409 - DNA, 6046 bp, Artificial Sequence
  derived and/or modified sequence
taagttggcgcgtcacctagacgtcagcctcttacctctcggacgtcccgtcccaggagcaaaactctagtgactttgggcccgcccccgtgagagtggagggcggccgatgagggcggttctgaagggaacaagaccaatgagacgagcccggggcggggcgcggggccggagggtggggcgggtggcggcggtggcagtccgaggtctggctccgcgcagtatatgacagtacgtcagcagcgggatggccctagcagtggcggcggctgcagaagcccaagcagccgcggccgcagtggaggctagagccggagcggcggcggcggcggcaccccggggagtttaagatggcggcgggggggacagggggcctgcgggaggagcagcgctatgggctgtcgtgcggacggctggggcaggacaacatcaccgtactgcatgtgaagctcaccgagacggcgatccgggcgctcgagacttaccagagccacaagaatttaattccttttcgaccttcaatccagttccaaggactccacgggcttgtcaaaattcccaaaaatgatcccctcaatgaagttcataactttaacttttatttgtcaaatgtgggcaaagacaaccctcagggcagctttgactgcatccagcaaacattctccagctctggagcctcccagctcaattgcctgggatttatacaagataaaattacagtgtgtgcaacaaacgactcgtatcagatgacacgagaaagaatgacccaggcagaggaggaatcccgcaaccgaagcacaaaagttatcaaacccggtggaccatatgtagggaaaagagtgcaaattcggaaagcacctcaagctgtttcagatacagttcctgagaggaaaaggtcaacccccatgaaccctgcaaatacaattcgaaagacacatagcagcagcaccatctctcagaggccatacagggacagggtgattcacttactggccctgaaggcctacaagaaaccggagctacttgctagactccagaaagatggtgtcaatcaaaaagacaagaactccctgggagcaattctgcaacaggtagccaatctgaattctaaggacctctcatataccttaaaggattatgtttttaaagagcttcaaagagactggcctggatacagtgaaatagacagacggtcattggagtcagtgctctctagaaaactaaatccgtctcagaatgctgcaggcaccagccgttcagaatctcctgtatgttctagtagagacgctgtatcttctcctcagaaacggcttttggattcagagtttattgatcctttaatgaataaaaaagcccgaatatctcacctgacgaacagagtaccaccaacactaaatggtcatttgaatcccaccagtgaaaaatctgctgcaggcctcccgctgccccctgcggctgctgccatccctacccctccaccgctgccttcaacctatctgcccatctcacatcctcctcagattgtaaattctaactccaactcccctagcactccagaaggccgggggactcaagacctacctgttgacagttttagtcaaaacgatagtatctatgaggaccagcaagacaaatatacctctaggacttctctggaaaccttaccccctggttccgttctactaaagtgtccaaagcctatggaagaaaaccattcaatgtctcacaaaaagtccaaaaagaagtctaaaaaacataaggaaaaggaccaaataaaaaagcacgacattgagactattgaggaaaaggaggaagatcttaagagagaagaggaaattgccaagctaaataactccagtccaaattccagtggaggagttaaagaggattgcactgcctccatggaaccttcagcaattgaactcccagattatttgataaaatatatcgctatcgtctcctatgagcaacgccagaattataaggatgacttcaatgcagagtatgatgagtacagagctttgcatgccaggatggagactgtagctagaagatttatcaaactagatgcacaaagaaagcgcctttctccaggctcaaaagagtatcagaatgttcatgaagaagtcttacaagaatatcagaagataaagcagtctagtcccaattaccatgaagaaaaatacagatgtgaatatcttcataacaagctggctcacatcaaaaggctaataggtgaatttgaccaacagcaagcagagtcatggtcctagaactctgcttggaccagaagatgtgaataaacttaagcttatttatttaaaattccaaatgagttgctctagattctaaaaaggtgaaactttggctgttgaaagtttcagtattagtaaacttgagttactttttcttttccattttactttgcttccctgcatttcgaagctgctctttctggtcctccccaccaccccacccccaagacttgtgtttgttaatagaaataatttttttaggtattggggatccattgtctatatttcaaatcagttttttttcctcaaaaacttgtgtttgttattagaaatgattttttagatattggggatccagtgtccacacttaaaagttgtatgtgtttaaaaaacaacaacagtaatgtgcaaggtgaaatgcttttggataaacgtaagcctattttctgacgtttcttaatgcaaactctttgccttaaatggtagaatatttagaaatttgcacaaaattaaaaaaataaacattgtcttggagggttaaaaaatagaaaggtgtatgtgtatagattcacatacacatatgtatatacaggctgacttgatctagaacattaaatccgccctgcaagttaaccccccattgcaatggttgccttaaggtgtttgctagttgtgtacatagtgtggttaatcattagctacactgcttcccacttgattagagcaatgggaagcatactgtggcctaccagcatctggaagtgtgtgctcgatctgtatgtgtgcagaggtggtgtggatgtgagcgtgcatgaaggaaaaaaagctgctactcctagtaggccaaacgctcaggttaaacaactgacgagtgttactgtagggtgtttttttgtttttttgttttttttcttctatcaaattgctacttttgttgtggaagacaaaagcatttccatttcaacgagtttgtcagctttattaatgttgggcaaaaattgatatgtcatgaaaatgaaacagatctatagttttgggacaaaattataaaatgaaatgtgtaggtaacctatttatatactgctataaagtattttttgaagagagatatgcaaagaagctattacctacataagaggtatatttaaagattttttttttcatcctggtgccaggaatataaaaaagagtggatatatttaaccataacatactgtgattcatcaaacagcacaaactttcatttcatggagtttatctgttgacattgatttaaactgtcacttgttttatcatgtgggaacataagttatgtggtcaaaaatataaggattttgaattaatgttgattcaagttgtattgtcttattgtattgtcttttcaaagtgctgccagttgaaaagggaagcattatgtttacaaatctgttttgaaatgtttgccaaaattttggtagtgtctttaataaagatgtttgtctccagcatccagaaaaataaatgaataactttgttgtgtatcactgtaaaccagaaaaatgttggttatctagaaaacttgagagagcatgtagattaacttttctctttggagttctaaaacattaactggaaagattagataatatactaaatgtatacagaagtatacagactatacaaagactgaaacaagtcccttttgcactacaactctataacattaccgcagaaattttggttctatgtagcatggacctcctaaggaattctgtttcttttagcattgagatccctggtgctctttttttacctcagaattggtacaatcattattaaacgttaatttatttcaaactttttaattgaaaaaaggaaagggaaacttaattggggataaattcaggcatcatattattatgatagagtctcctgagtggttcgtctataggtaatgaactcattggtgttatttcttggacatcttggccttttaatcaaagactgtgtgctgctatttgctatgagcaaggtttctcaaaagcaaaaggtgcttggaccatttggatcacctgagttagaatctctaggtatagggcccaagtatctgcattttcacaggtttcttgtaggtgactttctgcaagctaaagtatgagaaccattggcttggatgtagttctaaacttttaggtctgtaaatcttgaaatcttgaactgaaggtcaactattggcttttttttttttttaatgtccatcatgtcagcaggtgcaaatcacttttcccctttgcatgatctgaggcacctcctcagttgtttcactgccaactcttgtttcagaacctgtttacaaacaagccttccagttggtgaatggttagccattggagctcctaccctgtacatcagcacatcttctggtttacaagttgggtaacaatgaaagctggagatgctaaatggaaatccagcattgcatacccttagacctgatcacataccagtaaaagccttaatttagatgttagttgtatgtgttggacagatccttgcaaaagtgtgtctgtctattagttgtaaatttgaaaattataaatctctgaatctgctactatccaagtttcatcccttttgaagatgaggcatgagcctattaaaatatttataatcatttttcgtcccctactgcaagacttttagattcttacaaatgattactacaggaatagtggccacttaatgtcagttactccggtggaagaatttatctagttttttttcttttcttttttggaaggatggtgtgaaaaatagcaagattagagaatgagttgtatagttttttctatcacatttcatctaaaatgatttgaaggacttttgaagatttttaccaacatccttaaatcaactccaggttggatgaacaactgatttaaaacaaactaagagaacattaactagatgtgggctttttaaaatatataggtattgcatttcctaccttgttatttattccactttgaatactttagagggcttaactttcaactctttaaggtagtaatggatagttttatacttgttctcacaaaattgttatggtcagtttatatcattgctccatgcattgattataaaaattcagtattaattttttctgatcttataagctttataggagttttcttttctcttataaagtgtttcaccttatgtaaaacaaatgcctgcttgcatattggaagatgttgaaattagttttagacaaaagtggtccatcaattcagacactctgcttggatgccttacccttttcattagtgcattctttgcttctgaaacttggcagaaactcgttagccagtccactgcctttctgacaatgtgtggagtcacgtatgcttggtatatgcctttactacttttaaagttctacagtttattacttgcccaagtgttactaaatccttttcttatgtgtactggatggagaaaaaattatagccagcactttgagaggaaagttttcagaaacaatattaactggcactactaactgaaggccacaggagatgctatcaatgttatttgtaatctgaagattgaacaaggctgtgaggctcatttcaaactattttgaggtgttaaaatatatatatgctgtttctcagctgttccactcaaaccgtgttaggactctcaaaggtaaaatgtcacaggggcttttcagttgttacagagctcagcagctgtggttgcccctgttctacaccaatttcagttcaataaaaatgttaactttgcaa

SEQ ID NO: 172410 - protein, 1151 aa, Artificial Sequence
  derived and/or modified sequence
MSRRKQSKPRQIKRPLEDAIEDEEEECPSEETDIISKGDFPLEESFSTEFGPENLSCEEVEYFCNKGDDEGIQETAESDGDTQSEKPGQPGVETDDWDGPGELEVFQKDGERKIQSRQQLPVGTTWGPFPGKMDLNNNSLKTKAQVPMVLTAGPKWLLDVTWQGVEDNKNNCIVYSKGGQLWCTTTKAISEGEELIAFVVDFDSRLQAASQMTLTEGMYPARLLDSIQLLPQQAAMASILPTAIVNKDIFPCKSCGIWYRSERNLQAHLMYYCSGRQREAAPVSEENEDSAHQISSLCPFPQCTKSFSNARALEMHLNSHSGVKMEEFLPPGASLKCTVCSYTADSVINFHQHLFSHLTQAAFRCNHCHFGFQTQRELLQHQELHVPSGKLPRESDMEHSPSATEDSLQPATDLLTRSELPQSQKAMQTKDASSDTELDKCEKKTQLFLTNQRPEIQPTTNKQSFSYTKIKSEPSSPRLASSPVQPNIGPSFPVGPFLSQFSFPQDITMVPQASEILAKMSELVHRRLRHGSSSYPPVIYSPLMPKGATCFECNITFNNLDNYLVHKKHYCSSRWQQMAKSPEFPSVSEKMPEALSPNTGQTSINLLNPAAHSADPENPLLQTSCINSSTVLDLIGPNGKGHDKDFSTQTKKLSTSSNNDDKINGKPVDVKNPSVPLVDGESDPNKTTCEACNITFSRHETYMVHKQYYCATRHDPPLKRSASNKVPAMQRTMRTRKRRKMYEMCLPEQEQRPPLVQQRFLDVANLNNPCTSTQEPTEGLGECYHPRCDIFPGIVSKHLETSLTINKCVPVSKCDTTHSSVSCLEMDVPIDLSKKCLSQSERTTTSPKRLLDYHECTVCKISFNKVENYLAHKQNFCPVTAHQRNDLGQLDGKVFPNPESERNSPDVSYERSIIKCEKNGNLKQPSPNGNLFSSHLATLQGLKVFSEAAQLIATKEENRHLFLPQCLYPGAIKKAKGADQLSPYYGIKPSDYISGSLVIHNTDIEQSRNAENESPKGQASSNGCAALKKDSLPLLPKNRGMVIVNGGLKQDERPAANPQQENISQNPQHEDDHKSPSWISENPLAANENVSPGIPSAEEQLSSIAKGVNGSSQAPTSGKYCRLCDIQFNNLSNFITHKKFYCSSHAAEHVK

SEQ ID NO: 172411 - DNA, 4507 bp, Artificial Sequence
  derived and/or modified sequence
cagcggcagcagccgccgccgagatgtcccggcgaaagcaaagcaaaccccggcagatcaaacggccgcttgaagatgccattgaagatgaggaagaagaatgtccatcagaggaaacagacatcatctccaaaggagactttccattggaggaaagcttttccacagaatttgggcctgaaaatctgagctgcgaagaagtggaatacttttgtaacaaaggtgatgatgaaggaatccaggagacagcagaatcagatggggacacacagtcagagaaaccggggcaacctggagttgagacagacgactgggatggaccaggagagctggaggtgtttcagaaagatggggaacgaaaaattcagagtcgacagcaacttccagtgggaacaacctgggggccgtttcctgggaagatggacttgaataataattctttgaagacaaaggctcaggtcccaatggtgctgactgctggtcccaagtggttgctggatgtgacttggcaaggagtggaagacaacaaaaacaactgcattgtgtacagcaaagggggtcagctttggtgtacaactacgaaggccatctctgagggtgaagagctaattgcctttgtggtggattttgactcaaggctacaagctgccagtcagatgactctcacagaagggatgtaccctgcacgcctgctggactcaattcagctgcttcctcagcaagctgccatggcttctattttgcccacagctattgtcaataaggatatattcccttgcaagtcctgtggcatctggtatcggagtgagcggaatctgcaggcccatttgatgtactactgcagtgggaggcaaagagaagctgctccggtgtcagaggaaaatgaagacagtgcccatcagatttccagcctgtgccccttcccacagtgcaccaagagcttttcaaatgctcgagctctagaaatgcacctgaattcacacagtggagtgaaaatggaagaattcctgccccctggtgctagtctaaaatgcaccgtctgtagctacactgctgattccgtgatcaactttcaccaacacctgttctcccatctcactcaagctgccttccgatgtaatcactgccatttcggcttccagactcagagggagttattgcagcaccaggagctccatgtccctagcggcaaacttcccagagaaagtgacatggaacactctccaagtgcaactgaagacagcttacagccagccacagacttattgaccagaagcgaacttccccagagccaaaaggccatgcagactaaagatgcgagctctgacacagagctggacaagtgtgagaaaaagactcagctctttctcacgaaccagagaccagagatacagcctacaacaaataaacaaagcttttcttacacaaaaataaagtctgagccctctagcccaagacttgcctcatctccagttcagcctaatattgggccttctttccctgtgggccctttcctatctcagttttctttcccccaagatatcaccatggtccctcaagcttcagagatcttagctaagatgtctgaactggtgcatcggcgactgaggcatggcagtagtagctaccctcccgtcatttacagccctttgatgcccaagggggctacttgttttgagtgtaacataacattcaataatttggataattatctagtgcacaaaaagcattattgcagcagccgatggcagcagatggctaagtccccagagttccctagtgtgtcagaaaagatgcctgaagctttgagtcccaacactggccaaacctccataaaccttctcaacccagctgctcattctgctgatcctgagaatccacttcttcaaacatcttgcatcaattcttccactgtcttagatttaattgggccaaatgggaagggccatgacaaggacttttccactcaaactaagaagctctccacctccagtaacaatgatgacaaaattaatggaaaacctgttgatgtgaaaaatcccagtgtccccttagtggatggggaaagtgacccaaataagactacctgtgaagcttgcaacattaccttcagccggcacgaaacatacatggtccacaaacagtattactgtgctacacgccacgaccctccactgaagaggtctgcttccaacaaagtgcctgccatgcagagaaccatgcgcacacgcaagcgcagaaagatgtatgagatgtgcctacctgagcaggaacaaaggcctccactggttcagcagagatttcttgacgtagccaacctcaataatccttgtacctccactcaagaacccacagaagggctaggagagtgctaccacccaagatgtgatatctttccaggaattgtctctaaacacttggaaacttctctgacgatcaacaagtgtgttccagtttccaaatgtgatactactcattccagtgtttcctgcctagagatggacgtgcccatagatctcagcaaaaagtgtttatctcagtctgagcggacgaccacgtctcccaaaaggctgctggactatcacgagtgcactgtgtgcaagatcagtttcaataaggtagaaaactatctggcccacaagcagaatttctgcccggttactgcacatcagcgtaatgacctgggtcaactggacggcaaagtgtttccgaatccagaaagcgaacgaaacagccctgatgtcagctacgaaagaagcataataaaatgtgagaaaaatgggaatttgaagcagccttcccccaatggaaacttattttcatcccacctagcaaccctgcaaggcttgaaggtctttagtgaagctgctcagctcattgctacaaaagaagaaaacagacatttgtttcttccacaatgcctttaccctggagcaataaagaaagcaaaaggagccgaccagctttctccatattatggaatcaagccaagtgattatatttctggttctcttgtcatccataacactgacatcgagcaaagcagaaatgcagaaaatgaatctcctaaaggccaggcttcctcaaatgggtgtgctgcgctgaagaaagattctctgccattgttgcccaaaaatcgaggaatggtaatagtgaatggtggactgaaacaagatgagagacctgctgccaacccacagcaagagaacatttcccagaatcctcagcacgaagacgaccacaaatctccctcgtggatctctgagaacccattagctgccaatgagaatgtctcaccaggaattccctcagcagaggaacagttgtctagtatagcaaaaggtgtgaatggttccagccaggctccaaccagtgggaaatattgccggctatgtgatatccagttcaacaacctttcaaactttataactcacaagaagttttattgctcatcacatgcagcagaacatgtcaaatgaactaactaaacatcagtcacctttggtatcagtgtttagtatgttgttctaaccagtccagaaaaaaaaataagctgtttgaattacatctgggcaatcaggagataattcattatggctgagttgaagacttaaggtgtaatttcattacagtccattagtaaagtgtattattggtgccattttcaaaaaaattaatttattttaccagcagtattcatagctgtggttatgttattttttatttaaaaactttatattaaagtcatttgtaatgttattgtatagttattgtgtagcacatatggtttgcactgtatagtagcttttaaagaaaatagtcacaatacagaaaagcattttagaaatagcttcaaaagcacttgtgtatcttgattttttcttatatgctgttgcagatatatgtatatgctaaaatataacttgcaaagatgttctaaatacacatgctataagttcgccttaagatttcaattcttggataatcaggctctgtttgcactttatattttagcagatacagtctcttagtcactaggctttgcatttgtatgtagctgtatgtttccgtccattttcttaatcctgaacctgtatgttaaatgaagatggcaatttttttcttgtatagtacttgtattttctttcgctgatgcagctctgtctcaatttttaaacctttgctgttaaatgcaatactttataaagaatgaacaaaattactggaagcagtattgtaagtaatgaggtagtattaatcagttttatcttttgaaaggcacagtctaaatcgaaaccctaaactcaatgctgcaagtatgaatttaattcatatataagatctatttaaatataagagtagcaatactgcacctggtgatcacaaagataatgttctacttctgatagaaataatttctcaacaaatgttgttactatgcatgtatatggatggaataaaattccagattgttggagaaaaaaaaaaaaaaaaaaaaaaaaaaaaa

SEQ ID NO: 172412 - DNA, 3456 bp, Artificial Sequence
  derived and/or modified sequence
atgagcagaagaaagcagagcaagcccagacagatcaagagacccctggaggacgccatcgaggacgaggaggaggagtgccccagcgaggagaccgacatcatcagcaagggcgacttccccctggaggagagcttcagcaccgagttcggccccgagaacctgagctgcgaggaggtggagtacttctgcaacaagggcgacgacgagggcatccaggagaccgccgagagcgacggcgacacccagagcgagaagcccggccagcccggcgtggagaccgacgactgggacggccccggcgagctggaggtgttccagaaggacggcgagagaaagatccagagcagacagcagctgcccgtgggcaccacctggggccccttccccggcaagatggacctgaacaacaacagcctgaagaccaaggcccaggtgcccatggtgctgaccgccggccccaagtggctgctggacgtgacctggcagggcgtggaggacaacaagaacaactgcatcgtgtacagcaagggcggccagctgtggtgcaccaccaccaaggccatcagcgagggcgaggagctgatcgccttcgtggtggacttcgacagcagactgcaggccgccagccagatgaccctgaccgagggcatgtaccccgccagactgctggacagcatccagctgctgccccagcaggccgccatggccagcatcctgcccaccgccatcgtgaacaaggacatcttcccctgcaagagctgcggcatctggtacagaagcgagagaaacctgcaggcccacctgatgtactactgcagcggcagacagagagaggccgcccccgtgagcgaggagaacgaggacagcgcccaccagatcagcagcctgtgccccttcccccagtgcaccaagagcttcagcaacgccagagccctggagatgcacctgaacagccacagcggcgtgaagatggaggagttcctgccccccggcgccagcctgaagtgcaccgtgtgcagctacaccgccgacagcgtgatcaacttccaccagcacctgttcagccacctgacccaggccgccttcagatgcaaccactgccacttcggcttccagacccagagagagctgctgcagcaccaggagctgcacgtgcccagcggcaagctgcccagagagagcgacatggagcacagccccagcgccaccgaggacagcctgcagcccgccaccgacctgctgaccagaagcgagctgccccagagccagaaggccatgcagaccaaggacgccagcagcgacaccgagctggacaagtgcgagaagaagacccagctgttcctgaccaaccagagacccgagatccagcccaccaccaacaagcagagcttcagctacaccaagatcaagagcgagcccagcagccccagactggccagcagccccgtgcagcccaacatcggccccagcttccccgtgggccccttcctgagccagttcagcttcccccaggacatcaccatggtgccccaggccagcgagatcctggccaagatgagcgagctggtgcacagaagactgagacacggcagcagcagctacccccccgtgatctacagccccctgatgcccaagggcgccacctgcttcgagtgcaacatcaccttcaacaacctggacaactacctggtgcacaagaagcactactgcagcagcagatggcagcagatggccaagagccccgagttccccagcgtgagcgagaagatgcccgaggccctgagccccaacaccggccagaccagcatcaacctgctgaaccccgccgcccacagcgccgaccccgagaaccccctgctgcagaccagctgcatcaacagcagcaccgtgctggacctgatcggccccaacggcaagggccacgacaaggacttcagcacccagaccaagaagctgagcaccagcagcaacaacgacgacaagatcaacggcaagcccgtggacgtgaagaaccccagcgtgcccctggtggacggcgagagcgaccccaacaagaccacctgcgaggcctgcaacatcaccttcagcagacacgagacctacatggtgcacaagcagtactactgcgccaccagacacgacccccccctgaagagaagcgccagcaacaaggtgcccgccatgcagagaaccatgagaaccagaaagagaagaaagatgtacgagatgtgcctgcccgagcaggagcagagaccccccctggtgcagcagagattcctggacgtggccaacctgaacaacccctgcaccagcacccaggagcccaccgagggcctgggcgagtgctaccaccccagatgcgacatcttccccggcatcgtgagcaagcacctggagaccagcctgaccatcaacaagtgcgtgcccgtgagcaagtgcgacaccacccacagcagcgtgagctgcctggagatggacgtgcccatcgacctgagcaagaagtgcctgagccagagcgagagaaccaccaccagccccaagagactgctggactaccacgagtgcaccgtgtgcaagatcagcttcaacaaggtggagaactacctggcccacaagcagaacttctgccccgtgaccgcccaccagagaaacgacctgggccagctggacggcaaggtgttccccaaccccgagagcgagagaaacagccccgacgtgagctacgagagaagcatcatcaagtgcgagaagaacggcaacctgaagcagcccagccccaacggcaacctgttcagcagccacctggccaccctgcagggcctgaaggtgttcagcgaggccgcccagctgatcgccaccaaggaggagaacagacacctgttcctgccccagtgcctgtaccccggcgccatcaagaaggccaagggcgccgaccagctgagcccctactacggcatcaagcccagcgactacatcagcggcagcctggtgatccacaacaccgacatcgagcagagcagaaacgccgagaacgagagccccaagggccaggccagcagcaacggctgcgccgccctgaagaaggacagcctgcccctgctgcccaagaacagaggcatggtgatcgtgaacggcggcctgaagcaggacgagagacccgccgccaacccccagcaggagaacatcagccagaacccccagcacgaggacgaccacaagagccccagctggatcagcgagaaccccctggccgccaacgagaacgtgagccccggcatccccagcgccgaggagcagctgagcagcatcgccaagggcgtgaacggcagcagccaggcccccaccagcggcaagtactgcagactgtgcgacatccagttcaacaacctgagcaacttcatcacccacaagaagttctactgcagcagccacgccgccgagcacgtgaagtag

SEQ ID NO: 172413 - DNA, 3456 bp, Artificial Sequence
  derived and/or modified sequence
atgagtcgtagaaaacaatcaaagccccggcagataaagcggcctctcgaagacgccatcgaggacgaagaggaagagtgccctagcgaagaaaccgacatcatctctaaaggggacttcccgctggaagagagcttttcaacggagttcggacctgagaatctctcgtgcgaagaggtcgagtacttctgtaacaagggtgatgacgagggcatccaggaaacggccgagagtgatggtgatacccagtcagagaaaccaggccaaccaggggtggagaccgatgattgggacggacccggcgagttggaagtgttccaaaaggatggcgagcgcaagatccaaagccgacagcagctgcccgtgggcactacttggggcccattcccaggaaaaatggaccttaacaacaattctttaaagaccaaggcccaggttccaatggtcctgacggccgggccaaagtggctgctggacgtaacatggcagggtgtggaggataacaagaacaattgcattgtttatagtaaggggggacagctgtggtgcacaactacaaaggctatctctgagggggaagaactaatcgcgttcgttgtcgatttcgatagtagactgcaggccgcttctcagatgaccctcactgaaggcatgtacccagcacggctactcgatagcatccaactgctgccccagcaggccgctatggcaagtatacttcctaccgcaatcgtgaataaggatatttttccctgcaaatcgtgcggtatttggtatcggtccgagcgaaatctgcaggctcacctcatgtattattgcagcggacgtcagcgcgaggccgctccggtgagcgaggagaacgaagattcggctcatcagataagctccttatgcccgtttccgcaatgcacaaaatctttttcaaatgcgcgcgccctggagatgcacctgaactctcactccggggtcaagatggaggagtttttgcctccaggagctagcttaaaatgcacggtatgtagctatacagcagattcagtgataaacttccaccagcatttgttcagccaccttacgcaggctgcattcagatgcaatcattgccacttcggttttcagacccaaagggagttgcttcagcaccaggagcttcacgtcccctctgggaagctgccacgtgaatcagacatggaacactcccccagcgccactgaggattccctgcaaccggccactgacctgctcactcgatcagagcttccccaatcccagaaggctatgcaaacaaaggacgcttccagcgacaccgagctcgataagtgcgagaaaaagactcagctctttcttacaaatcagagacctgaaatccagccaaccacaaataaacagagcttctcctataccaagatcaaaagcgaaccaagttccccacgactcgcgtccagccctgtgcaacccaacattggtccatcctttcctgtggggccttttctgagccaatttagcttccctcaggatattaccatggtaccccaggcttcggaaatcctcgccaaaatgtcggagctggttcatcggcggctgagacatggttcatctagttatccacccgtaatctattcccccctaatgccaaagggggctacctgctttgaatgcaacataacatttaacaacctcgacaattatctcgtgcataagaagcactactgttccagtcgttggcagcagatggcgaaatcacctgagttccccagtgtatccgagaagatgcccgaagcactgtcccctaacaccggacagacctcaattaacctactgaaccctgctgcacattcagccgatccggaaaatcccctactgcagacgtcttgtatcaactcctcgacagttctggatctaataggacccaacggcaagggacacgataaagatttttcaacccaaacaaaaaaactgtctacatctagcaacaacgatgacaagatcaacggaaagcccgtcgacgtgaagaatccttctgtgcccctggtggatggggaatctgaccccaataagacaacttgcgaggcatgtaacatcaccttctcaagacatgagacctatatggtacataagcagtattactgcgctaccagacacgatcctcccttaaaaaggagcgcctccaacaaggttcctgccatgcagaggactatgaggaccaggaaacggcggaagatgtacgagatgtgtctaccggagcaggagcaaagaccgccacttgtgcagcaacggttcctggatgtggctaacttaaacaacccatgcacatctacacaggaacctacagaaggactcggggaatgttatcacccgcggtgtgatatctttcctggaatcgtgagtaaacacctcgagacaagcctaacaattaataaatgcgtacctgtgtctaagtgtgataccacgcattcctccgtgagttgcctggagatggacgtgccgatcgatttaagtaagaaatgtctctctcagtccgagcgcacaacaacctctcccaagcgcctcctcgattaccacgagtgcacagtctgcaagatttcattcaacaaagtcgagaattatttggctcacaagcagaatttttgcccggtgactgcgcatcagcgcaatgatctgggacagctagatggcaaagtgttccctaacccagaatccgagcggaacagtcctgatgtgtcctatgaacgatcaattattaagtgtgagaaaaatgggaacttgaaacagcccagtccaaatggcaacttgttttcgagccacttggctacacttcagggtctgaaggtgtttagtgaagccgcacagctgattgccacaaaagaggagaatagacacctttttctgccccagtgcctttaccccggagctataaagaaagctaagggtgctgatcaactgtcaccatattatggtatcaagccttcagattacatctccgggtccctggttattcataacaccgatatagagcaaagccgcaatgcggaaaacgagagtcctaaggggcaggcttcttcaaatggctgtgcagcattaaaaaaagactctctgccgctcctgcccaaaaaccgcggaatggtgatcgtgaacggcgggctaaagcaggatgagaggcctgcagcgaacccacagcaggaaaatatcagtcagaaccctcagcacgaagacgatcacaaatccccttcctggataagtgagaacccactggctgccaatgaaaacgtgtcacctggtatcccatcagcagaagaacagctcagtagcatcgccaaaggagtcaacggctcgagccaggccccaacctctggcaaatactgccgcctgtgtgacatacaattcaataacctttcgaactttataacacacaagaagttctattgttccagtcacgccgcagaacacgtcaagtag

SEQ ID NO: 172414 - DNA, 3456 bp, Artificial Sequence
  derived and/or modified sequence
atgagcaggaggaagcagagcaagccccggcagatcaagaggcccctggaggatgccattgaagatgaggaggaggagtgccccagcgaggagacagacatcatcagcaaaggagacttccccctggaggagagcttcagcacagaatttggacctgagaacctgagctgtgaggaggtggagtacttctgcaacaagggagatgatgagggcatccaggagacagctgagagtgatggagacacccagagcgagaagccaggccagcccggggtggagacagatgactgggatggccctggagagctggaggtgttccagaaggatggagagaggaagatccagagccggcagcagctgcctgtgggcaccacctggggccccttccctgggaagatggacctgaacaacaacagcctgaagaccaaggcccaggtgcccatggtgctgacagctggccccaagtggctgctggatgtgacctggcagggcgtggaggacaacaagaacaactgcatcgtgtacagcaaaggaggccagctgtggtgcaccaccaccaaggccatcagcgagggggaggagctgattgcctttgtggtggactttgacagccggctgcaggccgccagccagatgaccctgacagagggcatgtacccagcccggctgctggacagcatccagctgctgccccagcaggccgccatggccagcatcctgcccacagccatcgtgaacaaggacatcttcccctgcaagagctgtggcatctggtacagaagtgaaagaaacctgcaggcccacctgatgtactactgcagcggccggcagcgggaggccgcccctgtgtctgaggagaatgaagacagcgcccaccagatcagcagcctgtgccccttcccccagtgcaccaagagcttcagcaatgcccgggccctggagatgcacctgaacagccacagcggcgtgaagatggaggagttcctgcccccaggggccagcctgaagtgcaccgtgtgcagctacacagctgacagcgtcatcaacttccaccagcacctgttcagccacctgacccaggccgccttccgctgcaaccactgccacttcggcttccagacccagcgggagctgctgcagcaccaggagctgcacgtgcccagcggcaagctgccccgggagagtgacatggagcacagccccagcgccacagaggacagcctgcagcctgccacagacctgctgaccaggtctgagctgccccagagccagaaggccatgcagaccaaggatgccagcagtgacacagagctggacaagtgtgagaagaagacccagctgttcctgaccaaccagaggcctgagatccagcccaccaccaacaagcagagcttctcctacaccaagatcaagtctgagcccagcagcccccggctggccagcagccctgtgcagcccaacatcggccccagcttccctgtgggccccttcctgagccagttctccttcccccaggacatcaccatggtgccccaggccagcgagatcctggccaagatgtctgagctggtgcaccggcggctgcggcacggcagcagcagctacccacctgtgatctacagccccctgatgcccaagggggccacctgctttgagtgcaacatcaccttcaacaacctggacaactacctggtgcacaagaagcactactgcagcagccgctggcagcagatggccaagagccctgagttccccagcgtgtctgagaagatgcctgaggccctgagccccaacacaggccagaccagcatcaacctgctgaacccagctgcccacagcgctgaccctgagaaccccctgctgcagaccagctgcatcaacagcagcacagtgctggacctgattggccccaacgggaagggccatgacaaggacttcagcacccagaccaagaagctgagcaccagcagcaacaatgatgacaagatcaacgggaagcctgtggatgtgaagaaccccagcgtgcccctggtggatggagagagtgaccccaacaagaccacctgtgaggcctgcaacatcaccttcagcagacatgagacctacatggtgcacaagcagtactactgtgccaccaggcatgacccccccctgaagaggtctgccagcaacaaggtgcctgccatgcagaggaccatgaggaccaggaagaggaggaagatgtatgagatgtgcctgcctgagcaggagcagaggcctcccctggtgcagcagcgcttcctggatgtggccaacctgaacaacccctgcaccagcacccaggagcccacagagggcctgggggagtgctaccacccccgctgtgacatcttccctggcatcgtgtccaagcacctggagaccagcctgaccatcaacaagtgtgtgcctgtgtccaaatgtgacaccacccacagctctgtgtcctgcctggagatggatgtgcccatcgacctgagcaagaagtgcctgagccagagcgagaggaccaccaccagccccaagaggctgctggactaccatgaatgtactgtgtgcaagatctccttcaacaaggtggagaactacctggcccacaagcagaacttctgccctgtgacagcccaccagagaaatgacctgggccagctggatggcaaggtgttccccaaccctgagagcgagaggaacagcccagatgtgtcctatgaaagaagcatcatcaagtgtgagaagaatggaaacctgaagcagcccagccccaacggcaacctcttcagcagccacctggccaccctgcagggcctgaaggtgttcagcgaggccgcccagctgattgccaccaaggaggagaacagacacctgttcctgccccagtgcctgtacccaggggccatcaagaaggccaagggagctgaccagctgagcccctactacggcatcaagcccagcgactacatcagcggcagcctggtgatccacaacacagacatcgagcagagcagaaatgcagaaaatgaaagccccaagggccaggccagcagcaatggctgtgccgccctgaagaaggacagcctgcccctgctgcccaagaacagaggcatggtgattgtgaatggaggcctgaagcaggatgagaggcctgctgccaacccccagcaggagaacatcagccagaacccccagcatgaagatgaccacaagagccccagctggatcagcgagaaccccctggccgccaatgaaaatgtgtccccaggcatccccagcgctgaggagcagctgagcagcatcgccaagggcgtgaatggcagcagccaggcccccaccagcggcaagtactgccgcctgtgtgacatccagttcaacaacctgagcaacttcatcacccacaagaagttctactgcagcagccacgccgctgagcacgtgaagtag

SEQ ID NO: 172415 - DNA, 3456 bp, Artificial Sequence
  derived and/or modified sequence
atgagccggcggaagcagagcaagccccggcagatcaagcggcccctggaggacgctattgaagatgaagaagaggaatgtccttccgaggaaaccgacatcatttccaagggcgactttcctttagaagaaagttttagtactgagtttggtccagaaaacctcagctgcgaagaggtcgaatacttttgcaacaaaggcgatgatgagggaatccaggagactgcagagtcagatggcgacacccaatcagaaaaaccaggacagcctggagttgagaccgatgattgggatgggcccggcgaattagaagttttccagaaagatggagaaaggaaaattcagtctcgccaacagttgcccgtgggtaccacctggggtccctttccggggaagatggatctcaacaacaatagcctcaagacaaaagcacaggtgcctatggtgcttactgctggacccaagtggctgctcgatgtgacatggcagggagtggaagataacaaaaataattgcattgtttacagtaaaggaggccagctctggtgcaccactactaaagcaatctctgaaggcgaggagctgatagcgtttgtggtcgacttcgattctcgccttcaagcggcctcacagatgactcttactgaaggaatgtatccggcaaggctgcttgattccattcagctgttgccgcagcaggccgcaatggcttctattcttcctaccgcgatcgtgaataaggatattttcccgtgcaaatcctgtggcatctggtacagaagcgagagaaatctgcaggcccaccttatgtattattgtagcggccgccagagagaggccgcgcccgtctccgaggagaatgaggatagcgcccaccaaataagctctctctgtccctttccacaatgcactaaaagcttctcgaatgctagagcgctggagatgcatctaaatagtcattccggtgttaagatggaagagttcttgcctccgggagcaagcctcaaatgcacagtgtgtagttatacggcagatagcgttattaacttccaccagcatctcttctcacacttgactcaggcagcttttcggtgcaaccactgtcacttcgggttccagacccaaagagaactgctccaacatcaggagttgcacgtccctagtggtaagctgccgagggagtcagatatggaacatagcccctccgcaactgaggactcattgcagcccgccactgatctactgacaagatctgagttaccccagtcccagaaggccatgcaaacaaaagatgcctccagcgacaccgagctggacaagtgcgaaaaaaaaacccagctgtttctcaccaaccagcggcctgaaatccaacctactaccaacaagcaatcgtttagctacactaagataaagtcagaaccatcctctcccaggttggcttccagtccagtccaacccaacatcggtccgtctttccctgtgggccctttcctcagtcaattctcctttccacaggatatcacaatggttccacaagccagtgagattctggctaaaatgtcggagttagtacatcggcgactgcgccatggctcttcaagctacccaccagtcatttacagccccctaatgcccaaaggcgctacctgtttcgaatgtaacattacatttaataatctcgataattacctagttcataagaaacactactgcagctccagatggcagcagatggcaaagtctccggagttccccagcgtatcagaaaagatgcccgaagctctatcacccaacactgggcagacgtccatcaacctcctaaatcctgcagctcactccgctgaccccgaaaatcccctgctgcaaacatcctgcattaattcgagcaccgtcctggacctcattggtccgaatgggaagggccacgacaaggacttttcaactcaaactaaaaagcttagtacttccagcaataatgatgacaaaattaatgggaagcccgttgacgttaagaatcccagtgtcccattggtagacggggaaagcgatcccaataagacaacgtgtgaggcatgtaatattacattttctcgtcacgaaacctacatggtgcacaagcaatactactgcgcaacgcggcatgacccccccttgaagcgatccgctagcaacaaagtgcctgcgatgcagcggacaatgcggactcgtaagagacgcaaaatgtatgaaatgtgccttcccgaacaagagcagaggcctcctttggtgcaacagagattccttgatgtagctaatcttaacaatccatgcacctcaactcaggaacctaccgaaggactgggcgagtgctaccatcccaggtgtgacatcttccccggaatagtgagcaaacatcttgaaacctcgctgactatcaataagtgtgttcctgtgtccaagtgtgacaccacccattcttcagtttcttgtcttgaaatggacgtgcctattgacctctcaaaaaaatgtctgagtcaatctgaaaggaccacaacctcacccaagagattgctcgactatcacgagtgtaccgtgtgcaaaatttctttcaacaaagtcgagaactaccttgctcataagcagaatttttgtcccgtgacagcccatcagaggaacgatctggggcagttagacgggaaggtgttcccaaatcctgagtcagaaagaaatagtccagacgtgtcttacgagcggtctattatcaaatgtgaaaagaacgggaatttaaagcaaccctcaccgaacggcaacctgttcagcagtcacctagcaacactgcaaggtcttaaggtgttctcagaggctgctcagctcattgcaactaaagaagaaaatagacacttattccttccccagtgcctatatccaggtgccatcaagaaagccaaaggcgccgaccagctgtcaccttattatggaatcaagcccagcgattacatcagcgggtctctggtgatccacaacaccgacattgagcagtcccgtaacgccgagaacgaatcgccaaaagggcaagcaagctccaatggatgtgcagccctaaagaaggactccctgccgcttctgccgaaaaaccgtggcatggtgatcgttaacggagggttaaagcaggatgaacgaccagcagctaatcctcagcaagagaatatcagccagaatcctcagcatgaggatgaccataaaagcccatcctggatatccgagaatccgttagccgccaatgaaaacgtgtcaccagggatccctagcgccgaggagcagttgagttctatcgctaagggcgtgaacggaagctcacaggcccccacatctggcaagtattgtcgactgtgcgatattcaatttaataatctgtccaatttcattacccacaagaaattctactgcagcagccacgccgctgagcacgtgaagtag

SEQ ID NO: 172416 - DNA, 3456 bp, Artificial Sequence
  derived and/or modified sequence
atgtctcgacgaaagcagagcaaaccaagacagatcaagcgaccccttgaggatgccattgaggatgaggaggaggagtgccccagcgaggaaacagacatcatttctaagggcgactttcccttagaggagtccttcagcaccgagttcgggcctgagaacctgagctgcgaggaagtggaatacttctgtaacaaaggagatgacgaaggcattcaggaaaccgccgagtccgatggggacacacaatctgagaaacccggacagcccggtgtcgagaccgatgactgggatggtccgggtgaactcgaggtgtttcagaaagatggagagcgtaagatacagtctcgccagcagttaccagtcggtaccacatggggtccattccccggtaagatggatttgaataataactcattaaaaaccaaagcacaagtaccaatggttctgactgcaggtccaaagtggctgctggacgtgacatggcaaggggtcgaggacaacaagaacaattgtatcgtgtacagcaaggggggtcaactgtggtgcacaacgacaaaggccattagtgagggagaagagctgatcgccttcgtggtggactttgacagtcgcctgcaggctgcgtcccagatgaccctgaccgaaggcatgtacccggcacgcctgctagatagtatccagctcctgcctcagcaggccgcaatggcgtcaatactccctacagcgattgttaacaaagatatttttccttgtaagagctgtgggatttggtatcgatctgagcggaatctgcaggctcacctcatgtactattgtagcggcaggcaaagagaagcagcaccagtgagcgaagagaacgaggactcagctcaccagattagcagcctctgtccttttccgcagtgtaccaagagctttagcaacgccagagctctggaaatgcatctaaatagtcattcaggagtgaaaatggaggagtttttgcccccaggggcatcactgaaatgtacggtgtgcagctacacagcagattctgtaattaatttccaccagcacctattctcccacctcacacaggcagcttttcgttgcaaccattgccactttgggtttcagactcagagggagctgctccagcatcaggagctccatgtgcctagcggcaaactgccaagagagagcgacatggaacactcacctagcgcaacggaggatagcctccagccagccacggatctgctgactaggagtgagctgccacagtcccagaaggcgatgcaaaccaaagacgcttcttcagatactgaactcgacaagtgtgagaaaaaaacccaactttttcttaccaaccagcggcctgaaatccagcctaccaccaataagcagtccttcagctacacaaaaatcaagtccgagccctcctcccccaggctggcctcttcaccagtgcagcccaatatcggacctagcttccctgtaggtccatttttaagccagttctcctttccacaggacattaccatggtgcctcaggcttctgaaattctcgctaaaatgtctgagctggtgcatcgtaggctgcgccatggcagttccagttatccccctgtcatatacagtccgcttatgcccaagggtgcaacttgctttgagtgtaatataacttttaacaatctcgacaattacctcgttcacaagaagcattattgtagtagccggtggcaacagatggctaaaagcccggagttcccttctgtgagcgagaaaatgccggaggctctgtcccccaacaccggacagacatccattaatcttctgaatccggcagcacatagtgctgatccagaaaatcctctcctccaaacatcttgcatcaattcgtcgactgtcctcgatcttattgggccaaatgggaaaggccatgataaggatttcagcacacagaccaagaagctgagtacaagcagcaacaacgatgataagataaacggcaagcccgttgatgtcaagaatcccagcgttccgttggtggatggcgaaagcgatcctaacaagacaacctgtgaagcctgcaatataactttttcacggcacgagacctatatggttcacaaacaatattattgcgccacaagacatgatcccccactgaagagatccgcgtcaaacaaggttccggcaatgcaacgcacgatgcgcactcgtaagcggcgaaaaatgtatgagatgtgcttgccggaacaggagcagcgtcctcctcttgtgcaacagcgctttctagacgtcgccaatttgaacaacccttgcacttccacacaggaacccaccgagggcctgggagaatgctatcaccctcggtgcgacatctttcctggcatagtctccaagcatttagagaccagcttgactataaacaaatgtgtaccggtctcaaagtgtgacactacacattcatccgtatcctgtctggagatggacgtacccattgacctttccaagaagtgcctgagccaaagcgagcgaaccaccacctctccaaaaagattgttagattatcatgagtgcacagtctgtaaaatcagtttcaacaaggtcgagaattatctcgcccataagcagaatttctgtccggtcacagcacaccaacgcaatgacctgggccaattggatggtaaggtttttcccaacccagagagcgaacggaattcacccgatgtctcttatgagcgcagcattatcaagtgtgagaaaaacggaaatctgaagcagcctagtcctaacgggaatctgttctcatcacacttagctacactgcaagggctgaaagtgttcagtgaagctgcgcaactgatagccaccaaggaggagaatcgccatttgtttttgccacagtgtctgtatccaggggctattaagaaggcgaagggagctgaccagctctcaccttactacggtataaagccctccgattatatctcgggcagcctcgtgatccacaatactgacatagagcaaagtaggaacgccgaaaatgagtctcccaagggacaagcatcatcgaacggctgcgccgctctcaagaaagactcattgccactgctgcccaagaaccggggtatggtcatcgtaaacgggggattaaagcaagacgaacggcctgcggcaaacccccagcaggaaaatatttcacagaaccctcaacacgaagatgaccacaagtcgcctagctggatcagcgagaatcctctggccgctaacgaaaacgttagtcctggcatcccctctgccgaggaacagctgtccagtatcgccaagggcgtcaacggcagctcacaggcccctacatctggaaagtactgcaggctgtgtgatattcagtttaacaatctgagcaattttatcactcataaaaagttttattgcagctcgcacgcagctgaacatgtgaaatag

SEQ ID NO: 172417 - DNA, 4700 bp, Artificial Sequence
  derived and/or modified sequence
ctctccccctcccctcctcactgtcacactctctgtgcccccgtctctcttctctcatttgcttgctcatctccgaacgtgaatccgcggctcccggaggagcccagcgcccggagcacctggagtccggccggcggcgggccgagcctggccagcggcggcggcggcggcggcggcggcgggagccgagggagcggcagccgcgaccgcgggcaccgcgggagccccagcggcagcagccgccgccgagatgtcccggcgaaagcaaagcaaaccccggcagatcaaacggccgcttgaagatgccattgaagatgaggaagaagaatgtccatcagaggaaacagacatcatctccaaaggagactttccattggaggaaagcttttccacagaatttgggcctgaaaatctgagctgcgaagaagtggaatacttttgtaacaaaggtgatgatgaaggaatccaggagacagcagaatcagatggggacacacagtcagagaaaccggggcaacctggagttgagacagacgactgggatggaccaggagagctggaggtgtttcagaaagatggggaacgaaaaattcagagtcgacagcaacttccagtgggaacaacctgggggccgtttcctgggaagatggacttgaataataattctttgaagacaaaggctcaggtcccaatggtgctgactgctggtcccaagtggttgctggatgtgacttggcaaggagtggaagacaacaaaaacaactgcattgtgtacagcaaagggggtcagctttggtgtacaactacgaaggccatctctgagggtgaagagctaattgcctttgtggtggattttgactcaaggctacaagctgccagtcagatgactctcacagaagggatgtaccctgcacgcctgctggactcaattcagctgcttcctcagcaagctgccatggcttctattttgcccacagctattgtcaataaggatatattcccttgcaagtcctgtggcatctggtatcggagtgagcggaatctgcaggcccatttgatgtactactgcagtgggaggcaaagagaagctgctccggtgtcagaggaaaatgaagacagtgcccatcagatttccagcctgtgccccttcccacagtgcaccaagagcttttcaaatgctcgagctctagaaatgcacctgaattcacacagtggagtgaaaatggaagaattcctgccccctggtgctagtctaaaatgcaccgtctgtagctacactgctgattccgtgatcaactttcaccaacacctgttctcccatctcactcaagctgccttccgatgtaatcactgccatttcggcttccagactcagagggagttattgcagcaccaggagctccatgtccctagcggcaaacttcccagagaaagtgacatggaacactctccaagtgcaactgaagacagcttacagccagccacagacttattgaccagaagcgaacttccccagagccaaaaggccatgcagactaaagatgcgagctctgacacagagctggacaagtgtgagaaaaagactcagctctttctcacgaaccagagaccagagatacagcctacaacaaataaacaaagcttttcttacacaaaaataaagtctgagccctctagcccaagacttgcctcatctccagttcagcctaatattgggccttctttccctgtgggccctttcctatctcagttttctttcccccaagatatcaccatggtccctcaagcttcagagatcttagctaagatgtctgaactggtgcatcggcgactgaggcatggcagtagtagctaccctcccgtcatttacagccctttgatgcccaagggggctacttgttttgagtgtaacataacattcaataatttggataattatctagtgcacaaaaagcattattgcagcagccgatggcagcagatggctaagtccccagagttccctagtgtgtcagaaaagatgcctgaagctttgagtcccaacactggccaaacctccataaaccttctcaacccagctgctcattctgctgatcctgagaatccacttcttcaaacatcttgcatcaattcttccactgtcttagatttaattgggccaaatgggaagggccatgacaaggacttttccactcaaactaagaagctctccacctccagtaacaatgatgacaaaattaatggaaaacctgttgatgtgaaaaatcccagtgtccccttagtggatggggaaagtgacccaaataagactacctgtgaagcttgcaacattaccttcagccggcacgaaacatacatggtccacaaacagtattactgtgctacacgccacgaccctccactgaagaggtctgcttccaacaaagtgcctgccatgcagagaaccatgcgcacacgcaagcgcagaaagatgtatgagatgtgcctacctgagcaggaacaaaggcctccactggttcagcagagatttcttgacgtagccaacctcaataatccttgtacctccactcaagaacccacagaagggctaggagagtgctaccacccaagatgtgatatctttccaggaattgtctctaaacacttggaaacttctctgacgatcaacaagtgtgttccagtttccaaatgtgatactactcattccagtgtttcctgcctagagatggacgtgcccatagatctcagcaaaaagtgtttatctcagtctgagcggacgaccacgtctcccaaaaggctgctggactatcacgagtgcactgtgtgcaagatcagtttcaataaggtagaaaactatctggcccacaagcagaatttctgcccggttactgcacatcagcgtaatgacctgggtcaactggacggcaaagtgtttccgaatccagaaagcgaacgaaacagccctgatgtcagctacgaaagaagcataataaaatgtgagaaaaatgggaatttgaagcagccttcccccaatggaaacttattttcatcccacctagcaaccctgcaaggcttgaaggtctttagtgaagctgctcagctcattgctacaaaagaagaaaacagacatttgtttcttccacaatgcctttaccctggagcaataaagaaagcaaaaggagccgaccagctttctccatattatggaatcaagccaagtgattatatttctggttctcttgtcatccataacactgacatcgagcaaagcagaaatgcagaaaatgaatctcctaaaggccaggcttcctcaaatgggtgtgctgcgctgaagaaagattctctgccattgttgcccaaaaatcgaggaatggtaatagtgaatggtggactgaaacaagatgagagacctgctgccaacccacagcaagagaacatttcccagaatcctcagcacgaagacgaccacaaatctccctcgtggatctctgagaacccattagctgccaatgagaatgtctcaccaggaattccctcagcagaggaacagttgtctagtatagcaaaaggtgtgaatggttccagccaggctccaaccagtgggaaatattgccggctatgtgatatccagttcaacaacctttcaaactttataactcacaagaagttttattgctcatcacatgcagcagaacatgtcaaatgaactaactaaacatcagtcacctttggtatcagtgtttagtatgttgttctaaccagtccagaaaaaaaaataagctgtttgaattacatctgggcaatcaggagataattcattatggctgagttgaagacttaaggtgtaatttcattacagtccattagtaaagtgtattattggtgccattttcaaaaaaattaatttattttaccagcagtattcatagctgtggttatgttattttttatttaaaaactttatattaaagtcatttgtaatgttattgtatagttattgtgtagcacatatggtttgcactgtatagtagcttttaaagaaaatagtcacaatacagaaaagcattttagaaatagcttcaaaagcacttgtgtatcttgattttttcttatatgctgttgcagatatatgtatatgctaaaatataacttgcaaagatgttctaaatacacatgctataagttcgccttaagatttcaattcttggataatcaggctctgtttgcactttatattttagcagatacagtctcttagtcactaggctttgcatttgtatgtagctgtatgtttccgtccattttcttaatcctgaacctgtatgttaaatgaagatggcaatttttttcttgtatagtacttgtattttctttcgctgatgcagctctgtctcaatttttaaacctttgctgttaaatgcaatactttataaagaatgaacaaaattactggaagcagtattgtaagtaatgaggtagtattaatcagttttatcttttgaaaggcacagtctaaatcgaaaccctaaactcaatgctgcaagtatgaatttaattcatatataagatctatttaaatataagagtagcaatactgcacctggtgatcacaaagataatgttctacttctgatagaaataatttctcaacaaatgttgttactatgcatgtatatggatggaataaaattccagattgt

SEQ ID NO: 172418 - protein, 233 aa, Artificial Sequence
  derived and/or modified sequence
MPCRREEEEEAGEEAEGEEEEDDSFLLLQQSVTLGSSGEVDRLVAQIGETLQLDAAQDSPASPCAPPGVPLRAPGPLAAAVPADKARPPAVPLLLPPASAETVGPAPSGALRCALGDRGRVRGRAAPYCVAEVAAGPSALPGPCRRGWLRDAVTSRRLQQRRWTQAGARAGDDDPHRLLQQLVLSGNLIKEAVRRLQRAVAAVAATGPASAPGPGGGRSGPDRIALQPSGSLL

SEQ ID NO: 172419 - DNA, 2204 bp, Artificial Sequence
  derived and/or modified sequence
ggctcgagtgcctggcgggctccggcttccgcgtccgcccctgctccggcttcgcccgcagctccgcgcccgcgggcaaccaagcccccagcgaagcccgcacagctccgggtgccaggacggggggccatgccgtgccggagggaggaggaagaggaagccggcgaggaggcggagggggaggaagaggaggacgacagcttcctcctgctgcagcagtcggtgacgctgggcagctcgggcgaggtggaccggctggtggcccagatcggcgagacgctgcagctggacgcggcgcaggacagcccggcctcgccgtgcgcgcccccgggggtgccgctgcgggccccggggcccctggctgcggcggtgccggcggacaaggcccggcccccggcggtgccgctgctgctgccgcccgcttcggctgagacggtgggcccggcgccctctggggccctgcgctgcgccctaggggaccgcggccgcgtgcgcggacgcgctgcgccctactgcgtggcggaggtcgccgcaggccccagcgcgctgccggggccgtgccggcgaggatggctcagggacgcggtcacctcccgccgcttgcagcagcgccgatggacccaagccggggcacgcgccggcgacgacgacccgcatcggctcctccagcagctcgtgctctcgggaaacctcatcaaggaagccgtgcggagactccaacgagccgtcgccgcggttgcagccacgggccccgcaagcgcccctgggcccgggggaggccgcagcggacctgaccgcattgccctgcagccctcaggctccttgctctgacgcaggcctcctggaggaggaagtggaggccgctgcgtagacccaacagcgtccagttcctactaactctgagctgaagccgacgtcgccagcctgggagcgaccactttggctgcggggaggcgcgtggggagagatctcaaccagagaagttaccagccgcggcgaggccgtcggagaaaacttaagcgtggagaaatgtatgcgccagggtgcttccgtggggcatgagaatttcccgggccatccaagcccaaggacctgggataaactgggagaactatggcagctacttgcatcgacttgtacctcacttagcccttgggggcgtcgtgagcttggattgtttaaggagggctcaggggtaggaatcgcgatggctttataacaatacttgaaaactaacgacacgcatacattttcttattttctggtggaggagcttagtaagtggtgctacaattgctgtgcaaagaaattccagaggggagaagaatgtaaaagtttggtggtgggtggcttggcattgcccctttttcccaccgattcggtggctggtgaaggtgggagatgtgaactccaattaagggactggagagaggtgaagaattttgcaggtgggagatttggatttgaatgtggacttgtaaatgacttgaccttgccatctgtgttcaaggtcacggtttgctgtggggttcctgggagagcttactcaccccggagtcttttctttctcttgctccaagaagagccctgttggtgctttaccaccgcttggagtctcccgaggacacaaacaggcagagagggacgtgtagggagagttctttcctgttttctgtgctttcctttttacaggactcccggaaggccactcatggccatgccaggagctttctcagaaacagtcataaacgatctcttgagtctctttcttgtcctcccagctgagctttcttattccaccctttctggtgtctataggaatgcatgagagaccctggacgtttttctgctctcttctggccctccatggagtcatgggcctcggcctcggcggctcctcaccctcacaatttatttcctcctcccgtgccagcccttcttttgtgtctgaaaccggttttaaaatgtgactctcccagagaagaagccgctggctgtatgaaacttgacggcgcttttgtaaggtgccacccccaaactttaaggtagctaaaccaatttttaaaagattcaatggcttgttcatcctccagatgtagctattgatgtacacttcgcaacggagtgtctgaaattgtggtggtcctgatttataggatttcataattaaaatgtctgctgaataaatttggcttttgttttgg

SEQ ID NO: 172420 - DNA, 702 bp, Artificial Sequence
  derived and/or modified sequence
atgccttgccggcgggaggaagaagaagaggctggtgaggaggctgagggcgaagaggaagaagacgactcttttcttctgctgcaacagtctgtcaccctagggagctcaggcgaagttgatcggctggtggctcaaataggcgaaactctccagcttgatgccgcacaggattcaccagcctccccctgtgccccacctggagttcccctcagggccccaggtccactggccgccgctgttccggcagacaaagcgcgacccccagcggtgcccttactgttgcccccggcctccgcggagacagtaggcccagccccaagcggcgcacttcgatgcgctctcggggatcgcggccgcgtgcggggccgggcagccccctactgtgttgcagaggtggctgccggccccagtgcgttgcccgggccttgtcggagaggctggctcagagacgcagtcacgagccgccggctccagcaaagaagatggactcaggccggagcgagggcgggcgacgacgacccacaccggttgctacagcagctggtcctttccggaaatctcatcaaggaggctgtgaggaggctgcagagagccgtggccgccgtggccgccacaggtcctgcttccgcgcccggacccggaggcggcaggtccgggcccgatcgcatagccctgcagccttcgggcagcctgctgtag

SEQ ID NO: 172421 - DNA, 702 bp, Artificial Sequence
  derived and/or modified sequence
atgccctgccggcgggaggaggaggaggaggccggggaggaggccgagggggaggaggaggaggatgacagcttcctgctgctgcagcagagcgtgaccctgggcagcagtggagaggtggaccggctggtggcccagattggagagaccctgcagctggatgctgcccaggacagccctgccagcccctgtgcccctcctggggtgcccctgcgggcccctggccccctggccgctgctgtgcctgctgacaaggcccggcccccagctgtgcccctgctgctgcccccagccagcgctgagaccgtgggccctgcccccagcggggccctgcgctgtgccctgggggaccggggccgggtgcggggccgggccgccccctactgtgtggccgaggtggccgccggccccagcgccctgcccggcccctgcagaagaggctggctgagagatgctgtgaccagccggcggctgcagcagaggcgctggacccaggccggggcccgggctggagatgatgacccccaccggctgctgcagcagctggtgctgagcggcaacctgatcaaggaggccgtgcggcggctgcagagagctgtggccgctgtggccgccaccggccctgccagcgcccctggccctgggggcggccgcagcggccctgaccgcatcgccctgcagcccagcggcagcctgctgtag

SEQ ID NO: 172422 - DNA, 702 bp, Artificial Sequence
  derived and/or modified sequence
atgccctgccggcgggaggaggaggaggaggccggcgaggaggccgagggggaggaggaggaggatgactcgttcctgttactgcagcagtcggttacactaggttcaagtggtgaagtggaccgactggtcgcacagatcggggaaactttgcagctcgacgcggcccaagattcacccgctagtccctgcgcgccaccaggtgtgcctttacgagctcctggacctctggctgctgcagtgcctgcggacaaggctaggccaccggccgtgcctctgctcctgcctcctgcctccgccgagacagtcggcccagccccatctggagcccttcgttgcgccctaggagatcgtggtcgtgtacggggccgcgccgccccctactgcgtggccgaggtcgccgccggcccatctgcactgccaggaccttgccggaggggatggctacgagatgctgtgaccagcaggagactgcagcagcgaagatggactcaggccggggcaagggctggagatgacgacccccaccgactactgcaacaactggtgcttagcggcaatctgataaaggaggccgtccggcgcctccaacgcgccgtggccgctgtagctgccaccgggccagctagtgcgcctggtcccggcggaggtagaagtgggcccgatcgaatagccttacagccctccggctccttgctgtag

SEQ ID NO: 172423 - DNA, 702 bp, Artificial Sequence
  derived and/or modified sequence
atgccatgtcggcgagaggaagaagaagaagctggtgaagaagcagagggcgaggaggaagaggacgattcattcttgctcctgcagcagagcgtgacactgggctcgtccggggaagtggacagacttgtcgctcaaattggagaaacacttcaactggacgccgctcaggacagccccgcttccccctgtgcccctcctggcgtgcctctgagagcacccggacctttagctgcagccgtgcccgctgacaaagctagacctccagctgttccactgctcctgcccccagcgtccgccgagaccgtgggacccgcaccttcaggcgcattgcggtgcgctctcggcgacagaggcagagtgcgtggccgagccgctccgtattgtgttgccgaggttgccgctggcccaagcgcactcccaggaccctgtaggcggggatggctgagagatgctgtgacgagtcgtaggcttcagcagcggcgatggacccaggccggtgctagggctggagacgacgacccccaccggctactgcagcagctcgtgctcagcggcaacctaataaaagaagccgtgcggcgtctccagcgcgcagtagccgcagttgccgcaactggcccagccagtgcgccagggccagggggaggacggtcgggtcccgatcggattgcactccagccgtcaggctcactgctgtag

SEQ ID NO: 172424 - DNA, 702 bp, Artificial Sequence
  derived and/or modified sequence
atgccctgcagaagagaggaggaggaggaggccggcgaggaggccgagggcgaggaggaggaggacgacagcttcctgctgctgcagcagagcgtgaccctgggcagcagcggcgaggtggacagactggtggcccagatcggcgagaccctgcagctggacgccgcccaggacagccccgccagcccctgcgccccccccggcgtgcccctgagagcccccggccccctggccgccgccgtgcccgccgacaaggccagaccccccgccgtgcccctgctgctgccccccgccagcgccgagaccgtgggccccgcccccagcggcgccctgagatgcgccctgggcgacagaggcagagtgagaggcagagccgccccctactgcgtggccgaggtggccgccggccccagcgccctgcccggcccctgcagaagaggctggctgagagacgccgtgaccagcagaagactgcagcagagaagatggacccaggccggcgccagagccggcgacgacgacccccacagactgctgcagcagctggtgctgagcggcaacctgatcaaggaggccgtgagaagactgcagagagccgtggccgccgtggccgccaccggccccgccagcgcccccggccccggcggcggcagaagcggccccgacagaatcgccctgcagcccagcggcagcctgctgtag

SEQ ID NO: 172425 - protein, 558 aa, Artificial Sequence
  derived and/or modified sequence
MYRYLAKALLPSRAGPAALGSAANHSAALLGRGRGQPAAASQPGLALAARRHYSELVADREDDPNFFKMVEGFFDRGASIVEDKLVKDLRTQESEEQKRNRVRGILRIIKPCNHVLSLSFPIRRDDGSWEVIEGYRAQHSQHRTPCKGGIRYSTDVSVDEVKALASLMTYKCAVVDVPFGGAKAGVKINPKNYTENELEKITRRFTMELAKKGFIGPGVDVPAPDMNTGEREMSWIADTYASTIGHYDINAHACVTGKPISQGGIHGRISATGRGVFHGIENFINEASYMSILGMTPGFRDKTFVVQGFGNVGLHSMRYLHRFGAKCIAVGESDGSIWNPDGIDPKELEDFKLQHGSILGFPKAKPYEGSILEVDCDILIPAATEKQLTKSNAPRVKAKIIAEGANGPTTPEADKIFLERNILVIPDLYLNAGGVTVSYFEWLKNLNHVSYGRLTFKYERDSNYHLLLSVQESLERKFGKHGGTIPIVPTAEFQDSISGASEKDIVHSALAYTMERSARQIMHTAMKYNLGLDLRTAAYVNAIEKVFKVYSEAGVTFT

SEQ ID NO: 172426 - DNA, 1677 bp, Artificial Sequence
  derived and/or modified sequence
atgtacaggtacctggcgaaagccttattacctagccgggccggaccagcagctctgggctcagctgcaaatcacagtgcggctttgttagggcggggccgcggtcaacctgccgctgcatctcaacccgggctcgcgctggcggcgaggagacactattccgagctcgttgctgatcgtgaggacgatcctaatttttttaaaatggtggaaggcttctttgacagaggcgctagcatcgtagaggataagcttgttaaggaccttcgcacgcaggaatccgaggaacagaaacgaaacagagttcgtggcatcctgcgcattattaaaccctgtaatcacgtcctgtcgctttctttccctattaggagagacgacggtagctgggaagttatcgagggctaccgggctcagcattcacaacacagaacaccgtgcaaaggcgggatacgttacagcaccgacgtgtctgtcgacgaggtgaaggcactagcctccctgatgacctataaatgcgctgttgtcgatgtaccattcgggggagccaaagcgggggttaagattaacccaaaaaactacacagagaatgagcttgagaaaattacccggcggttcactatggagctggcaaaaaaaggcttcatcggaccaggcgtcgatgtgccggcgccagatatgaataccggtgaacgcgaaatgagctggattgcagatacctacgcctcaaccatcggccactatgacatcaatgcccatgcatgcgtaacaggaaagcccattagtcaggggggcatccatggccgaattagtgcgactggccggggggttttccacgggatcgagaacttcatcaatgaggcaagttacatgagcatcctgggaatgactcccggcttcagagacaaaaccttcgtggtgcagggctttggaaatgtgggattacactccatgcgttatctacaccgctttggggccaagtgtatcgcagtgggtgagtcagatgggtccatctggaatcccgatggtattgacccaaaggagctagaagactttaagctgcagcatggtagcattttgggctttccgaaagcgaagccttacgagggcagtatcctggaggttgactgtgatattttgatccccgccgccactgaaaagcaactgaccaaatctaacgccccccgtgtcaaggccaagataattgctgagggcgctaacggtcccacaacccctgaggctgataaaatctttctggagaggaatatcttagtcatccccgatctgtacctgaatgctggaggagtcacagtgagttattttgaatggctaaaaaatctaaaccatgtgagttacggcagactgacttttaagtatgaaagagactctaactaccatctgttgctgtccgtgcaagagagtctggaaaggaaattcggtaagcacggagggaccattcccattgtcccaactgcagaattccaggatagtatttcaggtgcttctgagaaggacattgtccacagcgcgctagcatacaccatggagagaagtgctcggcagatcatgcatactgccatgaaatacaatcttggattagacctgaggaccgcagcgtacgtaaacgctattgagaaagtgttcaaagtctatagcgaagctggcgtcacatttacctag

SEQ ID NO: 172427 - DNA, 2333 bp, Artificial Sequence
  derived and/or modified sequence
ttccttcctagtcgcggggagtctgagaaagcgcacctgttccgcgaccgtcacgcacccctcctccgcctgccgcgatgtaccgctacctggccaaagcgctgctgccgtcccgggccgggcccgctgccctgggctccgcggccaaccactcggccgcgttgctgggccggggccgcggacagcccgccgccgcctcgcagccggggctcgcattggccgcccggcgccactacagcgagttggtggccgaccgcgaggacgaccccaacttcttcaagatggtggagggcttcttcgatcgcggcgccagcatcgtggaggacaagttggtgaaggacctgaggacccaggaaagcgaggagcagaagcggaaccgggtgcgcggcatcctgcggatcatcaagccctgcaaccatgtgctgagtctctccttccccatccggcgcgacgacggctcctgggaggtcatcgaaggctaccgggcccagcacagccagcaccgcacgccctgcaagggaggtatccgttacagcactgatgtgagtgtagatgaagtaaaagctttggcttctctgatgacatacaagtgtgcagtggttgatgtgccgtttgggggtgctaaagctggtgttaagatcaatcccaagaactataccgaaaatgaattggaaaagatcacaaggaggttcaccatggagctagcaaagaagggctttattggtcctggcgttgatgtgcctgctccagacatgaacacaggtgagcgggagatgtcctggattgctgatacctatgccagcaccatagggcactatgatattaatgcacacgcctgtgttactggtaaacccatcagccaagggggaatccatggacgcatctctgctactggccgtggtgtcttccatgggattgaaaacttcatcaatgaagcttcttacatgagcattttaggaatgacaccagggtttagagataaaacatttgttgttcagggatttggtaatgtgggcctacactctatgagatatttacatcgttttggtgctaaatgtattgctgttggtgagtctgatgggagtatatggaatccagatggtattgacccaaaggaactggaagacttcaaattgcaacatgggtccattctgggcttccccaaggcaaagccctatgaaggaagcatcttggaggtcgactgtgacatactgatcccagctgccactgagaagcagttgaccaaatccaacgcacccagagtcaaagccaagatcattgctgaaggtgccaatgggccaacaactccagaagctgataagatcttcctggagagaaacattttggttattccagatctctacttgaatgctggaggagtgacagtatcttactttgagtggctgaagaatctaaatcatgtcagctatggccgtttgaccttcaaatatgaaagggattctaactaccacttgctcctgtctgttcaagagagtttagaaagaaaatttggaaagcatggtggaactattcccattgtacccacggcagagttccaagacagtatatcgggtgcatctgagaaagacattgtgcactctgccttggcatacacaatggagcgttctgccaggcaaattatgcacacagccatgaagtataacctgggattggacctgagaacagctgcctatgtcaatgccattgaaaaagtcttcaaagtgtacagtgaagctggtgtgaccttcacatagatggatcatggctgacttcctcactaacctcttcacgtgtaacttctgcagacctaccacaagtttacatgtaaccacagaaatccctttctctcctgactcattactaatggataccattctcaacaagtcaatccaaatcagcccgttaaggagaaagaaattaatatacaagctgagtgtgaaagtagaaatcacctacaccagagagctattttggtattttgcctttaaataaaaagcctcctccatatggctgtgcagccttgctctgtggcttttcccagcacaatcagtgctagtgctggggaagggacagtcaagagcagtcagttgcttacttattttgctctggatgagtctgggacacgctgtaactttaacacatttaagaagaaggtgtgtggccttttcagaaggtggcatggtcctcaagtgagttcttagtattttatatcagcaaaataactcaattttgcagattgcaaacaaatataaaagctgtttctgtttatgaattttattcttttagaatagaataagtacatgctgctgtaataaaattgcctttaatcactt

SEQ ID NO: 172428 - DNA, 1677 bp, Artificial Sequence
  derived and/or modified sequence
atgtaccgctacctggccaaggccctgctgcccagccgggccggccctgctgccctgggcagcgctgccaaccacagcgctgccctgctgggccggggccggggccagcctgctgctgccagccagcccggcctggccctggccgcccggcggcactacagcgagctggtggccgacagagaagatgaccccaacttcttcaagatggtggagggcttctttgacagaggagccagcatcgtggaggacaagctggtgaaggacctgcggacccaggagagcgaggagcagaagaggaacagagtgcggggcatcctgcgcatcatcaagccctgcaaccacgtgctgagcctgtccttccccatcagaagagatgatggctcctgggaggtgattgagggctaccgggcccagcacagccagcacaggaccccctgcaagggcggcatccgctacagcacagatgtgtctgtggatgaggtgaaggccctggccagcctgatgacctacaagtgtgctgtggtggatgtgccctttggaggagccaaggccggcgtgaagatcaaccccaagaactacacagaaaatgagctggagaagatcacccggcgcttcaccatggagctggccaagaagggcttcatcggccctggggtggatgtgcctgccccagacatgaacacaggagagcgggagatgtcctggattgctgacacctacgccagcaccatcggccactatgacatcaatgcccacgcctgtgtgacaggcaagcccatcagccagggcggcatccacggccgcatcagcgccaccggccggggcgtcttccacggcatcgagaacttcatcaatgaggccagctacatgagcatcctgggcatgaccccaggcttccgggacaagacctttgtggtgcagggctttggaaatgtgggcctgcacagcatgagatacctgcacagatttggagccaagtgcatcgctgtgggggagagtgatggcagcatctggaacccagatggcatcgaccccaaggagctggaggacttcaagctgcagcacggcagcatcctgggcttccccaaggccaagccctatgagggcagcatcctggaggtggactgtgacatcctgatcccagctgccacagagaagcagctgaccaagagcaatgccccccgggtgaaggccaagatcatcgccgagggcgccaacggccccaccaccccagaggccgacaagatcttcctggagaggaacatcctggtgatcccagacctgtacctgaatgctgggggcgtgacagtgtcctactttgagtggctgaagaacctgaaccacgtgtcctatggccgcctgaccttcaagtatgaaagagacagcaactaccacctgctgctgtctgtgcaggagagcctggagaggaagtttgggaagcatggaggcaccatccccatcgtgcccacagctgagttccaggacagcatcagcggggccagcgagaaggacatcgtgcacagcgccctggcctacaccatggagaggtctgcccggcagatcatgcacacagccatgaagtacaacctgggcctggacctgaggacagctgcctacgtgaatgccatcgagaaggtgttcaaggtgtacagcgaggccggcgtgaccttcacctag

SEQ ID NO: 172429 - DNA, 1677 bp, Artificial Sequence
  derived and/or modified sequence
atgtaccggtacctggccaaggccctgctgcccagccgggccggcccggccgccctgggttccgccgccaatcatagtgccgctctcctaggccgtggacggggtcaacccgctgctgctagtcaaccaggcctggcgcttgccgctagacggcattattctgagctagtggccgatcgggaggatgaccctaatttctttaaaatggtagaaggcttcttcgatcgaggggccagcattgttgaggacaagcttgtgaaggacctcaggacccaagaatctgaggaacagaaacggaaccgagtgagaggtattttacgcatcatcaaaccatgtaatcacgtgttgtccctttcatttcctatccggcgggatgatggctcctgggaagtgattgagggctatcgggcccaacattcccagcaccggaccccttgtaagggcggaattcgctatagcacagacgtcagcgtggacgaagtcaaggcgttggcctccttaatgacttataaatgtgctgtggtggatgtcccattcggaggggcaaaagcaggggtaaaaataaacccaaagaattatacagaaaacgagttggagaaaataacaaggcggttcaccatggagcttgccaaaaagggcttcatcggcccaggagtcgacgtgcctgccccggatatgaatacgggagaaagggagatgtcttggattgcggatacatatgcttctactatcggacattacgatatcaatgctcacgcctgcgtgacaggcaagcctatttcccaaggcggtattcacggaaggatttctgctacaggacgaggtgtgtttcacgggatcgaaaacttcatcaatgaagccagctacatgagcattctgggcatgacccctggatttagggataaaactttcgtggtacagggcttcggaaatgttggactgcactctatgcgctatctgcataggtttggtgctaaatgcatagccgtcggcgaaagcgatggctctatttggaatcctgatggtatcgatccaaaggagttggaggacttcaaactccaacacggatcgatactgggctttccgaaggctaaaccttatgagggaagcatccttgaagttgattgcgacatcctgataccagctgccaccgagaaacaactcacaaagagtaatgctccccgggttaaagcgaagattatcgcggaaggagcaaatggcccaacaacacctgaggccgacaagattttcctcgagcggaatatcctggttatccccgatctgtatctaaatgctgggggtgtgacagtgagctactttgagtggctcaagaacttaaatcatgtgagctacggacggttaactttcaagtatgagagagatagcaattatcacctgctgctttcagtgcaagagagtttggaacggaagtttggaaagcacggcgggacaatccccatcgtacccaccgccgaattccaagactctatatctggcgcgtcagagaaggacatagttcatagtgcactcgcctacaccatggagcgctcagccagacagattatgcacacagccatgaaatataacctcggccttgacttgagaacagccgcatatgttaatgcgatcgaaaaggtgttcaaggtgtattctgaggccggggtgacctttacctag

SEQ ID NO: 172430 - DNA, 1677 bp, Artificial Sequence
  derived and/or modified sequence
atgtatagatatctcgccaaggccctgcttccttcccgcgcaggccctgccgcactgggcagtgcagctaatcattctgcggctttgctgggtcggggtcggggtcagcccgctgccgcatctcagcccggactggcactggctgcacgcagacattactctgagctagtggccgaccgggaagacgaccctaatttcttcaaaatggtggagggttttttcgaccgcggagcaagcatcgtggaggataaattggttaaggatcttagaacccaggaatccgaggagcagaaaagaaatagggttagaggcattcttcgcattatcaagccttgtaatcacgtgctgagcctttcttttccgatacggagagacgatgggtcttgggaggtaattgagggatatagggctcagcattcacaacatcgcaccccctgtaagggcggaattcgctattccaccgacgtgagtgtggatgaggttaaggccctagccagtctgatgacctacaaatgcgcggtggtggatgtgcctttcggcggagctaaggccggagtgaaaataaatcccaagaactatacagagaacgagttggaaaaaattactaggcgattcacaatggagctggcaaagaagggttttatagggccaggcgtggacgtacctgccccagatatgaacacaggcgagcgagagatgtcctggatcgccgatacatatgcatcaacaatcggccattatgacatcaacgcccacgcatgtgtgacgggaaaaccaatctctcagggcggaattcatggcagaattagcgccaccggcagaggggtctttcacgggatagaaaactttatcaatgaggcctcttacatgagtatccttgggatgaccccaggatttcgggacaagacattcgtggtgcagggttttgggaacgtgggccttcactcaatgagatacttgcaccgattcggggctaagtgcatagctgtgggcgagtctgacggctccatttggaatcccgatgggatcgaccctaaagagcttgaggactttaagttacagcacggtagcattctggggttccccaaggctaagccctatgaagggagtatactggaagttgactgcgacattcttatccctgcggctaccgagaagcaactgactaaatccaatgcgccacgcgtgaaagcaaaaatcattgccgagggtgctaatggccctactacacccgaagctgacaaaatttttctcgagaggaatatcctcgtaatacctgatctttacctgaacgcgggaggtgtgaccgtctcttattttgaatggctcaagaatttgaatcacgtgagttatggtcggcttacctttaaatacgaaagagattccaattaccatctacttttgagcgtgcaggaatcactggagcgaaaatttggaaaacatggagggaccatccccattgtgcccaccgcagagttccaagactcaatctctggcgcatctgaaaaagacatcgtgcattcagcattagcatatactatggagaggagcgccagacagataatgcacactgccatgaagtacaatctggggctggatctgcggacagctgcttatgtgaacgccatcgagaaggtgttcaaagtttacagcgaagccggagtaacattcacatag

SEQ ID NO: 172431 - DNA, 1677 bp, Artificial Sequence
  derived and/or modified sequence
atgtacagatacctggccaaggccctgctgcccagcagagccggccccgccgccctgggcagcgccgccaaccacagcgccgccctgctgggcagaggcagaggccagcccgccgccgccagccagcccggcctggccctggccgccagaagacactacagcgagctggtggccgacagagaggacgaccccaacttcttcaagatggtggagggcttcttcgacagaggcgccagcatcgtggaggacaagctggtgaaggacctgagaacccaggagagcgaggagcagaagagaaacagagtgagaggcatcctgagaatcatcaagccctgcaaccacgtgctgagcctgagcttccccatcagaagagacgacggcagctgggaggtgatcgagggctacagagcccagcacagccagcacagaaccccctgcaagggcggcatcagatacagcaccgacgtgagcgtggacgaggtgaaggccctggccagcctgatgacctacaagtgcgccgtggtggacgtgcccttcggcggcgccaaggccggcgtgaagatcaaccccaagaactacaccgagaacgagctggagaagatcaccagaagattcaccatggagctggccaagaagggcttcatcggccccggcgtggacgtgcccgcccccgacatgaacaccggcgagagagagatgagctggatcgccgacacctacgccagcaccatcggccactacgacatcaacgcccacgcctgcgtgaccggcaagcccatcagccagggcggcatccacggcagaatcagcgccaccggcagaggcgtgttccacggcatcgagaacttcatcaacgaggccagctacatgagcatcctgggcatgacccccggcttcagagacaagaccttcgtggtgcagggcttcggcaacgtgggcctgcacagcatgagatacctgcacagattcggcgccaagtgcatcgccgtgggcgagagcgacggcagcatctggaaccccgacggcatcgaccccaaggagctggaggacttcaagctgcagcacggcagcatcctgggcttccccaaggccaagccctacgagggcagcatcctggaggtggactgcgacatcctgatccccgccgccaccgagaagcagctgaccaagagcaacgcccccagagtgaaggccaagatcatcgccgagggcgccaacggccccaccacccccgaggccgacaagatcttcctggagagaaacatcctggtgatccccgacctgtacctgaacgccggcggcgtgaccgtgagctacttcgagtggctgaagaacctgaaccacgtgagctacggcagactgaccttcaagtacgagagagacagcaactaccacctgctgctgagcgtgcaggagagcctggagagaaagttcggcaagcacggcggcaccatccccatcgtgcccaccgccgagttccaggacagcatcagcggcgccagcgagaaggacatcgtgcacagcgccctggcctacaccatggagagaagcgccagacagatcatgcacaccgccatgaagtacaacctgggcctggacctgagaaccgccgcctacgtgaacgccatcgagaaggtgttcaaggtgtacagcgaggccggcgtgaccttcacctag

SEQ ID NO: 172432 - protein, 258 aa, Artificial Sequence
  derived and/or modified sequence
MAAPAPGLISVFSSSQELGAALAQLVAQRAACCLAGARARFALGLSGGSLVSMLARELPAAVAPAGPASLARWTLGFCDERLVPFDHAESTYGLYRTHLLSRLPIPESQVITINPELPVEEAAEDYAKKLRQAFQGDSIPVFDLLILGVGPDGHTCSLFPDHPLLQEREKIVAPISDSPKPPPQRVTLTLPVLNAARTVIFVATGEGKAAVLKRILEDQEENPLPAALVQPHTGKLCWFLDEAAARLLTVPFEKHSTL

SEQ ID NO: 172433 - DNA, 777 bp, Artificial Sequence
  derived and/or modified sequence
atggccgctcccgcccccgggttaatttcggttttctcatcttcgcaagagctgggggcagctcttgcccagctcgtggcgcagagagccgcttgctgtcttgctggggcacgggctagattcgccctcgggttgagtggcgggtcactggtgagcatgctggcccgagaattgcctgctgcagtcgccccagctgggcctgctagcctggcacggtggacccttggtttttgcgacgaacggctggtgccctttgaccacgctgaatccacctacggcctctacaggactcacctacttagccgcttacctattcccgagagccaggtcattactattaacccagagctgcccgttgaagaagccgccgaagactatgcgaaaaaactccggcaggcatttcagggagacagcattcctgtatttgatctgctcattttgggggtcgggcctgatggtcacacatgtagccttttcccagaccaccccctcttgcaagagcgggagaagattgtggcaccaatttctgactcccccaagccaccaccccaacgcgttacacttactctccccgtccttaatgccgctagaacagtgatcttcgtcgccactggggaagggaaggccgcggtactgaagcgcattttggaggaccaggaggaaaaccccttacccgccgccctggtgcaaccccataccggtaaactgtgttggttcctggacgaggctgccgctagactcctgactgtcccatttgagaaacacagcaccctgtag

SEQ ID NO: 172434 - DNA, 777 bp, Artificial Sequence
  derived and/or modified sequence
atggccgccccagcccctggcctcatcagcgtcttcagcagcagccaggagctgggcgccgccctggcccagctggtggcccagagagctgcctgctgcctggccggggcccgggccaggtttgccctgggcctgagcggcggcagcctggtgtccatgctggcccgggagctgcctgctgctgtggccccagctggccctgccagcctggcccgctggaccctgggcttctgtgatgagcggctggtgccctttgaccacgccgagagcacctacggcctgtaccgcacccacctgctgagccggctgcccatccctgagagccaggtgatcaccatcaaccctgagctgcctgtggaggaggccgctgaggactatgccaagaagctgcggcaggccttccagggcgacagcatccctgtgtttgacctgctgatcctgggcgtgggcccagatggccacacctgcagcctcttcccagaccaccccctgctgcaggagcgggagaagatcgtggcccccatcagtgacagccccaagcccccaccccagagggtgaccctgaccctgcctgtgctgaatgctgccaggacagtcatctttgtggccaccggggagggcaaggctgctgtgctgaagaggatcctggaggaccaggaggagaaccccctgcctgctgccctggtgcagccccacacaggcaagctgtgctggttcctggatgaagctgctgcccggctgctgactgtgccctttgagaagcacagcaccctgtag

SEQ ID NO: 172435 - DNA, 777 bp, Artificial Sequence
  derived and/or modified sequence
atggccgcccccgcccccggcctgatcagcgtgttcagcagcagccaggagctgggtgccgcattggcgcagctcgtcgcccagagagctgcgtgctgtttagccggggcacgcgcccgtttcgccctaggtttatccggcggatctctggtctccatgctggcgcgagaactgcctgcagccgtagccccagcaggaccagcatcccttgcgaggtggaccctaggtttttgcgacgaacgcttagtgccattcgaccacgcagagagcacatacggactgtatcgcacgcaccttctctcccggctgcccattcctgaatcgcaagtaattacaatcaaccctgaattgcccgtagaggaggcagctgaggattatgccaaaaagcttcgccaggctttccagggtgacagtatacccgtgttcgatctgcttattctcggtgtgggtcccgatggacatacatgttccttattccctgaccaccccttgctacaggagagagaaaaaatcgttgctccgatcagtgattcccccaagccacctccacagagagtcaccttgacgttgccagttcttaatgctgctcggaccgtgatctttgtcgctactggagaagggaaagctgctgtgctgaagagaatcctggaagaccaggaagaaaaccctctgccagcggcattagtgcagccacacacaggaaagttgtgttggtttctggacgaggccgccgcgcggctcttgaccgtgccattcgagaaacacagcaccctgtag

SEQ ID NO: 172436 - DNA, 777 bp, Artificial Sequence
  derived and/or modified sequence
atggccgctcccgctcctgggctgatcagcgtattcagttcgtctcaggagcttggtgcagcattggcccagctggttgcccagcgcgcagcttgctgcctggccggtgctcgggctagattcgcgttagggttatccggcggaagcctggtatccatgctagctcgcgaattgccagccgcagttgcccctgctggacccgctagcctggccagatggactcttggcttctgcgatgagaggctggtgccttttgatcacgcagaatccacctatggcctgtaccgaacccacctactaagccgcttgcccattcctgaaagtcaggtcattacgatcaaccctgaactgcctgtggaggaggcggcagaagattacgccaagaagctgaggcaagccttccaaggggacagtatccccgtgttcgatcttttaatattgggagttggccctgatgggcacacgtgcagcttgtttcccgaccacccactgttgcaggagcgggagaaaatcgtcgccccaattagcgatagccctaagccaccccctcagagggtaaccttaacccttcccgtcctgaacgcagcgagaactgtgatattcgttgcgactggggaaggtaaggctgccgtgcttaagaggatccttgaggaccaagaagaaaatcccctgccagccgcactcgtgcaaccgcatacgggaaaattgtgttggttccttgatgaggcagccgctaggctactgactgtgcccttcgagaaacactccactctctag

SEQ ID NO: 172437 - DNA, 1032 bp, Artificial Sequence
  derived and/or modified sequence
ctagcgacggccgtagggagcgcttcctcctccccgccgccgccctcgccatggccgcgccggccccgggcctcatctcggtgttctcgagttcccaggagctgggtgcggcgctagcgcagctggtggcccagcgcgcagcatgctgcctggcaggggcccgcgcccgtttcgcgctcggcctgtcgggcgggagcctcgtctcgatgctagcccgcgagctacccgccgccgtcgcccctgccgggccagctagcttagcgcgctggacgctgggcttctgcgacgagcgcctcgtgcccttcgatcacgccgagagcacgtacggcctctaccggacgcatcttctctccagactgccgatcccagaaagccaggtgatcaccattaaccccgagctgcctgtggaggaggcggctgaggactacgccaagaagctgagacaggcattccaaggggactccatcccggttttcgacctgctgatcctgggggtgggccccgatggtcacacctgctcactcttcccagaccaccccctcctacaggagcgggagaagattgtggctcccatcagtgactccccgaagccaccgccacagcgtgtgaccctcacactacctgtcctgaatgcagcacgaactgtcatctttgtggcaactggagaaggcaaggcagctgttctgaagcgcattttggaggaccaggaggaaaacccgctgcccgccgccctggtccagccccacaccgggaaactgtgctggttcttggacgaggcggccgcccgcctcctgaccgtgcccttcgagaagcattccactttgtagctggccagagggacgccgcagctgggaccaggcacgcggcccatggggctgggcccctgctggccgccactctccgggctctcctttcaaaaagccacgtcgtgctgctgctggaagccaacagcctccggccagcagccctacccggggctcaacacacaggctgtggctctggacatccggatattaaaaggagcgttgctgg

SEQ ID NO: 172438 - DNA, 777 bp, Artificial Sequence
  derived and/or modified sequence
atggccgcccccgcccccggcctgatcagcgtgttcagcagcagccaggagctgggcgccgccctggcccagctggtggcccagagagccgcctgctgcctggccggcgccagagccagattcgccctgggcctgagcggcggcagcctggtgagcatgctggccagagagctgcccgccgccgtggcccccgccggccccgccagcctggccagatggaccctgggcttctgcgacgagagactggtgcccttcgaccacgccgagagcacctacggcctgtacagaacccacctgctgagcagactgcccatccccgagagccaggtgatcaccatcaaccccgagctgcccgtggaggaggccgccgaggactacgccaagaagctgagacaggccttccagggcgacagcatccccgtgttcgacctgctgatcctgggcgtgggccccgacggccacacctgcagcctgttccccgaccaccccctgctgcaggagagagagaagatcgtggcccccatcagcgacagccccaagccccccccccagagagtgaccctgaccctgcccgtgctgaacgccgccagaaccgtgatcttcgtggccaccggcgagggcaaggccgccgtgctgaagagaatcctggaggaccaggaggagaaccccctgcccgccgccctggtgcagccccacaccggcaagctgtgctggttcctggacgaggccgccgccagactgctgaccgtgcccttcgagaagcacagcaccctgtag

SEQ ID NO: 172439 - protein, 199 aa, Artificial Sequence
  derived and/or modified sequence
MKSGLWYFFLFCLRIKVLTGEINGSANYEMFIFHNGGVQILCKYPDIVQQFKMQLLKGGQILCDLTKTKGSGNTVSIKSLKFCHSQLSNNSVSFFLYNLDHSHANYYFCNLSIFDPPPFKVTLTGGYLHIYESQLCCQLKFWLPIGCAAFVVVCILGCILICWLTKKKYSSSVHDPNGEYMFMRAVNTAKKSRLTDVTL

SEQ ID NO: 172440 - protein, 168 aa, Artificial Sequence
  derived and/or modified sequence
MKSGLWYFFLFCLRIKVLTGEINGSANYEMFIFHNGGVQILCKYPDIVQQFKMQLLKGGQILCDLTKTKGSGNTVSIKSLKFCHSQLSNNSVSFFLYNLDHSHANYYFCNLSIFDPPPFKVTLTGGYLHIYESQLCCQLKFWLPIGCAAFVVVCILGCILICWLTKKM

SEQ ID NO: 172441 - DNA, 600 bp, Artificial Sequence
  derived and/or modified sequence
atgaaaagtgggctgtggtactttttcctgttctgcctgagaatcaaggtgctcacaggcgagattaatgggtccgctaattacgagatgtttattttccacaatggaggtgtgcagatcttatgtaagtatccagacatcgtgcagcagttcaagatgcaacttctgaaaggcggacaaattctgtgtgacctgacaaaaacgaaaggatcaggcaacacggtaagtattaagtctcttaaattctgccacagccagttgtcaaacaactctgtgtcgtttttcctgtataacctggatcactcgcatgccaactactacttctgcaatctctccatcttcgatccccctcccttcaaagtgacactcacaggcggatatcttcatatctatgaatcacagctgtgttgtcagctgaaattctggctcccgattggctgcgctgcatttgttgtcgtctgcatcttgggctgtattctgatttgctggctgaccaagaaaaaatatagcagcagtgtgcatgaccctaatggcgaatatatgtttatgcgcgccgtgaatactgccaaaaaaagtaggctaacagatgtcacgttgtag

SEQ ID NO: 172442 - DNA, 507 bp, Artificial Sequence
  derived and/or modified sequence
atgaaatccggtctgtggtactttttcttgttctgcctgcgaattaaagtgctgaccggcgagattaatggatcagccaattacgagatgttcatctttcataacgggggcgtccagatactctgtaagtacccagacatcgtccagcagtttaaaatgcaactgttaaagggagggcaaatcttatgcgaccttaccaaaactaaaggcagcggaaacaccgtctcgattaagtcactgaaattctgccacagccaactgtcgaacaatagcgtgtccttttttctgtataacctggaccattcacatgctaactactatttctgcaatctgagcatctttgacccaccacccttcaaggtgaccctcacagggggctacctccatatttatgaaagtcaattatgttgccagctgaagttctggctgccaatcggatgcgccgcctttgtagtggtgtgcatcttagggtgtatcctgatttgttggctcactaagaagatgtag

SEQ ID NO: 172443 - DNA, 2645 bp, Artificial Sequence
  derived and/or modified sequence
cgagagcctgaattcactgtcagctttgaacactgaacgcgaggactgttaactgtttctggcaaacatgaagtcaggcctctggtatttctttctcttctgcttgcgcattaaagttttaacaggagaaatcaatggttctgccaattatgagatgtttatatttcacaacggaggtgtacaaattttatgcaaatatcctgacattgtccagcaatttaaaatgcagttgctgaaaggggggcaaatactctgcgatctcactaagacaaaaggaagtggaaacacagtgtccattaagagtctgaaattctgccattctcagttatccaacaacagtgtctctttttttctatacaacttggaccattctcatgccaactattacttctgcaacctatcaatttttgatcctcctccttttaaagtaactcttacaggaggatatttgcatatttatgaatcacaactttgttgccagctgaagttctggttacccataggatgtgcagcctttgttgtagtctgcattttgggatgcatacttatttgttggcttacaaaaaagaagtattcatccagtgtgcacgaccctaacggtgaatacatgttcatgagagcagtgaacacagccaaaaaatctagactcacagatgtgaccctataatatggaactctggcacccaggcatgaagcacgttggccagttttcctcaacttgaagtgcaagattctcttatttccgggaccacggagagtctgacttaactacatacatcttctgctggtgttttgttcaatctggaagaatgactgtatcagtcaatggggattttaacagactgccttggtactgccgagtcctctcaaaacaaacaccctcttgcaaccagctttggagaaagcccagctcctgtgtgctcactgggagtggaatccctgtctccacatctgctcctagcagtgcatcagccagtaaaacaaacacatttacaagaaaaatgttttaaagatgccaggggtactgaatctgcaaagcaaatgagcagccaaggaccagcatctgtccgcatttcactatcatactacctcttctttctgtagggatgagaattcctcttttaatcagtcaagggagatgcttcaaagctggagctattttatttctgagatgttgatgtgaactgtacattagtacatactcagtactctccttcaattgctgaaccccagttgaccattttaccaagactttagatgctttcttgtgccctcaattttctttttaaaaatacttctacatgactgcttgacagcccaacagccactctcaatagagagctatgtcttacattctttcctctgctgctcaatagttttatatatctatgcatacatatatacacacatatgtatataaaattcataatgaatatatttgcctatattctccctacaagaatatttttgctccagaaagacatgttcttttctcaaattcagttaaaatggtttactttgttcaagttagtggtaggaaacattgcccggaattgaaagcaaatttattttattatcctattttctaccattatctatgttttcatggtgctattaattacaagtttagttctttttgtagatcatattaaaattgcaaacaaaatcatctttaatgggccagcattctcatggggtagagcagaatattcatttagcctgaaagctgcagttactataggttgctgtcagactatacccatggtgcctctgggcttgacaggtcaaaatggtccccatcagcctggagcagccctccagacctgggtggaattccagggttgagagactcccctgagccagaggccactaggtattcttgctcccagaggctgaagtcaccctgggaatcacagtggtctacctgcattcataattccaggatctgtgaagagcacatatgtgtcagggcacaattccctctcataaaaaccacacagcctggaaattggccctggcccttcaagatagccttctttagaatatgatttggctagaaagattcttaaatatgtggaatatgattattcttagctggaatattttctctacttcctgtctgcatgcccaaggcttctgaagcagccaatgtcgatgcaacaacatttgtaactttaggtaaactgggattatgttgtagtttaacattttgtaactgtgtgcttatagtttacaagtgagacccgatatgtcattatgcatacttatattatcttaagcatgtgtaatgctggatgtgtacagtacagtactgaacttgtaatttgaatctagtatggtgttctgttttcagctgacttggacaacctgactggctttgcacaggtgttccctgagttgtttgcaggtttctgtgtgtggggtggggtatggggaggagaaccttcatggtggcccacctggcctggttgtccaagctgtgcctcgacacatcctcatccccagcatgggacacctcaagatgaataataattcacaaaatttctgtgaaatcaaatccagttttaagaggagccacttatcaaagagattttaacagtagtaagaaggcaaagaataaacatttgatattcagcaactgaaaa

SEQ ID NO: 172444 - DNA, 2528 bp, Artificial Sequence
  derived and/or modified sequence
ctgaacgcgaggactgttaactgtttctggcaaacatgaagtcaggcctctggtatttctttctcttctgcttgcgcattaaagttttaacaggagaaatcaatggttctgccaattatgagatgtttatatttcacaacggaggtgtacaaattttatgcaaatatcctgacattgtccagcaatttaaaatgcagttgctgaaaggggggcaaatactctgcgatctcactaagacaaaaggaagtggaaacacagtgtccattaagagtctgaaattctgccattctcagttatccaacaacagtgtctctttttttctatacaacttggaccattctcatgccaactattacttctgcaacctatcaatttttgatcctcctccttttaaagtaactcttacaggaggatatttgcatatttatgaatcacaactttgttgccagctgaagttctggttacccataggatgtgcagcctttgttgtagtctgcattttgggatgcatacttatttgttggcttacaaaaaagatgtgaccctataatatggaactctggcacccaggcatgaagcacgttggccagttttcctcaacttgaagtgcaagattctcttatttccgggaccacggagagtctgacttaactacatacatcttctgctggtgttttgttcaatctggaagaatgactgtatcagtcaatggggattttaacagactgccttggtactgccgagtcctctcaaaacaaacaccctcttgcaaccagctttggagaaagcccagctcctgtgtgctcactgggagtggaatccctgtctccacatctgctcctagcagtgcatcagccagtaaaacaaacacatttacaagaaaaatgttttaaagatgccaggggtactgaatctgcaaagcaaatgagcagccaaggaccagcatctgtccgcatttcactatcatactacctcttctttctgtagggatgagaattcctcttttaatcagtcaagggagatgcttcaaagctggagctattttatttctgagatgttgatgtgaactgtacattagtacatactcagtactctccttcaattgctgaaccccagttgaccattttaccaagactttagatgctttcttgtgccctcaattttctttttaaaaatacttctacatgactgcttgacagcccaacagccactctcaatagagagctatgtcttacattctttcctctgctgctcaatagttttatatatctatgcatacatatatacacacatatgtatataaaattcataatgaatatatttgcctatattctccctacaagaatatttttgctccagaaagacatgttcttttctcaaattcagttaaaatggtttactttgttcaagttagtggtaggaaacattgcccggaattgaaagcaaatttattttattatcctattttctaccattatctatgttttcatggtgctattaattacaagtttagttctttttgtagatcatattaaaattgcaaacaaaatcatctttaatgggccagcattctcatggggtagagcagaatattcatttagcctgaaagctgcagttactataggttgctgtcagactatacccatggtgcctctgggcttgacaggtcaaaatggtccccatcagcctggagcagccctccagacctgggtggaattccagggttgagagactcccctgagccagaggccactaggtattcttgctcccagaggctgaagtcaccctgggaatcacagtggtctacctgcattcataattccaggatctgtgaagagcacatatgtgtcagggcacaattccctctcataaaaaccacacagcctggaaattggccctggcccttcaagatagccttctttagaatatgatttggctagaaagattcttaaatatgtggaatatgattattcttagctggaatattttctctacttcctgtctgcatgcccaaggcttctgaagcagccaatgtcgatgcaacaacatttgtaactttaggtaaactgggattatgttgtagtttaacattttgtaactgtgtgcttatagtttacaagtgagacccgatatgtcattatgcatacttatattatcttaagcatgtgtaatgctggatgtgtacagtacagtactgaacttgtaatttgaatctagtatggtgttctgttttcagctgacttggacaacctgactggctttgcacaggtgttccctgagttgtttgcaggtttctgtgtgtggggtggggtatggggaggagaaccttcatggtggcccacctggcctggttgtccaagctgtgcctcgacacatcctcatccccagcatgggacacctcaagatgaataataattcacaaaatttctgtgaaatcaaatccagttttaagaggagccacttatcaaagagattttaacagtagtaagaaggcaaagaataaacatttgatattcagcaactgaaaa

SEQ ID NO: 172445 - DNA, 600 bp, Artificial Sequence
  derived and/or modified sequence
atgaagagcggcctgtggtacttcttcctgttctgcctgcgcatcaaggtgctgactggagagatcaatggaagtgccaactatgagatgttcatcttccacaatggaggagtgcagatcctgtgcaagtacccagacatcgtgcagcagttcaagatgcagctgctgaagggcggccagatcctgtgtgacctgaccaagaccaagggcagcggcaacacagtgtccatcaagagcctgaagttctgccacagccagctgagcaacaacagcgtgtccttcttcctgtacaacctggaccacagccacgccaactactacttctgcaacctgagcatctttgaccccccacccttcaaggtgaccctgaccggcggctacctgcacatctatgagagccagctgtgctgccagctgaagttctggctgcccatcggctgtgccgcctttgtggtggtgtgcatcctgggctgcatcctgatctgctggctgaccaagaagaagtacagcagctctgtgcatgaccccaatggagagtacatgttcatgagagctgtgaacacagccaagaagagccggctgacagatgtgaccctgtag

SEQ ID NO: 172446 - DNA, 507 bp, Artificial Sequence
  derived and/or modified sequence
atgaagagcggcctgtggtacttcttcctgttctgcctgcgcatcaaggtgctgactggagagatcaatggaagtgccaactatgagatgttcatcttccacaatggaggagtgcagatcctgtgcaagtacccagacatcgtgcagcagttcaagatgcagctgctgaagggcggccagatcctgtgtgacctgaccaagaccaagggcagcggcaacacagtgtccatcaagagcctgaagttctgccacagccagctgagcaacaacagcgtgtccttcttcctgtacaacctggaccacagccacgccaactactacttctgcaacctgagcatctttgaccccccacccttcaaggtgaccctgaccggcggctacctgcacatctatgagagccagctgtgctgccagctgaagttctggctgcccatcggctgtgccgcctttgtggtggtgtgcatcctgggctgcatcctgatctgctggctgaccaagaagatgtag

SEQ ID NO: 172447 - DNA, 600 bp, Artificial Sequence
  derived and/or modified sequence
atgaagagcggcctgtggtacttcttcctgttctgcctgcggatcaaagtgcttacaggtgaaattaacgggagtgctaactatgagatgttcatattccataatggcggtgtacagatactttgcaaatacccagacatcgtgcaacagtttaaaatgcaactgctgaaaggcggccagattctgtgcgacttgaccaaaaccaagggctctgggaataccgtgtcaattaaatcattgaaattttgccactcccagctctctaataattcagtcagctttttcctctacaacctcgaccactctcatgccaattactacttctgtaatctgtctatcttcgatcccccaccctttaaggtaaccctgactggggggtacctgcacatttatgagtcccagctctgctgccagctgaagttttggctgcctattggctgcgccgcctttgtcgttgtctgtatactgggctgcattcttatttgctggcttaccaaaaagaaatatagctcatcagtgcacgaccctaacggagagtacatgttcatgcgagctgttaacaccgccaaaaaaagccggctaaccgatgtcacgctgtag

SEQ ID NO: 172448 - DNA, 507 bp, Artificial Sequence
  derived and/or modified sequence
atgaagagcggcctgtggtacttcttcctgttctgcctgcggatcaaagtgctcactggcgaaatcaatggcagcgcaaattacgagatgtttattttccataacgggggcgtacagatcctgtgcaaatatcctgacatcgtgcagcagttcaagatgcagttgctgaaagggggccaaatcctttgcgatcttaccaaaactaaggggtctgggaataccgtgagcattaagtctctgaaattctgtcatagccagttgagcaacaatagcgtgagtttcttcctttacaatctcgatcacagccacgcgaactactatttctgtaacctctctatctttgatcctcccccctttaaagttacactgactggagggtacttacatatctatgaaagccagctgtgctgccagctgaagttctggttgccgataggatgcgccgcatttgtagttgtctgtatcctggggtgcatcctcatctgctggctcacaaagaaaatgtag

SEQ ID NO: 172449 - DNA, 600 bp, Artificial Sequence
  derived and/or modified sequence
atgaagagcggactgtggtactttttcctattctgcctcagaatcaaggtcctgaccggggagatcaacggatcagctaattacgaaatgttcatctttcacaatggcggagtccagatcttatgcaaataccctgatatcgtgcaacagttcaaaatgcagttgttgaaggggggacagatcctctgcgacttaactaaaactaagggatctggcaatactgtgtcaatcaagagtcttaagttttgtcactctcaacttagcaacaacagtgtctcctttttcttgtataatttagaccactctcacgccaattattatttctgcaacctgagtatctttgatccccctccatttaaggtgacattgacagggggttaccttcacatatacgagtcccaattgtgctgccagctgaagttctggttaccgattggatgtgccgcttttgtggtcgtttgtattcttgggtgcatcttgatctgctggttgacaaagaaaaaatacagtagcagcgtgcacgacccgaacggggaatacatgttcatgcgcgcagtgaataccgccaaaaaatcccggttgaccgatgtgactctgtag

SEQ ID NO: 172450 - DNA, 507 bp, Artificial Sequence
  derived and/or modified sequence
atgaaaagtgggctgtggtatttcttcctgttttgtctcaggattaaagtgctcaccggggagatcaacggatccgccaactacgagatgttcatttttcataacggaggggtgcagatcctgtgtaaatatccagatattgtgcaacagttcaagatgcagctactgaaagggggacagatcctctgcgatctgacgaagaccaagggcagcggaaatacagtgtccatcaaatccttaaagttttgtcatagccagctctctaataactcagtcagtttttttctctataatctggaccatagccacgctaactattatttttgcaacctaagcatattcgacccccctccattcaaggttacactaaccggaggatacctgcatatttacgagtcgcagctttgctgccagttgaaattctggctccccattggatgcgctgcctttgtggtggtctgtatcctcggatgtatcctgatttgctggctaactaaaaaaatgtag

SEQ ID NO: 172451 - DNA, 600 bp, Artificial Sequence
  derived and/or modified sequence
atgaagagcggcctgtggtacttcttcctgttctgcctgagaatcaaggtgctgaccggcgagatcaacggcagcgccaactacgagatgttcatcttccacaacggcggcgtgcagatcctgtgcaagtaccccgacatcgtgcagcagttcaagatgcagctgctgaagggcggccagatcctgtgcgacctgaccaagaccaagggcagcggcaacaccgtgagcatcaagagcctgaagttctgccacagccagctgagcaacaacagcgtgagcttcttcctgtacaacctggaccacagccacgccaactactacttctgcaacctgagcatcttcgaccccccccccttcaaggtgaccctgaccggcggctacctgcacatctacgagagccagctgtgctgccagctgaagttctggctgcccatcggctgcgccgccttcgtggtggtgtgcatcctgggctgcatcctgatctgctggctgaccaagaagaagtacagcagcagcgtgcacgaccccaacggcgagtacatgttcatgagagccgtgaacaccgccaagaagagcagactgaccgacgtgaccctgtag

SEQ ID NO: 172452 - DNA, 507 bp, Artificial Sequence
  derived and/or modified sequence
atgaagagcggcctgtggtacttcttcctgttctgcctgagaatcaaggtgctgaccggcgagatcaacggcagcgccaactacgagatgttcatcttccacaacggcggcgtgcagatcctgtgcaagtaccccgacatcgtgcagcagttcaagatgcagctgctgaagggcggccagatcctgtgcgacctgaccaagaccaagggcagcggcaacaccgtgagcatcaagagcctgaagttctgccacagccagctgagcaacaacagcgtgagcttcttcctgtacaacctggaccacagccacgccaactactacttctgcaacctgagcatcttcgaccccccccccttcaaggtgaccctgaccggcggctacctgcacatctacgagagccagctgtgctgccagctgaagttctggctgcccatcggctgcgccgccttcgtggtggtgtgcatcctgggctgcatcctgatctgctggctgaccaagaagatgtag

SEQ ID NO: 172453 - protein, 214 aa, Artificial Sequence
  derived and/or modified sequence
MGLAGVCALRRSAGYILVGGAGGQSAAAAARRYSEGEWASGGVRSFSRAAAAMAPIKVGDAIPAVEVFEGEPGNKVNLAELFKGKKGVLFGVPGAFTPGCSKTHLPGFVEQAEALKAKGVQVVACLSVNDAFVTGEWGRAHKAEGKVRLLADPTGAFGKETDLLLDDSLVSIFGNRRLKRFSMVVQDGIVKALNVEPDGTGLTCSLAPNIISQL

SEQ ID NO: 172454 - DNA, 645 bp, Artificial Sequence
  derived and/or modified sequence
atgggacttgctggggtctgcgccctcaggcggtccgcgggttatattttggtggggggtgccggagggcagagtgcagctgcagctgcccgccgatattctgagggagagtgggcttcaggtggcgtacggtctttcagccgagctgccgctgccatggcaccaattaaagtaggagatgccatcccggcggttgaggtttttgaaggggagcccggtaacaaggtaaacctggcggagttgttcaagggcaaaaagggagtgctgttcggggtgccaggtgccttcacaccaggctgcagcaaaacacatctccctggatttgtggagcaggccgaggcacttaaggccaaaggcgttcaggttgtggcctgcttgagcgtaaacgatgccttcgttactggtgagtggggccgggcccataaagcagagggaaaagtccgtctgctcgctgatccaaccggcgcctttggcaaggaaacagacctgctgctcgatgatagcctggtcagtattttcgggaatcgcaggctgaaaagattcagtatggtggttcaggatgggatcgtgaaagctctcaatgtggagcccgacggcactggacttacttgcagccttgcaccaaatattatatcacagctgtag

SEQ ID NO: 172455 - DNA, 645 bp, Artificial Sequence
  derived and/or modified sequence
atgggcctggccggcgtgtgtgccctgcggcgctctgctggctacatcctggtgggcggggccggcggccagagcgctgctgctgctgcccggcgctacagcgagggggagtgggccagcggcggcgtgcgctccttcagcagagctgctgctgccatggcccccatcaaggtgggagatgccatcccagctgtggaggtgtttgaaggagagcccggcaacaaggtgaacctggccgagctgttcaagggcaagaagggcgtgctgtttggagtgcctggggccttcaccccaggctgcagcaagacccacctgcccggctttgtggagcaggccgaggccctgaaggccaagggcgtgcaggtggtggcctgcctgtctgtgaatgatgcctttgtgactggagagtggggccgggcccacaaggccgagggcaaggtgcggctgctggccgaccccaccggggccttcggcaaggagacagacctgctgctggatgacagcctggtgtccatctttggaaacagaaggctgaagcgcttctccatggtggtgcaggacggcatcgtgaaggccctgaatgtggagccagatggcaccggcctgacctgcagcctggcccccaacatcatcagccagctgtag

SEQ ID NO: 172456 - DNA, 645 bp, Artificial Sequence
  derived and/or modified sequence
atgggcctggccggcgtgtgcgccctgcggcggagcgccggctacattctggtggggggggcaggcggacagtctgcggccgctgccgctagacgatacagcgagggcgaatgggcttctgggggagttagatcctttagcagggccgcagctgcaatggcccctatcaaagtgggggacgccatccccgcggtggaggttttcgagggcgagcctggcaataaagtgaacctggccgagctcttcaaaggaaaaaaaggcgtgctattcggggtccctggggcttttacgccagggtgtagtaagacccatctcccaggtttcgttgaacaggctgaggctcttaaggcaaagggtgtgcaggtagttgcatgtctttctgtgaatgacgcctttgttactggggagtggggccgcgctcacaaagcggaaggaaaagtcaggttgctcgcggatcccactggggccttcgggaaagaaaccgatcttctccttgacgactcccttgtctcgattttcgggaaccggcgtctgaagcgttttagtatggtcgtccaagacgggattgtaaaagctttgaacgtggagcccgatggcactggccttacctgctcactcgccccgaacattatatctcaactgtag

SEQ ID NO: 172457 - DNA, 893 bp, Artificial Sequence
  derived and/or modified sequence
cgcgcctgcgcagtggaggcggcccaggcccgccttccgcagggtgtcgccgctgtgccgctagcggtgccccgcctgctgcggtggcaccagccaggaggcggagtggaagtggccgtggggcgggtatgggactagctggcgtgtgcgccctgagacgctcagcgggctatatactcgtcggtggggccggcggtcagtctgcggcagcggcagcaagacggtacagtgaaggagagtgggcgtctggcggggtccgcagtttcagcagagccgctgcagccatggccccaatcaaggtgggagatgccatcccagcagtggaggtgtttgaaggggagccagggaacaaggtgaacctggcagagctgttcaagggcaagaagggtgtgctgtttggagttcctggggccttcacccctggatgttccaagacacacctgccagggtttgtggagcaggctgaggctctgaaggccaagggagtccaggtggtggcctgtctgagtgttaatgatgcctttgtgactggcgagtggggccgagcccacaaggcggaaggcaaggttcggctcctggctgatcccactggggcctttgggaaggagacagacttattactagatgattcgctggtgtccatctttgggaatcgacgtctcaagaggttctccatggtggtacaggatggcatagtgaaggccctgaatgtggaaccagatggcacaggcctcacctgcagcctggcacccaatatcatctcacagctctgaggccctgggccagattacttcctccacccctccctatctcacctgcccagccctgtgctggggccctgcaattggaatgttggccagatttctgcaataaacacttgtggtttgcggcca

SEQ ID NO: 172458 - DNA, 645 bp, Artificial Sequence
  derived and/or modified sequence
atgggactcgccggagtttgtgccctcaggcgaagcgctggctatattctggtcggaggtgccggtggacagtccgctgcagcggcagcgcgtcgatactcagagggggaatgggcaagtggtggcgtgcggagtttctcccgcgctgcggctgcaatggctcccattaaggtgggggacgctattcctgcggtcgaagtgtttgagggggaaccagggaacaaggtgaatttggcagaactgttcaagggtaaaaagggtgttttgttcggagtccctggagctttcacacccggatgttccaagactcatctgccaggctttgtcgaacaagcagaagctctaaaggccaaaggcgtgcaggtcgtggcgtgtttgtctgtcaacgacgctttcgtcactggcgagtgggggagggctcacaaggctgagggcaaagtgagactcctcgctgacccaaccggggcttttggcaaggaaaccgatctgctgctggacgactccttggttagcattttcggcaacaggaggctcaaaagattctcgatggtggtccaagatgggatcgtcaaggccttgaacgtggaaccagacggtacagggttaacctgcagcctagctccgaacatcatcagtcaactctag

SEQ ID NO: 172459 - DNA, 645 bp, Artificial Sequence
  derived and/or modified sequence
atgggcctggccggcgtgtgcgccctgagaagaagcgccggctacatcctggtgggcggcgccggcggccagagcgccgccgccgccgccagaagatacagcgagggcgagtgggccagcggcggcgtgagaagcttcagcagagccgccgccgccatggcccccatcaaggtgggcgacgccatccccgccgtggaggtgttcgagggcgagcccggcaacaaggtgaacctggccgagctgttcaagggcaagaagggcgtgctgttcggcgtgcccggcgccttcacccccggctgcagcaagacccacctgcccggcttcgtggagcaggccgaggccctgaaggccaagggcgtgcaggtggtggcctgcctgagcgtgaacgacgccttcgtgaccggcgagtggggcagagcccacaaggccgagggcaaggtgagactgctggccgaccccaccggcgccttcggcaaggagaccgacctgctgctggacgacagcctggtgagcatcttcggcaacagaagactgaagagattcagcatggtggtgcaggacggcatcgtgaaggccctgaacgtggagcccgacggcaccggcctgacctgcagcctggcccccaacatcatcagccagctgtag

SEQ ID NO: 172460 - protein, 709 aa, Artificial Sequence
  derived and/or modified sequence
MPGIDKLPIEETLEDSPQTRSLLGVFEEDATAISNYMNQLYQAMHRIYDAQNELSAATHLTSKLLKEYEKQRFPLGGDDEVMSSTLQQFSKVIDELSSCHAVLSTQLADAMMFPITQFKERDLKEILTLKEVFQIASNDHDAAINRYSRLSKKRENDKVKYEVTEDVYTSRKKQHQTMMHYFCALNTLQYKKKIALLEPLLGYMQAQISFFKMGSENLNEQLEEFLANIGTSVQNVRREMDSDIETMQQTIEDLEVASDPLYVPDPDPTKFPVNRNLTRKAGYLNARNKTGLVSSTWDRQFYFTQGGNLMSQARGDVAGGLAMDIDNCSVMAVDCEDRRYCFQITSFDGKKSSILQAESKKDHEEWICTINNISKQIYLSENPEETAARVNQSALEAVTPSPSFQQRHESLRPAAGQSRPPTARTSSSGSLGSESTNLAALSLDSLVAPDTPIQFDIISPVCEDQPGQAKAFGQGGRRTNPFGESGGSTKSETEDSILHQLFIVRFLGSMEVKSDDHPDVVYETMRQILAARAIHNIFRMTESHLLVTCDCLKLIDPQTQVTRLTFPLPCVVLYATHQENKRLFGFVLRTSSGRSESNLSSVCYIFESNNEGEKICDSVGLAKQIALHAELDRRASEKQKEIERVKEKQQKELNKQKQIEKDLEEQSRLIAASSRPNQASSEGQFVVLSSSQSEESDLGEGGKKRESEA

SEQ ID NO: 172461 - DNA, 6058 bp, Artificial Sequence
  derived and/or modified sequence
gctcggcgcctggagaaggctgtgcgggcggggacggctgcagcccttgccggagagggcgggccggggtcagctgcggcgggcgggccggcgcggggagctgtgggcggcagctgcgtctcctgccaccgccctccctccgccacgatgccggggatcgacaagctgcccatcgaggagacgctggaggacagcccgcagacaaggtctttactaggtgtatttgaagaagatgccacagctatttccaactatatgaaccagttgtatcaagctatgcatcggatttatgatgcacagaatgaattaagtgcagcaacacacctgacctcaaaacttttaaaagaatatgaaaaacagcgttttccattgggaggtgatgatgaagttatgagctctacattgcaacagttttcaaaagttatagatgagcttagctcttgtcatgcagtgctttcaactcaacttgctgatgccatgatgttccccattacccagtttaaagaaagagatctgaaagaaatactaacattaaaggaagtatttcagattgcaagtaatgatcatgatgctgcgattaatagatatagccgtttatcaaaaaaaagagaaaatgacaaggtgaagtatgaagtaacagaagatgtgtacacatccagaaagaaacaacaccagaccatgatgcattatttttgtgcattaaatactcttcagtacaagaagaaaatagcattgttagaacctctacttgggtacatgcaagctcagataagtttctttaagatgggttctgaaaatcttaatgaacaactggaagaatttttagctaatattggaacaagcgttcagaatgttcgcagggaaatggacagtgatatagagaccatgcaacagacaatagaggatttggaagtagccagtgatcccttatatgtgcctgacccagaccccaccaaatttcctgttaatcgaaatttaacccgaaaggctggataccttaatgctaggaataaaacaggcttggtgtcatctacctgggacagacagttttacttcacgcagggtggaaatttaatgagtcaggcccgtggggatgtagcaggaggcctggccatggacatagacaactgttcagtgatggctgtggactgtgaagacagacgatattgttttcagatcacctctttcgatggaaaaaaatcttcaattttgcaagcagagagtaaaaaagatcatgaagagtggatctgtacaataaacaacatatctaaacaaatatacttaagtgaaaatccagaggaaactgctgcacgagtaaatcaatcagctctggaagctgtcactccttccccatctttccagcagaggcacgagagcctgcggccagcagcaggacaatctcggccaccgacagctcgaaccagcagttcaggatccttaggatctgagtctacaaatttggctgccctctctctagattctcttgttgccccagacaccccaatacagtttgacataatttctcctgtgtgtgaagatcagcctggccaggcaaaagcctttggccagggaggcaggcgtacaaatccatttggagaatctggaggaagtacaaaatctgaaactgaagattctattcttcatcagttatttattgtccgattccttggttcaatggaggtgaaatcagatgaccatccagatgttgtttatgaaactatgcgccaaatcttagctgcccgggccatccataacatctttcgtatgacagaatcgcatttattagtcacttgtgactgtttaaagttaattgatccacagacacaagttacaaggctcacgtttccattaccttgtgtagttttgtatgctacacaccaggaaaataagcgcctttttggatttgttcttcggacatcaagcgggagaagtgaaagtaatctgtcatcagtctgctatatatttgagtcaaacaatgagggggaaaagatatgtgattctgttggactggcaaaacagatagctttgcatgctgaactggatcgtagggcatcagaaaaacaaaaagaaatagagagagtaaaagagaagcaacagaaagaactcaataaacaaaaacagattgaaaaggacttggaagaacaaagtcggttgatagctgcttccagtagaccaaaccaagccagtagtgaggggcagtttgttgtccttagcagtagccagtcagaagagagtgatttgggagaaggaggaaagaagagagaatcagaagcataagcttatacttttggtagatattcccccttggaatttgacagtttctatggtgaaatggcagaaggtaacaactatgttgaaatatcaaggaggagattaagctttatatttgcttatttgttgtagctacattttaaaaaaaagattgaacttgatgacttaggtttgcattgatcttttttcccccttaaacataatgtactatgtattaacatctaaaggaaacctgctcatctccctgaagcagactgctgaggaattacatttgctcaagaattttttccgtcaaattgtgaacttttaattcttgcattgtaattggctgtgtccataagaaatcatttattcttcaggcttagacattcatggatatgcttttctttcattaggaacattttgctggtgatgaggaagcatttagctgaataagtttaaagccctttatacagagaattctacaagtttgcaaatattttaacaatattaaatgtgcaatagaacttttataaaataattagaacagagattttacagttaaggtttcaaattgtggcaggtggtactgttgatctcagggtactttctgggattgctcacatttctctaatgtactgcacttgatgccagtaggaaagaagcttaagtgtcttcagttcaagattgatagagcccttggcattttattatcacattcttagttctcaggttgggacttcaattactgctgcagagcagtagtggttaaaaataagatattggaatttattaaaagatttttgttcaatacattttagattaggattgacaagtaaagatactgctatggaatgatacattgtattttctgcattgtgtgaaatagtttttattgaaagtcaagtgacatttcaaaagaagttctataacaattatgtttcatgcttaaagtaaaaattcccagagtttagtttagaaaatgtaatcttttaaatttcagactgatatattcccagtattttcataatgccatgttttgataaagtactgaatcaccactttatatccacaaaggcaaataactaatgtatgataatagaataatttgcactaattattgtaaatatgtctactcttcaaatgagtaaaaggtccaattttgtgaaagattgaaaatgaattgaatgcctagtagagtataggagaagttgaccaaggaaggatttaacctggtgccaaggttaaaataacatttctctactgcctattgtttatgttaaaccttaattttttttctgtaatcacttttaacactgctaatagaaattatgttttcatgtgtttcacatgaaaaagtatatatatacaaagttaatatagtgggtaaaatactttacatagtcacacatttacaaatttttcaagaggttagccactaagactttaataattttacaagggaaaaagcctttttttttctttgatatacagttttttcttcttagttctgcattagaaatggcatctgttttaggtctcaaaatataactcagctgtttcacactgtatatgtacattgttttctgtaggaataggataatgatatataggatcatgatattccttctatccatgtgccaaatgggtgtaatgtttatttactgatgctttatgttaccaaaacatacagtaaaaaagtagaaatttatgaaatacttttgataaaaagtttattttgtgcttaccaaaaggaatgctttcacaatagtgtatcagttcttttgttttgttaaagttggaatttattctgttgccagcatttaagtagtcatggcaagtcctgtttttaagaccttttggagactggagctttctgttccattaagtcttttgtttatactacaaattgtcacctcacttagttcagatgaaatctgttactctacaaggaaggtgttcatcattaggaggcagctttactaagctggtgctttgcatggtagcaagtgctgccctttatcagcaccctgggtcatagtgtaggctagagttaaggcactggcagacttagggatgctggacagacctgtagttcgttttaagtcatgttcacaggaatttctacaataataaacccatcatctccataggtcagatcgaagtgcattccaatgctaaatagaagttatgagtgggtttaacaattttagatgattcagcttttgttccattactgttgaactatatgaactattccattactgcagagatttaagtatctgttttaataagctctttttgttatttaaaggctgcccatgggtttctgcctagtggtaaagctgattgttaccctcctttgaaatcccttctagttctgagatgctttgagggtaactggattcgattttgggatatcttttctcacattcagacttacacttaatggtgttagaaatcaacaaaactcctttttaaaaagaaaagatattaagcctgcctacttctacaatgcattctgttacctatttgaacagtatgtttgtaactatggcaatgaagtcagtagataggaaaccagttattccttctacctttaaaaattttgagaacttgccaaccagggattaaagctattatcttgaacagagtccctaaagctagtctagtttttgccacatctgcaatgattattgtttaatttcaaaagaatcctcaggctctacaatctaggggtggtaaatgtgtttccactatacttgggaaaaggtcagtaggatgtgcatcctagggaagataaaatcgtatatggtaaaggcatttgagttaattttgcattatatctaggaaccatattatttaaaatttgaatcctattaatgctgagagatcctaagagctagtatgttgtaaaacctgccacctgaataaaatgaaaaaaaaagtgtttttttgagacagagtcttgctctgttgcccaggctggagtgcagtggtgtgatcttgggtcactgcaaactccgcctcccaggttcacgccattctcctgcctcagcctcccgagtagctgggaccacaggggcccaccaccgcgcccggctaattttttgtatttttagtagagacggggtttcaccgtgttagccaggatgttctcgatctcctgacctcatgatccgcccgcctcggcctcccaaagtgctgggattacaggcgtgagccaccgtgcccggccctaaaatgaaattattaatgttggttctgaaacagcctcttagcattcagattgtattttaaatacttaaacacaccaattgtagaaagcaaccctttatttttagcaagtttggtttactcttctcccatgagattttgtctttctacattaactagtaagacataaagatttgaaactggaactatattatactttttaaccaatctctgtggcttcactcatgaaatttacttcagttaatatgagactgggggttaagttgtaactaatatgcaaaattgctttgtatatttggtgattttgtaatgtaagtgaattgattcttatttcactgatactattaatcatgcagtgtacaattcaaaatcatgcaatgtttcactttagaattggatttgaagaactcgactttatgtgatcatggtattggtatacatgtggggtggagaacttattttttcattttgtcacaataggtatatactgacaaggcttcaggaaaaaagttgttagaagattttttaatgtataataaagtccatgatttttgtacagtgttttttaatg

SEQ ID NO: 172462 - DNA, 2130 bp, Artificial Sequence
  derived and/or modified sequence
atgcctggtattgacaaacttcctattgaggagacattagaggacagcccacaaacccggagcttgctgggagtgttcgaggaggatgctaccgctatttcaaattacatgaaccagctataccaggctatgcatcgaatttacgacgctcagaacgagctttccgccgccacgcatttaacctccaagctcctgaaagaatacgagaagcaaagatttccccttgggggggatgatgaggtcatgtctagtaccttacagcagttttcaaaagtgatcgacgagttatcttcctgtcacgccgtcctatccacccagttagcggatgctatgatgttccccataacccagttcaaagaaagagacctcaaagaaatactgacgcttaaggaagtctttcagatagccagtaatgatcatgacgcagctattaatcggtactcacggctgtcaaaaaagagggaaaatgataaggttaagtacgaggtcacagaggatgtctatacaagtagaaagaagcaacaccaaaccatgatgcactacttttgcgctctaaatactctgcagtacaagaaaaaaatcgcactcctagagcctctgctggggtacatgcaggctcagattagtttctttaaaatggggtctgagaatctcaacgagcagctagaggagtttctcgctaacatcgggacaagcgtgcagaacgtgcgcagagagatggattcggatatagaaacgatgcagcagactatagaggatttggaggtggcctccgatccactctacgttccagatcctgacccgactaagtttccagtaaacaggaatctgactaggaaggccggctacctcaatgcaaggaataaaacaggcctggtttcttccacttgggatcggcagttttattttacccagggcggtaatctgatgagccaagctcgaggggatgtcgccggcggtttagccatggatatcgacaactgctcagtgatggccgtcgactgcgaagaccgccggtactgcttccagatcacaagctttgatggaaagaagagctccattttacaggccgaaagcaaaaaggatcacgaggaatggatctgtaccatcaacaatatcagcaagcaaatctacttatcagaaaaccctgaggagacggcggcccgagtcaatcagagcgctctcgaggctgtcacccctagcccatcatttcagcagcgccacgaatccttgaggccggcggctgggcaaagcaggcctcctacagctcgcacaagcagcagcggctccctcgggagcgaatcaaccaatcttgccgctctgtctctagactccttggtcgcccctgacacacctatacagtttgatattatctctccagtgtgtgaagatcagcccggacaggccaaagcattcggtcagggaggcaggcgcaccaacccgtttggggaatcaggtgggtcaacaaagtccgagaccgaagattccattcttcatcaactgttcatcgtgcgctttttgggctcaatggaagtgaagagcgatgaccatcctgatgttgtgtatgagacaatgcggcagatcctggctgcccgcgccatccacaatattttccggatgacggagtcacacctactggtgacatgtgactgtttgaaactgatagacccacagactcaggtcacgaggttgactttccccctgccctgtgttgtgctgtacgctacccaccaagaaaacaagcggctgtttggcttcgtccttcgtacatcgtcgggcagatcagaatctaatcttagttccgtgtgctacatttttgagtccaacaacgagggggagaaaatttgcgacagcgtgggactggccaaacaaatagccttgcacgccgagctcgaccgccgagcatctgagaagcagaaagagatagaaagagtgaaagagaagcaacagaaggagctcaacaaacagaagcagattgagaaagatctggaagaacaaagccggttaatcgctgcttcttctcgtcctaaccaggctagttcagaagggcagttcgttgtgctgtcatcctcccaatccgaggagtcagacctgggggaagggggtaagaagagagaatccgaggcctag

SEQ ID NO: 172463 - DNA, 2130 bp, Artificial Sequence
  derived and/or modified sequence
atgcctggcatcgacaagctgcccatcgaggagaccctggaggacagcccccagaccaggagcctgctgggcgtgtttgaggaggatgccacagccatcagcaactacatgaaccagctgtaccaggccatgcaccgcatctatgatgcccagaatgagctgtctgctgccacccacctgaccagcaagctgctgaaggagtatgagaagcagcgcttccccctgggcggagatgatgaggtgatgagcagcaccctgcagcagttcagcaaggtgattgatgagctgagcagctgccacgctgtgctgagcacccagctggctgatgccatgatgttccccatcacccagttcaaggagcgggacctgaaggagatcctgaccctgaaggaggtgttccagatcgccagcaatgaccatgatgctgccatcaaccgctacagccggctgagcaagaagagagaaaatgacaaggtgaagtatgaggtgacagaagatgtgtacaccagcaggaagaagcagcaccagaccatgatgcactacttctgtgccctgaacaccctgcagtacaagaagaagatcgccctgctggagcccctgctgggctacatgcaggcccagatctccttcttcaagatgggcagcgagaacctgaatgagcagctggaggagttcctggccaacatcggcacctctgtgcagaatgtgagaagagagatggacagcgacatcgagaccatgcagcagaccatcgaggacctggaggtggccagtgaccccctgtatgtgcctgaccctgaccccaccaagtttcctgtgaacagaaacctgaccaggaaggccggctacctgaatgccaggaacaagacaggcctggtgagcagcacctgggaccggcagttctacttcacccagggcggcaacctgatgagccaggcccggggagatgtggccggcggcctggccatggacatcgacaactgcagcgtgatggctgtggactgtgaggaccggcgctactgcttccagatcaccagctttgatggcaagaagagcagcatcctgcaggccgagagcaagaaggaccacgaggagtggatctgcaccatcaacaacatcagcaagcagatctacctgtctgaaaatcctgaggagacagctgcccgggtgaaccagagcgccctggaggccgtgacccccagccccagcttccagcagagacatgagagcctgcggcctgctgctggccagagccggcccccaacagcccggaccagcagcagcggcagcctgggcagcgagagcaccaacctggccgccctgagcctggacagcctggtggccccagacacccccatccagtttgacatcatcagccctgtgtgtgaggaccagcccggccaggccaaggccttcggccagggcggccgccgcaccaacccctttggagagagcggcggcagcaccaagtcagaaacagaggacagcatcctgcaccagctgttcatcgtgcgcttcctgggctccatggaggtgaagagtgatgaccacccagatgtggtgtatgagaccatgaggcagatcctggccgcccgggccatccacaacatcttcaggatgacagagagccacctgctggtgacctgtgactgcctgaagctgattgacccccagacccaggtgacccggctgaccttccccctgccctgtgtggtgctgtatgccacccaccaggagaacaagaggctgtttggatttgtgctgcggaccagcagcggccgctctgagagcaacctgagctctgtgtgctacatctttgagagcaacaatgaaggagagaagatctgtgacagcgtgggcctggccaagcagatcgccctgcatgctgagctggacagaagagccagcgagaagcagaaggagattgaaagagtgaaggagaagcagcagaaggagctgaacaagcagaagcagatcgagaaggacctggaggagcagagccggctgattgctgccagcagccggcccaaccaggccagcagcgagggccagtttgtggtgctgagcagcagccagagcgaggagagtgacctgggggagggcggcaagaagcgggagagcgaggcctag

SEQ ID NO: 172464 - DNA, 2130 bp, Artificial Sequence
  derived and/or modified sequence
atgcccggcatcgacaagctgcccatcgaggagaccctggaggactcgccccagacgcgatcattgttgggcgtgtttgaggaagatgccaccgccatttccaactatatgaaccagctataccaggccatgcaccgaatttatgatgcccagaacgagctatcagcagcaacacacttaacaagcaagttgctgaaggaatacgagaagcagcggtttccactgggaggcgatgacgaagtaatgtcctcaaccctccaacagttttctaaagtgatcgatgagctgagttcatgtcacgcagtgttatcgacccagctcgcagatgccatgatgttccccattacccagttcaaggagcgggatcttaaggagattttgactttaaaggaagtcttccagattgcctcgaatgaccacgatgctgcgatcaaccggtattcccgtctgtcgaaaaagagagagaacgataaagttaaatacgaagtgaccgaagacgtctacacaagccgcaaaaaacagcatcagactatgatgcactacttctgtgcactcaataccctgcagtacaagaaaaaaatcgcccttctggagcccctgctgggttatatgcaggcgcagatttctttttttaagatggggagcgaaaacctcaacgagcagctggaggagtttcttgccaacatcgggaccagcgtgcagaatgtacgccgcgaaatggatagcgacatagagaccatgcagcagaccattgaggacctcgaggtggccagcgatcccttatacgtccccgacccagatcccaccaaattccctgtgaaccggaacctgaccaggaaagccggatacctcaatgctaggaataagaccggcctcgtgtcatccacctgggatcggcagttctacttcactcaggggggcaacctcatgagccaggcgcggggcgacgtcgcgggagggctggcaatggacattgacaactgctcggtgatggcagtcgattgcgaggatcgccggtactgcttccagatcacgagcttcgatggcaagaaaagtagcattctacaggctgaaagtaagaaggatcatgaagagtggatttgcactatcaacaatatttccaaacagatttatctatcagagaatcccgaagaaacggccgccagagtgaaccagtccgcactggaagctgtgacaccaagcccctcctttcagcagcgacatgaatcattgcgaccggctgccggccagtctcgtcctcccacagcccgcacctcatcatctggaagcctcggctctgagtccactaacctggctgccttgtccctagacagtctggtagctcctgacacacccattcaattcgacatcatttcccctgtctgtgaggatcagcccgggcaggcgaaagctttcggacagggggggcgtcggaccaatccatttggcgaaagcgggggtagtactaaatctgagacagaggatagtatcctccatcaattattcattgtgcgcttcttgggctctatggaggtgaaatcggatgatcatcctgatgttgtctatgaaacaatgaggcagatattggctgcccgcgccatccacaatatctttcgtatgacagagagtcatctactggtcacatgcgattgtctgaagctaatcgacccacaaacgcaagtgacgcgcctgacattcccgctcccatgtgtggtcctgtacgctacacatcaagagaataagagactgtttgggttcgtcttgagaacatccagcggccggtctgaatccaatctctctagcgtgtgctacatctttgaaagcaacaacgagggggaaaagatttgtgatagcgtggggctggccaaacaaatcgcgcttcatgccgagttggacaggcgtgcctctgagaaacagaaagagatcgaacgggttaaagagaaacaacagaaggagctgaacaagcagaagcagatagagaaggacctggaggagcagagccggctgatcgcggcttccagtcgccctaatcaggcctcctccgagggtcagtttgtggttctatcctctagtcagtcggaagaatcagacctgggtgagggcgggaagaaaagagaatcggaggcatag

SEQ ID NO: 172465 - DNA, 2130 bp, Artificial Sequence
  derived and/or modified sequence
atgccaggaattgacaagctgcccatcgaagagactctagaagactcaccgcagacacgatcacttcttggcgtgttcgaggaggatgcaactgccatctctaattatatgaaccagctctatcaggctatgcatagaatttacgacgcccaaaatgagctgtcagcagcaacacatctgacctctaaactcttgaaggaatacgaaaagcagagattccctcttggcggtgatgacgaggtaatgagcagcacattgcagcagttttccaaggtcattgatgaactcagtagttgtcatgccgtcctcagcactcagcttgctgacgctatgatgtttcccattacacaatttaaggaaagggatttgaaggaaattttaaccctgaaggaagtcttccagattgcctctaacgatcatgatgccgctattaataggtactcaagactctccaaaaagagagagaatgacaaagtcaaatatgaagttactgaagatgtctatacaagccggaaaaagcaacatcagaccatgatgcactacttttgcgcccttaatactcttcagtataagaagaagatcgccctcctggagccactccttgggtatatgcaggcacagatcagcttttttaaaatgggatcagagaatcttaacgagcaactcgaagaatttttagcgaatatcggcaccagcgtgcaaaatgtgcggcgtgagatggacagcgatatcgagacaatgcagcagacgatcgaggatttagaggtggctagcgaccctctatacgtaccggaccccgaccccactaagttcccagtgaatcgcaatttaacaaggaaagccggatatcttaatgctagaaacaaaactggcttggtgagttccacttgggacaggcagttttactttactcaggggggtaatcttatgtcccaggcacggggagatgttgcaggtggattggccatggacattgataattgcagcgttatggcggttgattgtgaagacagaaggtattgctttcagattacttctttcgatggaaagaagagtagtatcttacaagcggaatcaaagaaggaccacgaggagtggatctgtaccattaataatatctctaaacagatctacctctcagagaaccccgaggaaaccgccgcaagagtgaaccaaagtgccctggaagctgtgactccaagcccgagcttccaacaaaggcacgagagtctaagaccagctgcaggtcagagcagaccaccaacagcacgtacatcgagctctggcagtctgggtagcgaatccacgaatttggcggctctcagtctggattcactagtcgcccctgataccccaatccaattcgacataatcagccctgtttgtgaggaccagcctggacaggcaaaagcctttgggcaggggggtagacggacgaatcctttcggggaatccggcggaagcacgaaatcagagaccgaggactctatcctgcaccagctttttatcgtccggttccttggaagtatggaagtgaaaagcgatgaccaccctgatgtcgtgtatgaaaccatgaggcaaattctggccgcaagggcaatccacaacatcttcagaatgactgagtcgcatcttctcgttacatgcgactgtcttaagttaattgaccctcaaacacaggtgacaaggctgacgttcccactgccatgcgtggtgctgtacgcaacacaccaggaaaataagcggctgtttggttttgttctgagaacgagcagtggcagatctgagagcaacctgtctagcgtttgttatatcttcgagtccaataatgagggcgagaaaatctgcgactccgtgggcctagcaaaacaaattgccctgcacgctgagttggacagacgggctagcgagaagcaaaaagaaattgagcgggttaaagagaagcagcagaaggaactcaataagcagaaacaaatagagaaggatttagaagagcagagtcggttaatcgcagcgtcaagtaggcctaaccaagcctccagcgaagggcaatttgtcgtcctttcttcgtctcagtccgaggagagtgacttaggcgaagggggtaagaagcgggaaagcgaagcttag

SEQ ID NO: 172466 - DNA, 2130 bp, Artificial Sequence
  derived and/or modified sequence
atgcccggcatcgacaagctgcccatcgaggagaccctggaggacagcccccagaccagaagcctgctgggcgtgttcgaggaggacgccaccgccatcagcaactacatgaaccagctgtaccaggccatgcacagaatctacgacgcccagaacgagctgagcgccgccacccacctgaccagcaagctgctgaaggagtacgagaagcagagattccccctgggcggcgacgacgaggtgatgagcagcaccctgcagcagttcagcaaggtgatcgacgagctgagcagctgccacgccgtgctgagcacccagctggccgacgccatgatgttccccatcacccagttcaaggagagagacctgaaggagatcctgaccctgaaggaggtgttccagatcgccagcaacgaccacgacgccgccatcaacagatacagcagactgagcaagaagagagagaacgacaaggtgaagtacgaggtgaccgaggacgtgtacaccagcagaaagaagcagcaccagaccatgatgcactacttctgcgccctgaacaccctgcagtacaagaagaagatcgccctgctggagcccctgctgggctacatgcaggcccagatcagcttcttcaagatgggcagcgagaacctgaacgagcagctggaggagttcctggccaacatcggcaccagcgtgcagaacgtgagaagagagatggacagcgacatcgagaccatgcagcagaccatcgaggacctggaggtggccagcgaccccctgtacgtgcccgaccccgaccccaccaagttccccgtgaacagaaacctgaccagaaaggccggctacctgaacgccagaaacaagaccggcctggtgagcagcacctgggacagacagttctacttcacccagggcggcaacctgatgagccaggccagaggcgacgtggccggcggcctggccatggacatcgacaactgcagcgtgatggccgtggactgcgaggacagaagatactgcttccagatcaccagcttcgacggcaagaagagcagcatcctgcaggccgagagcaagaaggaccacgaggagtggatctgcaccatcaacaacatcagcaagcagatctacctgagcgagaaccccgaggagaccgccgccagagtgaaccagagcgccctggaggccgtgacccccagccccagcttccagcagagacacgagagcctgagacccgccgccggccagagcagaccccccaccgccagaaccagcagcagcggcagcctgggcagcgagagcaccaacctggccgccctgagcctggacagcctggtggcccccgacacccccatccagttcgacatcatcagccccgtgtgcgaggaccagcccggccaggccaaggccttcggccagggcggcagaagaaccaaccccttcggcgagagcggcggcagcaccaagagcgagaccgaggacagcatcctgcaccagctgttcatcgtgagattcctgggcagcatggaggtgaagagcgacgaccaccccgacgtggtgtacgagaccatgagacagatcctggccgccagagccatccacaacatcttcagaatgaccgagagccacctgctggtgacctgcgactgcctgaagctgatcgacccccagacccaggtgaccagactgaccttccccctgccctgcgtggtgctgtacgccacccaccaggagaacaagagactgttcggcttcgtgctgagaaccagcagcggcagaagcgagagcaacctgagcagcgtgtgctacatcttcgagagcaacaacgagggcgagaagatctgcgacagcgtgggcctggccaagcagatcgccctgcacgccgagctggacagaagagccagcgagaagcagaaggagatcgagagagtgaaggagaagcagcagaaggagctgaacaagcagaagcagatcgagaaggacctggaggagcagagcagactgatcgccgccagcagcagacccaaccaggccagcagcgagggccagttcgtggtgctgagcagcagccagagcgaggagagcgacctgggcgagggcggcaagaagagagagagcgaggcctag

SEQ ID NO: 172467 - protein, 179 aa, Artificial Sequence
  derived and/or modified sequence
MGILFTRIWRLFNHQEHKVIIVGLDNAGKTTILYQFSMNEVVHTSPTIGSNVEEIVINNTRFLMWDIGGQESLRSSWNTYYTNTEFVIVVVDSTDRERISVTREELYKMLAHEDLRKAGLLIFANKQDVKECMTVAEISQFLKLTSIKDHQWHIQACCALTGEGLCQGLEWMMSRLKIR

SEQ ID NO: 172468 - DNA, 540 bp, Artificial Sequence
  derived and/or modified sequence
atgggcatattgtttactcgaatatggcgtctgttcaatcaccaggaacataaagttattattgtggggctggataacgccggcaaaacaacaattctataccagttttcaatgaacgaggtggtgcacacctcccctaccatcggctctaacgtggaggagatcgtcataaataatactcggtttctgatgtgggatattggggggcaggagtctctgcggtcttcctggaacacctactacacaaacacagagttcgtgatcgtggttgtggacagtaccgatagggaacgcatttctgttacacgagaagagctatacaagatgctggcccacgaagatctgcggaaggccggccttctcatcttcgcaaacaagcaggacgtaaaggagtgcatgactgtcgccgaaattagccagtttctaaaactgactagcattaaagaccaccagtggcacatacaggcatgttgtgccctgactggcgagggcctgtgccagggcttagagtggatgatgtctagactgaaaattaggtag

SEQ ID NO: 172469 - DNA, 540 bp, Artificial Sequence
  derived and/or modified sequence
atgggcatcctcttcacccgcatctggaggctcttcaaccaccaggagcacaaggtgatcatcgtgggcctggacaatgccggcaagaccaccatcctgtaccagttctccatgaatgaggtggtgcacaccagccccaccatcggcagcaatgtggaggagatcgtcatcaacaacacccgcttcctgatgtgggacattggaggccaggagagcctgcggagctcctggaacacctactacaccaacacagaatttgtgattgtggtggtggacagcacagaccgggagcgcatctctgtgacccgggaggagctgtacaagatgctggcccacgaggacctgaggaaggccggcctgctgatctttgccaacaagcaggatgtgaaggagtgcatgacagtggccgagatcagccagttcctgaagctgaccagcatcaaggaccaccagtggcacatccaggcctgctgtgccctgactggagagggcctgtgccagggcctggagtggatgatgagccggctgaagatcagatag

SEQ ID NO: 172470 - DNA, 540 bp, Artificial Sequence
  derived and/or modified sequence
atgggcatcctgttcacccggatctggcggctgttcaaccaccaggaacacaaagtcatcatcgtaggccttgacaatgccgggaagacgactatcctctatcagttctcgatgaacgaggtggtacacaccagccctactataggctccaatgtcgaggagattgtgatcaataatacgagattcttgatgtgggatatcggaggccaggagtccctgcggtcgagctggaacacctactataccaataccgaattcgtgatcgttgtggtggactccactgatagggaacgcatctcagtgacccgggaggaactgtataaaatgctggcccatgaagatttacgtaaagcagggttgttgatttttgcgaacaagcaggacgtcaaggagtgtatgaccgttgccgagatatctcagtttctgaagttgactagtatcaaagatcaccaatggcatatccaggcctgttgtgccctgaccggcgaagggctatgccagggcctggagtggatgatgtcacggctcaaaatcagatag

SEQ ID NO: 172471 - DNA, 540 bp, Artificial Sequence
  derived and/or modified sequence
atgggtatacttttcacaagaatatggcggctgtttaatcatcaagaacacaaagtaatcatcgtggggttagacaacgcaggtaaaacgactatcctgtaccagttctctatgaatgaggtggtccatacctccccaaccatcggctcaaacgtggaagagatcgtcatcaataacacgcgatttctgatgtgggacatcggtggtcaggaatccctgcggtcaagttggaatacatattataccaatactgagttcgtgatagttgtggttgacagcacagaccgggagcggatctcagttaccagggaagagttgtataagatgttagcacatgaggatttacgtaaggctggcctcctgattttcgccaacaagcaggacgtgaaggagtgcatgaccgttgctgagatttcacagtttctgaagttgacatccattaaggaccatcaatggcatatccaagcctgttgcgcactaactggagagggactgtgtcagggtttagaatggatgatgagcaggttaaagattagatag

SEQ ID NO: 172472 - DNA, 2911 bp, Artificial Sequence
  derived and/or modified sequence
cccgcccgcgtggtcgtcgccaccgcagccgcccgagaggagctgggggaggacggtggcccgcgaggctcgtcgcagacaacgcggcggcgatgtccgcgagccagagcacaaagttatcattgttgggctggataatgcagggaaaactaccattctttaccaattttctatgaatgaagttgtacatacatctcctacaataggaagtaatgtagaagagatagtgattaataatacacgtttcctaatgtgggatattggtggccaagaatctcttcgttcttcctggaacacttactatactaacacagagtttgtaatagttgttgtggacagtacagacagagagaggatttctgtaactagagaagaactctataaaatgttagcgcatgaggacctaagaaaagctggattgctgatttttgctaataaacaagatgttaaagaatgcatgactgtagcagaaatctcccagtttttgaagctaacttctattaaagatcaccagtggcatatccaggcatgctgtgctctaactggcgagggattgtgccaaggacttgaatggatgatgtcacgacttaagattagatgatctctactgacctcttctcatagattttgtataaatgaagtgctggactttacctgaaagctgcaaaaattaatggtttagatatatttataataaactgatttaaactttttctataagaagaaaaattaagaccacttatttgaaaacaaagatgaagtctcaccttccagtttgctttctcattagttttttccaaagtaagttattgaagctgtgattgacatttttctcataatgaatcctctcaggacattgtgtagcctatggtaagtacaaagggagaggaagacattttgaattttaagagctttattatcagtttaaccctccctagttgaatgttattttcttcttgttccattaagtcagaatacaaatcagcacagatattcgaatgtttccaatattttaaaatgtaatgttacttatgaaaagtattttgcttaaggttgtgtgtgtattgtgtatatacctcaagttcaagttaatggcattgatttatgttccagacaaaaataacacaaataataatatccttcgttataaccacaatgagataagtattggcattagtgttcagtgccattttatactttctctctgtgttctctgtattgtactaaccaacctcccaaatcgctgagctgcttgtttaaaaaaaaaaaaaaggaaaaggaaaaagcatgacattgtgtatcgattttttgttgttgaccaaaatcacacacatggaaacatgtaattcaacagagtgggaaagctagcagattcttggcttagtattactaataggcaggattgtacaatgagcaactatcagattattcctttcagtggttcttatggcatctaaattactgaataaattattaatccattaatcagtgaatcaaattatgattacaattatcaaatgaatgctcagcattaattgaaaactgttttgtgaaacatgtctacccagaaaagtagcattctataaatactattaaacaacttagctatattatttttaagtattaaattatatgtcaagcagttaaagtgaatttcagagtaaaagtaaggcatgtttctgagcaacattgataatttcttaatttgcaaatttcttcttattttggtacttggaatatagtgtgagattttttatttctaaattttgttgtatcttctattacataaatgcattgacaattataaaatgcaagtgttttttgaatgattttaagaatttggcttaaaaattgattgatacaacgtattatttgtactaagaagtaacttgacccaaaacaccttttatgtttgcttagggtatattttttcagtgtctgaaagtcaaaggtattcctgtcacaactgtaaacaaacttatcctaaatgtgttaaaacatattcttgggtactctatttatgtatctttcatgccttgaaaatctgaaggttaatccaaactcacatgttttagcatatttgagaaaaaaaaactaccttcaatatcagccttttaaatttcatgaagattttggtgaggaataatagtatatagtttaagtattgacaaaactttgaaagtttctttctttaaaatgggaaatactcaatatctaaatccaggtcaggcatgggatatcagtatttaacattggatgttttatgttttatatttataatgttcaaaatgcaagcataacatttaatatttgtccacatggttttacaaaagtaaatcttaaattactaagcttttcccatatgttctcgtactttctcaaatccctataaagaattacttgttatctattaaaaatctcctttacccaaatctgtattatggtttcgccagacaaatattatgtgatgtagcccagaaaatccacaccttttgtcctttttatgttttaatttgaataatcatgtgcttagtcccttggattactgccacatcagtttaacacgatatcagcacattcccttgtcatcatcaaggtgttggctcagatttattcttaattggatgtttaaagcatgtactaccttgttacagttggtttagtgtagtggattattgacatgacatcatgagaagatgtgtaattttataccacatttataaaacatgattttgttttctacccttcaaggtaaacattaaaaataaggtggtacttgtgtacttgtacataaaaccaaaattatagttgggaaaaaaataaatttatatatgaaaatgtcaaaatcattttaaaagtattattttcaaataaaatggagaagctggtgaaaagtcatattggcaatttt

SEQ ID NO: 172473 - DNA, 2913 bp, Artificial Sequence
  derived and/or modified sequence
cccgcccgcgtggtcgtcgccaccgcagccgcccgagaggagctgggggaggacggtggcccgcgaggctcgtcgcagacaacgcggcggcgatgtccgcgagccaggcgacacaaagttatcattgttgggctggataatgcagggaaaactaccattctttaccaattttctatgaatgaagttgtacatacatctcctacaataggaagtaatgtagaagagatagtgattaataatacacgtttcctaatgtgggatattggtggccaagaatctcttcgttcttcctggaacacttactatactaacacagagtttgtaatagttgttgtggacagtacagacagagagaggatttctgtaactagagaagaactctataaaatgttagcgcatgaggacctaagaaaagctggattgctgatttttgctaataaacaagatgttaaagaatgcatgactgtagcagaaatctcccagtttttgaagctaacttctattaaagatcaccagtggcatatccaggcatgctgtgctctaactggcgagggattgtgccaaggacttgaatggatgatgtcacgacttaagattagatgatctctactgacctcttctcatagattttgtataaatgaagtgctggactttacctgaaagctgcaaaaattaatggtttagatatatttataataaactgatttaaactttttctataagaagaaaaattaagaccacttatttgaaaacaaagatgaagtctcaccttccagtttgctttctcattagttttttccaaagtaagttattgaagctgtgattgacatttttctcataatgaatcctctcaggacattgtgtagcctatggtaagtacaaagggagaggaagacattttgaattttaagagctttattatcagtttaaccctccctagttgaatgttattttcttcttgttccattaagtcagaatacaaatcagcacagatattcgaatgtttccaatattttaaaatgtaatgttacttatgaaaagtattttgcttaaggttgtgtgtgtattgtgtatatacctcaagttcaagttaatggcattgatttatgttccagacaaaaataacacaaataataatatccttcgttataaccacaatgagataagtattggcattagtgttcagtgccattttatactttctctctgtgttctctgtattgtactaaccaacctcccaaatcgctgagctgcttgtttaaaaaaaaaaaaaaggaaaaggaaaaagcatgacattgtgtatcgattttttgttgttgaccaaaatcacacacatggaaacatgtaattcaacagagtgggaaagctagcagattcttggcttagtattactaataggcaggattgtacaatgagcaactatcagattattcctttcagtggttcttatggcatctaaattactgaataaattattaatccattaatcagtgaatcaaattatgattacaattatcaaatgaatgctcagcattaattgaaaactgttttgtgaaacatgtctacccagaaaagtagcattctataaatactattaaacaacttagctatattatttttaagtattaaattatatgtcaagcagttaaagtgaatttcagagtaaaagtaaggcatgtttctgagcaacattgataatttcttaatttgcaaatttcttcttattttggtacttggaatatagtgtgagattttttatttctaaattttgttgtatcttctattacataaatgcattgacaattataaaatgcaagtgttttttgaatgattttaagaatttggcttaaaaattgattgatacaacgtattatttgtactaagaagtaacttgacccaaaacaccttttatgtttgcttagggtatattttttcagtgtctgaaagtcaaaggtattcctgtcacaactgtaaacaaacttatcctaaatgtgttaaaacatattcttgggtactctatttatgtatctttcatgccttgaaaatctgaaggttaatccaaactcacatgttttagcatatttgagaaaaaaaaactaccttcaatatcagccttttaaatttcatgaagattttggtgaggaataatagtatatagtttaagtattgacaaaactttgaaagtttctttctttaaaatgggaaatactcaatatctaaatccaggtcaggcatgggatatcagtatttaacattggatgttttatgttttatatttataatgttcaaaatgcaagcataacatttaatatttgtccacatggttttacaaaagtaaatcttaaattactaagcttttcccatatgttctcgtactttctcaaatccctataaagaattacttgttatctattaaaaatctcctttacccaaatctgtattatggtttcgccagacaaatattatgtgatgtagcccagaaaatccacaccttttgtcctttttatgttttaatttgaataatcatgtgcttagtcccttggattactgccacatcagtttaacacgatatcagcacattcccttgtcatcatcaaggtgttggctcagatttattcttaattggatgtttaaagcatgtactaccttgttacagttggtttagtgtagtggattattgacatgacatcatgagaagatgtgtaattttataccacatttataaaacatgattttgttttctacccttcaaggtaaacattaaaaataaggtggtacttgtgtacttgtacataaaaccaaaattatagttgggaaaaaaataaatttatatatgaaaatgtcaaaatcattttaaaagtattattttcaaataaaatggagaagctggtgaaaagtcatattggcaatttt

SEQ ID NO: 172474 - DNA, 5326 bp, Artificial Sequence
  derived and/or modified sequence
gcgtggtcgtcgccaccgcagccgcccgagaggagctgggggaggacggtggcccgcgaggctcgtcgcagacaacgcggcggcgatgtccgcgagccaggcgagtgccgcggcggcagcggcggggccttgcgcgcggcagggcggcctgggcttcggcctccctccggttccctggaagcgggcccgcgaccagcgcgggagcagcagcagaggcggaggctccagcgcgtctctctcctccccctcagcctgagccgggggaagccaggcggcccgggtgtctggagggggggggtccgctgcccgagaatgggaattctcttcactagaatatggagactgttcaatcaccaggagcacaaagttatcattgttgggctggataatgcagggaaaactaccattctttaccaattttctatgaatgaagttgtacatacatctcctacaataggaagtaatgtagaagagatagtgattaataatacacgtttcctaatgtgggatattggtggccaagaatctcttcgttcttcctggaacacttactatactaacacagagtttgtaatagttgttgtggacagtacagacagagagaggatttctgtaactagagaagaactctataaaatgttagcgcatgaggacctaagaaaagctggattgctgatttttgctaataaacaagatgttaaagaatgcatgactgtagcagaaatctcccagtttttgaagctaacttctattaaagatcaccagtggcatatccaggcatgctgtgctctaactggcgagggattgtgccaaggacttgaatggatgatgtcacgacttaagattagatgatctctactgacctcttctcatagattttgtataaatgaagtgctggactttacctgaaagctgcaaaaattaatggtttagatatatttataataaactgatttaaactttttctataagaagaaaaattaagaccacttatttgaaaacaaagatgaagtctcaccttccagtttgctttctcattagttttttccaaagtaagttattgaagctgtgattgacatttttctcataatgaatcctctcaggacattgtgtagcctatggtaagtacaaagggagaggaagacattttgaattttaagagctttattatcagtttaaccctccctagttgaatgttattttcttcttgttccattaagtcagaatacaaatcagcacagatattcgaatgtttccaatattttaaaatgtaatgttacttatgaaaagtattttgcttaaggttgtgtgtgtattgtgtatatacctcaagttcaagttaatggcattgatttatgttccagacaaaaataacacaaataataatatccttcgttataaccacaatgagataagtattggcattagtgttcagtgccattttatactttctctctgtgttctctgtattgtactaaccaacctcccaaatcgctgagctgcttgtttaaaaaaaaaaaaaaggaaaaggaaaaagcatgacattgtgtatcgattttttgttgttgaccaaaatcacacacatggaaacatgtaattcaacagagtgggaaagctagcagattcttggcttagtattactaataggcaggattgtacaatgagcaactatcagattattcctttcagtggttcttatggcatctaaattactgaataaattattaatccattaatcagtgaatcaaattatgattacaattatcaaatgaatgctcagcattaattgaaaactgttttgtgaaacatgtctacccagaaaagtagcattctataaatactattaaacaacttagctatattatttttaagtattaaattatatgtcaagcagttaaagtgaatttcagagtaaaagtaaggcatgtttctgagcaacattgataatttcttaatttgcaaatttcttcttattttggtacttggaatatagtgtgagattttttatttctaaattttgttgtatcttctattacataaatgcattgacaattataaaatgcaagtgttttttgaatgattttaagaatttggcttaaaaattgattgatacaacgtattatttgtactaagaagtaacttgacccaaaacaccttttatgtttgcttagggtatattttttcagtgtctgaaagtcaaaggtattcctgtcacaactgtaaacaaacttatcctaaatgtgttaaaacatattcttgggtactctatttatgtatctttcatgccttgaaaatctgaaggttaatccaaactcacatgttttagcatatttgagaaaaaaaaactaccttcaatatcagccttttaaatttcatgaagattttggtgaggaataatagtatatagtttaagtattgacaaaactttgaaagtttctttctttaaaatgggaaatactcaatatctaaatccaggtcaggcatgggatatcagtatttaacattggatgttttatgttttatatttataatgttcaaaatgcaagcataacatttaatatttgtccacatggttttacaaaagtaaatcttaaattactaagcttttcccatatgttctcgtactttctcaaatccctataaagaattacttgttatctattaaaaatctcctttacccaaatctgtattatggtttcgccagacaaatattatgtgatgtagcccagaaaatccacaccttttgtcctttttatgttttaatttgaataatcatgtgcttagtcccttggattactgccacatcagtttaacacgatatcagcacattcccttgtcatcatcaaggtgttggctcagatttattcttaattggatgtttaaagcatgtactaccttgttacagttggtttagtgtagtggattattgacatgacatcatgagaagatgtgtaattttataccacatttataaaacatgattttgttttctacccttcaaggtaaacattaaaaataaggtggtacttgtgtacttgtacataaaaccaaaattatagttgggaaaaaaataaatttatatatgaaaatgtcaaaatcattttaaaagtattattttcaaataaaatggagaagctggtgaaaagtcatattggcaatttttatgtagtttaagtggaattaagcagagggagatgcttttgggtttttaatatgccacttctgagtgaaaacatctcgtggagtcattgtgttcagctctgagaagaacaaagattcatagttctgtacatgtggctggatttaaatatcctgtttttgatactaattttgaaagtcatgtaacttcttttgatatctgggcaaaagtaaccatatgctataagcatttgaatatgtttaattttatcataatagcatctgtaaaagtacatcttacacattatatagagggttcttgtttgaaattttcagttctctttatcttcccagtacctcttggtcctcataatgggcaaaggatacaacgaaggcaggttgtataggggttatagtggggaagtggataggggattcattttcttatgtgacattttgccttaagaatataaaagtgctttagcactgatggctggcatttttaatataggcagtgaaagtgactttagaagcatgggatgaaatagagggaagaagagtttttattttctggcctttaaaaagtgcctagtaggtcatttgagacccagagaaatgcacagagcttgagcaaaggcatgaagtccctgacattgttttcctttttgtctcagcatatagtattaagatgcctagaaataggactctattgttccctcttgtataggcactttacatttcttgtcactacagcaaccacatacagtacagacaacctccaaacctgtttatattagtgtaaatagaaaatctatagacaactttctagttttctctggaggcatttttgggaatgtacgtgtaataggctctgctttgtatacaggagataataccacatcatcggttatctccaaactccagtcttctctcaactgcccagttgtatgttgtcatcaatcactttttcaaggctgggtagagacaagtttctcctcgtaactttgacctctcccactctccaaatgtaatctggacctcattgctttcaaggtcagcttccccatagctcaggtatcctttgctctcctgtatcttcatttactattagtgaagagatctctgtcctggaggttattctaaactttctttgtaactattgttatagacaatggtttccaaaccagtggtttctatgtagcttttctagttccttgctatcttctcaccactggcttgaggtagtgatttggactttgctcattagagagcattatcagagatgtggagtccatcagaagaccagcttgcagtgtgtatagcatatagatgccaatattagaattctttaaattatatttaacattttcatgcttcttaatttaacttcacatgttgggaagtagattcagaaagataggagaaatacccagactctaccacttccgtgagctactagttaggcatgggcaggattaagttttatgtgtattatcttcccactaccaagaatggttatgtttcacagaataccagttcagtttgatttggaaaaagatgccaaaccaaatttatatgtagtctataatctaagggcattcttgaaactattgcccacatcccattttttttttcatgtttacttacaaaacagagataaacattagatgtctaaaggagttagtaatgaaaagcctatccttaaaaaataaacctgttgaaatgggctttaaagacatcgaaataatcacttgtcatgcattgactgtaaatgcagatagagaaatatgtctttgaagctccacttacacaaaaataaaacttgtatatcatgctccctcaaagaatgtgcgatagattattttaagaccatgataatagagtaaaaaggaaagaaagccagaaattacaattttggatgctaaaaagtaactttctagttaaccctaaagtcctgtcagattgtgaagaaatgttccaggatacacttggattagttatgcagtatttcttatcaatgtctagcccttgtgtattgttctgaaaactaaagtttaaatctttatgctgttgcttgctagatatcctgttctttggtagaaaattcccatagtctgtactcaagaagtgcctaaaaatggatttgtgttgattttaagcccatctaataaattatatgtattttcta

SEQ ID NO: 172475 - DNA, 540 bp, Artificial Sequence
  derived and/or modified sequence
atgggcatcctgttcaccagaatctggagactgttcaaccaccaggagcacaaggtgatcatcgtgggcctggacaacgccggcaagaccaccatcctgtaccagttcagcatgaacgaggtggtgcacaccagccccaccatcggcagcaacgtggaggagatcgtgatcaacaacaccagattcctgatgtgggacatcggcggccaggagagcctgagaagcagctggaacacctactacaccaacaccgagttcgtgatcgtggtggtggacagcaccgacagagagagaatcagcgtgaccagagaggagctgtacaagatgctggcccacgaggacctgagaaaggccggcctgctgatcttcgccaacaagcaggacgtgaaggagtgcatgaccgtggccgagatcagccagttcctgaagctgaccagcatcaaggaccaccagtggcacatccaggcctgctgcgccctgaccggcgagggcctgtgccagggcctggagtggatgatgagcagactgaagatcagatag

SEQ ID NO: 172476 - protein, 191 aa, Artificial Sequence
  derived and/or modified sequence
MQVWCDQRHDPGGWTVIQRRLDGSVNFFRNWETYKQGFGNIDGEYWLGLENIYWLTNQGNYKLLVTMEDWSGRKVFAEYASFRLEPESEYYKLRLGRYHGNAGDSFTWHNGKQFTTLDRDHDVYTGNCAHYQKGGWWYNACAHSNLNGVWYRGGHYRSRYQDGVYWAEFRGGSYSLKKVVMMIRPNPNTFH

SEQ ID NO: 172477 - protein, 493 aa, Artificial Sequence
  derived and/or modified sequence
MRPLCVTCWWLGLLAAMGAVAGQEDGFEGTEEGSPREFIYLNRYKRAGESQDKCTYTFIVPQQRVTGAICVNSKEPEVLLENRVHKQELELLNNELLKQKRQIETLQQLVEVDGGIVSEVKLLRKESRNMNSRVTQLYMQLLHEIIRKRDNALELSQLENRILNQTADMLQLASKYKDLEHKYQHLATLAHNQSEIIAQLEEHCQRVPSARPVPQPPPAAPPRVYQPPTYNRIINQISTNEIQSDQNLKVLPPPLPTMPTLTSLPSSTDKPSGPWRDCLQALEDGHDTSSIYLVKPENTNRLMQVWCDQRHDPGGWTVIQRRLDGSVNFFRNWETYKQGFGNIDGEYWLGLENIYWLTNQGNYKLLVTMEDWSGRKVFAEYASFRLEPESEYYKLRLGRYHGNAGDSFTWHNGKQFTTLDRDHDVYTGNCAHYQKGGWWYNACAHSNLNGVWYRGGHYRSRYQDGVYWAEFRGGSYSLKKVVMMIRPNPNTFH

SEQ ID NO: 172478 - DNA, 576 bp, Artificial Sequence
  derived and/or modified sequence
atgcaggtgtggtgtgatcagcgccatgatcccggtggatggactgtcattcagcggagactggacgggtcagtgaactttttccgtaactgggaaacgtataagcaggggttcggaaatatagacggggaatactggctgggactagagaatatctactggctcactaaccagggaaactataaacttctggtgaccatggaagattggagcggccgaaaagtgtttgccgaatatgcatcgttccggttagagccggagtcagagtattataagcttagacttgggagataccatggaaacgcgggtgatagcttcacatggcataacggtaaacaatttactacgctggatagggatcacgacgtttataccggcaattgcgctcattaccagaaaggagggtggtggtataacgcttgcgcccacagcaacctcaatggggtttggtaccggggagggcattaccggtcacgctatcaagacggggtgtattgggcggagttcagaggcggtagctactccctgaagaaggtggtgatgatgatcagacccaaccctaacacatttcactag

SEQ ID NO: 172479 - DNA, 1482 bp, Artificial Sequence
  derived and/or modified sequence
atgcgcccactgtgcgtaacatgttggtggttagggctactagccgctatgggcgctgtcgctgggcaagaagacggctttgaaggcaccgaagagggcagcccccgagaatttatctatttaaacaggtacaaacgagctggagagtcccaggataagtgcacctacacctttatcgtgccccagcaaagggtgacaggcgctatttgtgtgaactctaaagaaccggaggtcctcctggagaacagagtccataagcaggagttagagctcctgaataacgaactgctcaagcagaaacggcagatcgagacgcttcagcagctggtcgaagtggatgggggaatcgtctctgaggttaagttgttgcggaaggagtctcgaaatatgaatagcagggtgacccagctctatatgcagctgttgcacgaaataatcaggaaacgggacaatgcgctggagttgtcgcagttggaaaataggatcctgaatcagacagccgatatgctccagctggctagcaagtataaggacttggaacataagtaccaacacctcgctacactggcgcacaaccagtccgagatcatagcacagctggaagaacattgccagagggtaccttcagctcggcctgtgcctcagccaccacctgctgctcctcctcgggtctatcagcccccaacttataatcgcatcatcaaccagatctccactaatgaaatccagtctgaccagaatcttaaagttctacccccacccctacccactatgcccacacttactagcctgcctagctccacagataagccttcaggcccatggcgcgactgtttgcaggccttagaagatggccacgatacaagttccatctacctggtgaaacctgagaatactaacagactcatgcaggtctggtgcgatcagcgacacgacccaggaggctggaccgtgatccagaggcggttggacggctccgtgaactttttccggaattgggaaacttacaagcagggattcggaaatatcgatggtgaatactggttggggctggagaacatctactggctgaccaaccaaggcaactacaaattactggtgaccatggaagactggtctgggaggaaggtctttgccgaatatgctagtttcagactcgagcctgaatctgagtactacaagctgcgccttgggcgttatcatggaaatgccggagacagcttcacatggcataatggtaagcaatttacgacgctggatcgcgaccatgacgtctacactggcaattgcgcacactaccagaaggggggttggtggtacaatgcctgcgcacattctaacctgaacggtgtttggtatcgcggaggacactacaggagtaggtaccaggatggcgtgtattgggcagagttccgtggaggctcctatagcctgaagaaggtggtgatgatgatcagaccgaatcccaataccttccactag

SEQ ID NO: 172480 - DNA, 576 bp, Artificial Sequence
  derived and/or modified sequence
atgcaggtctggtgtgaccaacgacacgatcccgggggctggacggtcattcagcgtcgcttggacggctctgtaaattttttccgtaactgggaaacatacaaacaggggttcggcaacatcgatggtgagtactggctgggcttagaaaatatctactggctcacgaaccaaggtaactacaagcttctggttacgatggaggattggagcggtagaaaggtgtttgccgagtacgcctccttccggctggaacccgagtccgaatactacaagttgcgtttaggtagatatcacgggaatgcaggagatagcttcacctggcataatgggaaacagtttactacgttagatagagaccacgatgtgtacaccgggaattgcgcccattatcagaaaggaggttggtggtacaatgcctgcgcccattctaatcttaacggagtatggtatcgcgggggtcattaccgcagtagataccaagacggagtttattgggccgagttccgtgggggtagctactcgctgaagaaggtggtgatgatgatccgtcccaatcctaacacatttcattag

SEQ ID NO: 172481 - DNA, 1482 bp, Artificial Sequence
  derived and/or modified sequence
atgcggccactgtgtgtcacgtgttggtggcttggccttttggccgctatgggtgctgttgcagggcaagaagacgggttcgaaggaactgaagagggaagcccaagagaatttatctacctaaaccgctacaaaagagcaggggaatctcaggataagtgcacttatactttcatcgtcccgcagcagagggtgaccggtgccatttgtgtgaactcaaaagaaccagaggtgctactcgagaatagggtacataagcaggagctggaattgctgaataacgagctgctcaaacaaaagaggcagatcgagacactccagcaattggttgaagtggatggaggaatagtctcagaagttaagctcctcaggaaggaatcgcggaatatgaactcgagagtgacacagctgtacatgcaattactccatgagattattcgcaaacgggacaatgctttggagctttcacaactagaaaataggatactaaatcaaacagcagatatgctgcagcttgctagcaaatacaaggacttagagcacaagtatcagcacttagccaccttagcgcataaccaatctgaaataatcgctcagctcgaggagcactgtcaacgcgtaccctcggccagacccgtgcctcagcctccacctgctgcgcccccacgggtgtaccaacctccaacctataaccgcatcatcaaccagatttccaccaacgaaatccaaagcgatcagaacctgaaggtattgccaccaccccttccaaccatgcctaccctgacaagcttgccctcttcgactgacaagcccagtggcccgtggagagactgcctgcaggctctggaggacggccatgatacatccagtatttatctcgttaagcccgaaaacaccaaccgattgatgcaggtgtggtgcgatcagagacacgatcctggcgggtggactgtgatccagcgtaggctagatgggtctgtcaacttttttagaaattgggagacatataagcagggtttcgggaacattgacggggagtattggttgggccttgaaaatatatactggctcactaatcagggaaactataagttgctcgttactatggaggattggtccgggaggaaagtcttcgcggagtatgcttcttttcggttagagcccgagtccgagtactacaagcttagactcggtcgttaccatggcaacgcaggggattctttcacttggcataatggcaaacagttcaccactctggacagagaccatgacgtgtacaccggtaattgtgcccactatcagaagggaggctggtggtataatgcttgtgcccattccaatctgaacggagtgtggtatcggggagggcattaccggagccgctatcaggatggagtgtactgggccgagtttcggggcgggagttatagccttaaaaaggtagtgatgatgattagacctaatcccaacacctttcattag

SEQ ID NO: 172482 - DNA, 576 bp, Artificial Sequence
  derived and/or modified sequence
atgcaagtctggtgcgaccagcgtcatgaccccggtggctggaccgtgatccaacgcagactggacggcagcgtgaatttctttcggaactgggagacttacaagcagggctttggaaatattgatggcgagtactggctaggacttgaaaatatttattggttgacaaatcaaggaaattacaaactgctagtgacgatggaggactggagcggcagaaaagtctttgccgagtacgcaagtttccggcttgaacccgaatctgagtattacaaattacgtctgggccgataccacgggaatgcaggcgacagtttcacctggcataacgggaaacagtttacgaccctggacagggatcacgacgtttacaccgggaactgcgcgcactaccaaaaaggcggctggtggtataacgcttgcgcccacagcaacctgaacggggtatggtatcggggcggccattatcgaagtaggtatcaggatggcgtatattgggcagaatttagaggaggctcatattccctcaaaaaagtagtaatgatgatcagaccaaatccaaacacatttcactag

SEQ ID NO: 172483 - DNA, 1482 bp, Artificial Sequence
  derived and/or modified sequence
atgcgaccattatgcgtgacctgctggtggctgggcttgctggcagcaatgggcgctgttgctggacaggaggatggttttgagggtacagaagaaggcagcccccgcgaatttatctatttgaatcggtataaacgtgctggcgagtcccaggacaaatgtacatacaccttcatcgtcccccaacagagagtgacgggagctatttgtgtgaattctaaagaacctgaagtgctgttagaaaatcgcgtccataagcaagaactagagctgctaaataacgagcttcttaagcagaagagacaaatagaaactctccagcagctggtagaagtagatggtggaatcgtcagcgaagttaagttgttacgaaaagaatcaagaaatatgaacagccgagtgacacaattatacatgcagctcctccacgagattattcggaagcgggacaacgctctagagctgtcccagttagagaatcgtatcctcaaccaaaccgctgatatgttacagctcgcctcaaaatataaggacttggaacacaaatatcaacaccttgcaacccttgctcacaatcagtcagaaatcatagctcagctcgaagaacactgccaaagagttccaagcgccagacctgtcccccagccacctcccgccgcgcctccgagagtctatcagccacccacatacaatcgcatcatcaaccaaatttccactaacgaaattcagtccgatcagaacctaaaagtgctccctccccccctccccaccatgcctaccctgacaagtctgcctagtagtaccgataagcctagcggaccgtggagagattgtctgcaagccctcgaagatggacacgatacatcaagcatttacctagttaagccggagaatactaatagactgatgcaggtctggtgtgatcaaagacacgatccaggtggttggacagtgatccaacggagactggatgggtctgttaatttctttagaaactgggaaacgtataagcagggatttggcaacatcgacggggagtactggctgggtctcgaaaatatttattggctcactaaccagggtaactacaaactgctggtgacaatggaagactggagcggcagaaaagtgttcgcggaatatgcatcgtttaggttggaaccagagagtgaatattataaactgcgcttggggaggtatcacggcaacgccggggactcctttacatggcataatggcaagcagttcactactttggatcgagaccacgacgtgtataccggcaattgtgcccattaccagaaaggagggtggtggtataacgcttgtgcccacagtaacttgaatggagtttggtaccgaggaggtcactataggagtaggtatcaggatggcgtgtattgggccgagttcagaggaggaagctattctctaaaaaaagttgtgatgatgattcgccccaaccctaacacattccattag

SEQ ID NO: 172484 - DNA, 576 bp, Artificial Sequence
  derived and/or modified sequence
atgcaggtgtggtgcgaccagagacacgaccccggcggctggaccgtgatccagagaagactggacggcagcgtgaacttcttcagaaactgggagacctacaagcagggcttcggcaacatcgacggcgagtactggctgggcctggagaacatctactggctgaccaaccagggcaactacaagctgctggtgaccatggaggactggagcggcagaaaggtgttcgccgagtacgccagcttcagactggagcccgagagcgagtactacaagctgagactgggcagataccacggcaacgccggcgacagcttcacctggcacaacggcaagcagttcaccaccctggacagagaccacgacgtgtacaccggcaactgcgcccactaccagaagggcggctggtggtacaacgcctgcgcccacagcaacctgaacggcgtgtggtacagaggcggccactacagaagcagataccaggacggcgtgtactgggccgagttcagaggcggcagctacagcctgaagaaggtggtgatgatgatcagacccaaccccaacaccttccactag

SEQ ID NO: 172485 - DNA, 1482 bp, Artificial Sequence
  derived and/or modified sequence
atgagacccctgtgcgtgacctgctggtggctgggcctgctggccgccatgggcgccgtggccggccaggaggacggcttcgagggcaccgaggagggcagccccagagagttcatctacctgaacagatacaagagagccggcgagagccaggacaagtgcacctacaccttcatcgtgccccagcagagagtgaccggcgccatctgcgtgaacagcaaggagcccgaggtgctgctggagaacagagtgcacaagcaggagctggagctgctgaacaacgagctgctgaagcagaagagacagatcgagaccctgcagcagctggtggaggtggacggcggcatcgtgagcgaggtgaagctgctgagaaaggagagcagaaacatgaacagcagagtgacccagctgtacatgcagctgctgcacgagatcatcagaaagagagacaacgccctggagctgagccagctggagaacagaatcctgaaccagaccgccgacatgctgcagctggccagcaagtacaaggacctggagcacaagtaccagcacctggccaccctggcccacaaccagagcgagatcatcgcccagctggaggagcactgccagagagtgcccagcgccagacccgtgccccagcccccccccgccgccccccccagagtgtaccagccccccacctacaacagaatcatcaaccagatcagcaccaacgagatccagagcgaccagaacctgaaggtgctgcccccccccctgcccaccatgcccaccctgaccagcctgcccagcagcaccgacaagcccagcggcccctggagagactgcctgcaggccctggaggacggccacgacaccagcagcatctacctggtgaagcccgagaacaccaacagactgatgcaggtgtggtgcgaccagagacacgaccccggcggctggaccgtgatccagagaagactggacggcagcgtgaacttcttcagaaactgggagacctacaagcagggcttcggcaacatcgacggcgagtactggctgggcctggagaacatctactggctgaccaaccagggcaactacaagctgctggtgaccatggaggactggagcggcagaaaggtgttcgccgagtacgccagcttcagactggagcccgagagcgagtactacaagctgagactgggcagataccacggcaacgccggcgacagcttcacctggcacaacggcaagcagttcaccaccctggacagagaccacgacgtgtacaccggcaactgcgcccactaccagaagggcggctggtggtacaacgcctgcgcccacagcaacctgaacggcgtgtggtacagaggcggccactacagaagcagataccaggacggcgtgtactgggccgagttcagaggcggcagctacagcctgaagaaggtggtgatgatgatcagacccaaccccaacaccttccactag

SEQ ID NO: 172486 - DNA, 576 bp, Artificial Sequence
  derived and/or modified sequence
atgcaggtgtggtgcgaccagaggcatgaccccgggggttggaccgtgatccagaggcgcctggatggaagcgtgaactttttccggaactgggagacttacaagcagggttttgggaatatcgatggcgagtattggctgggtcttgaaaatatttattggcttaccaaccaggggaactataagctgttggtgacaatggaggactggagtggtcgcaaagtgtttgcagaatacgctagcttccgcctggagcctgaatctgagtattataaattgcgcctcggacggtatcatggtaatgccggcgatagttttacctggcacaatggtaaacaatttaccactctggacagggaccacgatgtatacaccggcaactgcgcccactaccagaagggtggatggtggtacaacgcctgtgcgcacagcaatttgaacggagtatggtaccgcggaggacactaccgctctcggtatcaggacggggtatactgggcagaattcagggggggaagttactcattaaaaaaggttgtgatgatgattcgaccgaatcctaacacgttccactag

SEQ ID NO: 172487 - DNA, 1482 bp, Artificial Sequence
  derived and/or modified sequence
atgcgccctttgtgcgtgacgtgctggtggctggggctgctcgccgcgatgggcgctgttgctgggcaggaagatggcttcgagggcaccgaagagggcagcccccgcgagtttatttacctgaacaggtacaaaagggctggagagagccaggacaaatgcacttacactttcattgtacctcagcagcgcgttacgggagcaatatgcgtcaatagtaaagagccggaagtcctcctggagaacagagtgcacaagcaggagctggaattgctgaataatgagcttttgaagcagaaacgccagattgagaccctgcagcaactggtggaagttgatggaggaatcgtaagcgaggtaaaactgctgaggaaagagtcacggaacatgaattcaagagtcacacagttatacatgcagctgctgcacgaaattatccggaaacgcgataatgcccttgagctgtcgcagcttgagaatcgcatattaaaccagacggctgacatgctccagcttgcatcaaagtataaagatcttgagcacaaataccagcatctggcaacgctcgcccacaatcaatcggagattatagcccagctggaagagcattgccaacgcgtgccctctgcccgcccggtgccacagccgccgcccgcagccccgccaagggtgtaccagccgccgacgtacaataggataataaatcagatttccaccaatgagatccagtccgatcagaatcttaaggtgctgccacccccactgcctaccatgcctacactcaccagtctgccatcctcaacagacaagccgtcgggcccctggcgcgactgtctccaagctttggaggacggccacgacacgtcttccatatacctggtgaagccagagaacacaaaccgcctcatgcaggtgtggtgcgaccagagacacgatcctgggggatggaccgtgatccaacgtcgactcgacgggtctgtcaacttctttaggaactgggagacctataaacaaggctttgggaacattgacggggagtactggctcgggttggaaaatatttactggttgactaaccaaggcaactacaagctgctggtaacaatggaggattggtccggtagaaaagtgttcgccgagtacgcatcatttcgtctggagcccgagtcagaatactacaaattgcgtctgggtagatatcacggtaacgcaggcgattctttcacctggcacaacggtaaacaattcactacactggatcgtgaccacgacgtgtataccggcaattgcgctcactaccaaaagggtgggtggtggtacaacgcttgcgctcacagtaaccttaatggagtctggtaccgtggagggcactaccggtccaggtaccaagacggagtgtactgggcagaatttaggggtggcagctacagcctgaagaaggtggtcatgatgatcagaccaaaccccaatacattccactag

SEQ ID NO: 172488 - DNA, 576 bp, Artificial Sequence
  derived and/or modified sequence
atgcaggtgtggtgtgaccagagacatgaccccggcggctggacagtcatccagaggcggctggatggctctgtgaacttcttcaggaactgggagacctacaagcagggcttcggcaacattgatggagagtactggctgggcctggagaacatctactggctgaccaaccagggcaactacaagctgctggtgaccatggaggactggagcggcaggaaggtgtttgctgaatatgccagcttccggctggagcctgagagcgagtactacaagctgcggctgggccgctaccatggaaatgctggggacagcttcacctggcacaacgggaagcagttcaccaccctggaccgggaccatgatgtgtacacaggcaactgtgcccactaccagaagggcggctggtggtacaatgcctgtgcccacagcaacctgaatggagtgtggtacagaggaggccactaccgcagccgctaccaggatggagtgtactgggccgagttccggggcggcagctacagcctgaagaaggtggtgatgatgatccggcccaaccccaacaccttccactag

SEQ ID NO: 172489 - DNA, 1482 bp, Artificial Sequence
  derived and/or modified sequence
atgaggcccctgtgtgtgacctgctggtggctgggcctgctggccgccatgggcgctgtggccggccaggaggatggctttgagggcacagaggagggcagcccccgggagttcatctacctgaaccgctacaagagagctggggagagccaggacaagtgcacctacaccttcatcgtgccccagcagagggtgactggagccatctgtgtgaacagcaaggagcctgaggtgctgctggagaacagagtgcacaagcaggagctggagctgctgaacaatgagctgctgaagcagaagaggcagatcgagaccctgcagcagctggtggaggtggatggcggcatcgtgtctgaggtgaagctgctgaggaaggagagcaggaacatgaacagccgggtgacccagctgtacatgcagctgctgcacgagatcatcaggaagagggacaatgccctggagctgagccagctggagaaccgcatcctgaaccagacagctgacatgctgcagctggccagcaagtacaaggacctggagcacaagtaccagcacctggccaccctggcccacaaccagagcgagatcatcgcccagctggaggagcactgccagagggtgcccagcgcccggcctgtgccccagcccccacctgctgccccaccccgggtgtaccagccccccacctacaaccgcatcatcaaccagatcagcaccaatgagatccagagcgaccagaacctgaaggtgctgcccccacccctgcccaccatgcccaccctgaccagcctgcccagcagcacagacaagcccagcggcccctggagggactgcctgcaggccctggaggatggccatgacaccagcagcatctacctggtgaagccagagaacaccaaccggctgatgcaggtgtggtgtgaccagagacatgaccccggcggctggacagtcatccagaggcggctggatggctctgtgaacttcttcaggaactgggagacctacaagcagggcttcggcaacattgatggagagtactggctgggcctggagaacatctactggctgaccaaccagggcaactacaagctgctggtgaccatggaggactggagcggcaggaaggtgtttgctgaatatgccagcttccggctggagcctgagagcgagtactacaagctgcggctgggccgctaccatggaaatgctggggacagcttcacctggcacaacgggaagcagttcaccaccctggaccgggaccatgatgtgtacacaggcaactgtgcccactaccagaagggcggctggtggtacaatgcctgtgcccacagcaacctgaatggagtgtggtacagaggaggccactaccgcagccgctaccaggatggagtgtactgggccgagttccggggcggcagctacagcctgaagaaggtggtgatgatgatccggcccaaccccaacaccttccactag

SEQ ID NO: 172490 - DNA, 2575 bp, Artificial Sequence
  derived and/or modified sequence
aaatgaggctgctgcggacggcctgaggatggaccccaagccctggacctgccgagcgtggcactgaggcagcggctgacgctactgtgagggaaagaaggttgtgagcagccccgcaggacccctggccagccctggccccagcctctgccggagccctctgtggaggcagagccagtggagcccagtgaggcagggctgcttggcagccaccggcctgcaactcaggaacccctccagaggccatggacaggctgccccgctgacggccagggtgaagcatgtgaggagccgccccggagccaagcaggagggaagaggcccatggagagactgcctgcaggccctggaggatggccacgacaccagctccatctacctggtgaagccggagaacaccaaccgcctcatgcaggtgtggtgcgaccagagacacgaccccgggggctggaccgtcatccagagacgcctggatggctctgttaacttcttcaggaactgggagacgtacaagcaagggtttgggaacattgacggcgaatactggctgggcctggagaacatttactggctgacgaaccaaggcaactacaaactcctggtgaccatggaggactggtccggccgcaaagtctttgcagaatacgccagtttccgcctggaacctgagagcgagtattataagctgcggctggggcgctaccatggcaatgcgggtgactcctttacatggcacaacggcaagcagttcaccaccctggacagagatcatgatgtctacacaggaaactgtgcccactaccagaagggaggctggtggtataacgcctgtgcccactccaacctcaacggggtctggtaccgcgggggccattaccggagccgctaccaggacggagtctactgggctgagttccgaggaggctcttactcactcaagaaagtggtgatgatgatccgaccgaaccccaacaccttccactaagccagctccccctcctgacctctcgtggccattgccaggagcccaccctggtcacgctggccacagcacaaagaacaactcctcaccagttcatcctgaggctgggaggaccgggatgctggattctgttttccgaagtcactgcagcggatgatggaactgaatcgatacggtgttttctgtccctcctactttccttcacaccagacagcccctcatgtctccaggacaggacaggactacagacaactctttctttaaataaattaagtctctacaataaaaacacaactgcaaagtaccttcataatatacatgtgtatgagcctcccttgtgcacgtatgtgtataccacatatatatgcatttagatatacatcacatgtgatatatctagatccatatataggtttgccttagatacctaaatacacatatattcagttctcagatgttgaagctgtcaccagcagctttgctcttaggagaaaagcatttcattagtgttgtattacttgagtctaagggtagatcacagactgtgtggtctcaactgaaaggatcacccttggcatctgtgtgcctggattcttccagaatgtctacaatgctaatctctcacatagaggttcccagcttcttaagaaccccttttggcacctaatcaaatttcaaaatccctccccccacattttcatacttttccccattctcaggacttttcaccatccatcacccacttatcccttcatttgacaccattcattaagtgccttctgtgtgtcagtccctggccactcactgcagttcaaggccccctttccgctctgctgtactcctcgcctacctactccttgccttttctgtcgcacagccccttctttccaggcgagattcctcagcttctgagtaggaaacactccgggctccaggtttctggttgggaagggaaggccaggccaaaagctccaccggccgtatagataatgtactcgcagttttgtatcttccattcatactttaacctacaggtcatttgagtcttcacacaaataataacctatctggccaggagaattatctcagaacagaagtcatcagatcatcagagcccccagatggctacagaccagagattccacgctctcaggctgactagagtccgcatctcatctccaaactacacttccctggagaacaagtgccacaaaaatgaaaacaggccacttctcaggagttgaataatcaggggtcaccggaccccttggttgatgcactgcagcatggtggctttctgagtcctgttggccaccaagtgtcagcctcagcactcccgggactattgccaagaaggggcaagggatgagtcaagaaggtgagacccttcccggtgggcacgtgggccaggctgtgtgagatgttggatgtttggtactgtccatgtctgggtgtgtgcctattacctcagcatttctcacaaagtgtaccatgtagcatgttttgtgtatataaaagggagggtttttttaaaaatatattcccagattatccttgtaatgacacgaatctgcaataaaagccatcagtgct

SEQ ID NO: 172491 - DNA, 3707 bp, Artificial Sequence
  derived and/or modified sequence
ggggcctgccgaggccgccaaagcgggctgggcgggaggggccaggccagctggggccggagctcgtgtgacatcaccgggcggcccgcctctgtctggggctgaggggaggcccggagcctttctggggcctgggggatcctcttgcactggtgggtggagagaagcgcctgcagccaaccagggtcaggctgtgctcacagtttcctctggcggcatgtaaaggctccacaaaggagttgggagttcaaatgaggctgctgcggacggcctgaggatggaccccaagccctggacctgccgagcgtggcactgaggcagcggctgacgctactgtgagggaaagaaggttgtgagcagccccgcaggacccctggccagccctggccccagcctctgccggagccctctgtggaggcagagccagtggagcccagtgaggcagggctgcttggcagccaccggcctgcaactcaggaacccctccagaggccatggacaggctgccccgctgacggccagggtgaagcatgtgaggagccgccccggagccaagcaggagggaagaggctttcatagattctattcacaaagaataaccaccattttgcaaggaccatgaggccactgtgcgtgacatgctggtggctcggactgctggctgccatgggagctgttgcaggccaggaggacggttttgagggcactgaggagggctcgccaagagagttcatttacctaaacaggtacaagcgggcgggcgagtcccaggacaagtgcacctacaccttcattgtgccccagcagcgggtcacgggtgccatctgcgtcaactccaaggagcctgaggtgcttctggagaaccgagtgcataagcaggagctagagctgctcaacaatgagctgctcaagcagaagcggcagatcgagacgctgcagcagctggtggaggtggacggcggcattgtgagcgaggtgaagctgctgcgcaaggagagccgcaacatgaactcgcgggtcacgcagctctacatgcagctcctgcacgagatcatccgcaagcgggacaacgcgttggagctctcccagctggagaacaggatcctgaaccagacagccgacatgctgcagctggccagcaagtacaaggacctggagcacaagtaccagcacctggccacactggcccacaaccaatcagagatcatcgcgcagcttgaggagcactgccagagggtgccctcggccaggcccgtcccccagccaccccccgctgccccgccccgggtctaccaaccacccacctacaaccgcatcatcaaccagatctctaccaacgagatccagagtgaccagaacctgaaggtgctgccaccccctctgcccactatgcccactctcaccagcctcccatcttccaccgacaagccgtcgggcccatggagagactgcctgcaggccctggaggatggccacgacaccagctccatctacctggtgaagccggagaacaccaaccgcctcatgcaggtgtggtgcgaccagagacacgaccccgggggctggaccgtcatccagagacgcctggatggctctgttaacttcttcaggaactgggagacgtacaagcaagggtttgggaacattgacggcgaatactggctgggcctggagaacatttactggctgacgaaccaaggcaactacaaactcctggtgaccatggaggactggtccggccgcaaagtctttgcagaatacgccagtttccgcctggaacctgagagcgagtattataagctgcggctggggcgctaccatggcaatgcgggtgactcctttacatggcacaacggcaagcagttcaccaccctggacagagatcatgatgtctacacaggaaactgtgcccactaccagaagggaggctggtggtataacgcctgtgcccactccaacctcaacggggtctggtaccgcgggggccattaccggagccgctaccaggacggagtctactgggctgagttccgaggaggctcttactcactcaagaaagtggtgatgatgatccgaccgaaccccaacaccttccactaagccagctccccctcctgacctctcgtggccattgccaggagcccaccctggtcacgctggccacagcacaaagaacaactcctcaccagttcatcctgaggctgggaggaccgggatgctggattctgttttccgaagtcactgcagcggatgatggaactgaatcgatacggtgttttctgtccctcctactttccttcacaccagacagcccctcatgtctccaggacaggacaggactacagacaactctttctttaaataaattaagtctctacaataaaaacacaactgcaaagtaccttcataatatacatgtgtatgagcctcccttgtgcacgtatgtgtataccacatatatatgcatttagatatacatcacatgtgatatatctagatccatatataggtttgccttagatacctaaatacacatatattcagttctcagatgttgaagctgtcaccagcagctttgctcttaggagaaaagcatttcattagtgttgtattacttgagtctaagggtagatcacagactgtgtggtctcaactgaaaggatcacccttggcatctgtgtgcctggattcttccagaatgtctacaatgctaatctctcacatagaggttcccagcttcttaagaaccccttttggcacctaatcaaatttcaaaatccctccccccacattttcatacttttccccattctcaggacttttcaccatccatcacccacttatcccttcatttgacaccattcattaagtgccttctgtgtgtcagtccctggccactcactgcagttcaaggccccctttccgctctgctgtactcctcgcctacctactccttgccttttctgtcgcacagccccttctttccaggcgagattcctcagcttctgagtaggaaacactccgggctccaggtttctggttgggaagggaaggccaggccaaaagctccaccggccgtatagataatgtactcgcagttttgtatcttccattcatactttaacctacaggtcatttgagtcttcacacaaataataacctatctggccaggagaattatctcagaacagaagtcatcagatcatcagagcccccagatggctacagaccagagattccacgctctcaggctgactagagtccgcatctcatctccaaactacacttccctggagaacaagtgccacaaaaatgaaaacaggccacttctcaggagttgaataatcaggggtcaccggaccccttggttgatgcactgcagcatggtggctttctgagtcctgttggccaccaagtgtcagcctcagcactcccgggactattgccaagaaggggcaagggatgagtcaagaaggtgagacccttcccggtgggcacgtgggccaggctgtgtgagatgttggatgtttggtactgtccatgtctgggtgtgtgcctattacctcagcatttctcacaaagtgtaccatgtagcatgttttgtgtatataaaagggagggtttttttaaaaatatattcccagattatccttgtaatgacacgaatctgcaataaaagccatcagtgctatttggatgtatctaca

SEQ ID NO: 172492 - DNA, 576 bp, Artificial Sequence
  derived and/or modified sequence
atgcaggtgtggtgcgaccagcggcacgaccccggcggctggaccgtgattcagcgcagactggacggctctgtgaactttttccgcaactgggaaacatacaagcagggctttggcaacatagatggtgagtactggctcggcctggagaatatctattggttaactaaccagggcaactataagctgctcgtgacaatggaagattggagcggtagaaaagtatttgcagaatacgcctcattcagactcgagccagagtccgaatattacaagctgaggttaggccgttaccacggaaacgctggcgattcctttacctggcataacgggaagcagttcactaccctggatagggaccatgacgtttacaccggcaactgcgcccactatcaaaagggtggatggtggtacaacgcatgtgcccactcaaacctgaacggcgtctggtatagaggggggcattatcgctctaggtatcaggacggggtctactgggccgagtttcggggcgggagttatagtttaaagaaggtggtcatgatgataagacccaatccaaacacttttcactag

SEQ ID NO: 172493 - DNA, 1482 bp, Artificial Sequence
  derived and/or modified sequence
atgcggcccctgtgcgtgacctgctggtggctgggcctgctggccgccatgggggccgtcgccggacaagaggatggcttcgagggcacagaggaagggagccctcgagagttcatctatttgaatagatataagcgggccggggaatcccaagataaatgtacgtacacatttattgtgccgcagcaacgagtgactggggctatttgcgtgaatagcaaggagcctgaggttctcctcgaaaatagagtccacaagcaggagctagagctccttaacaacgagcttttgaagcagaaaaggcagattgaaaccttgcaacagctggttgaagtcgatggtggtattgtgtccgaggtcaaactcctgcggaaagagtcccggaatatgaactccagggtgactcagctttatatgcagttactgcatgagatcatcagaaagagagataatgccctggagttgagtcagttagagaacaggattctcaaccaaactgctgacatgctccagctcgctagtaagtacaaagatctcgagcacaagtatcagcatctggcaaccctggcgcataaccaaagcgaaatcattgcccagctcgaagagcattgtcagagagtgccctccgcccggccagtaccacagcccccacccgcggcccctccccgcgtgtaccagcctcctacttacaatcggataattaaccagatctcaaccaacgagatccaaagtgaccagaatctgaaggtcctcccgcccccactgcccactatgccaaccctcactagccttcccagttccaccgataaaccgtccggaccatggagggattgcctgcaggcccttgaagacggacatgatacatcttcaatctacctcgtaaaaccggagaacactaaccgcctaatgcaggtgtggtgcgaccaaagacatgaccctggtgggtggaccgtgatacagcggcggctagacggtagcgttaatttctttcggaactgggagacttacaaacaggggtttgggaacatcgatggagagtactggctgggactcgagaatatctactggttaacgaaccaggggaactataagctgctggtgaccatggaggactggtcaggcagaaaagttttcgccgagtatgcctctttcaggctggaacctgagagcgagtactataagctgagactcggccggtatcacggcaatgccggagattcttttacctggcacaatggcaaacagtttactacgctggaccgagatcacgatgtctacacaggtaactgcgctcattatcaaaagggcgggtggtggtacaacgcttgtgcgcattcgaacctcaacggcgtgtggtataggggtgggcactaccgatccaggtatcaagacggagtctactgggccgaatttagggggggaagctacagtcttaagaaagtggtcatgatgattaggccgaaccctaatacattccattag

SEQ ID NO: 172494 - RNA, 576 nt, Artificial Sequence
  derived and/or modified sequence
augcaggucuggugugaccaacgacacgaucccgggggcuggacggucauucagcgucgcuuggacggcucuguaaauuuuuuccguaacugggaaacauacaaacagggguucggcaacaucgauggugaguacuggcugggcuuagaaaauaucuacuggcucacgaaccaagguaacuacaagcuucugguuacgauggaggauuggagcgguagaaagguguuugccgaguacgccuccuuccggcuggaacccgaguccgaauacuacaaguugcguuuagguagauaucacgggaaugcaggagauagcuucaccuggcauaaugggaaacaguuuacuacguuagauagagaccacgauguguacaccgggaauugcgcccauuaucagaaaggagguuggugguacaaugccugcgcccauucuaaucuuaacggaguaugguaucgcgggggucauuaccgcaguagauaccaagacggaguuuauugggccgaguuccguggggguagcuacucgcugaagaagguggugaugaugauccgucccaauccuaacacauuucauuag

SEQ ID NO: 172495 - RNA, 1482 nt, Artificial Sequence
  derived and/or modified sequence
augcggccacugugugucacguguugguggcuuggccuuuuggccgcuaugggugcuguugcagggcaagaagacggguucgaaggaacugaagagggaagcccaagagaauuuaucuaccuaaaccgcuacaaaagagcaggggaaucucaggauaagugcacuuauacuuucaucgucccgcagcagagggugaccggugccauuugugugaacucaaaagaaccagaggugcuacucgagaauaggguacauaagcaggagcuggaauugcugaauaacgagcugcucaaacaaaagaggcagaucgagacacuccagcaauugguugaaguggauggaggaauagucucagaaguuaagcuccucaggaaggaaucgcggaauaugaacucgagagugacacagcuguacaugcaauuacuccaugagauuauucgcaaacgggacaaugcuuuggagcuuucacaacuagaaaauaggauacuaaaucaaacagcagauaugcugcagcuugcuagcaaauacaaggacuuagagcacaaguaucagcacuuagccaccuuagcgcauaaccaaucugaaauaaucgcucagcucgaggagcacugucaacgcguacccucggccagacccgugccucagccuccaccugcugcgcccccacggguguaccaaccuccaaccuauaaccgcaucaucaaccagauuuccaccaacgaaauccaaagcgaucagaaccugaagguauugccaccaccccuuccaaccaugccuacccugacaagcuugcccucuucgacugacaagcccaguggcccguggagagacugccugcaggcucuggaggacggccaugauacauccaguauuuaucucguuaagcccgaaaacaccaaccgauugaugcagguguggugcgaucagagacacgauccuggcggguggacugugauccagcguaggcuagaugggucugucaacuuuuuuagaaauugggagacauauaagcaggguuucgggaacauugacggggaguauugguugggccuugaaaauauauacuggcucacuaaucagggaaacuauaaguugcucguuacuauggaggauugguccgggaggaaagucuucgcggaguaugcuucuuuucgguuagagcccgaguccgaguacuacaagcuuagacucggucguuaccauggcaacgcaggggauucuuucacuuggcauaauggcaaacaguucaccacucuggacagagaccaugacguguacaccgguaauugugcccacuaucagaagggaggcuggugguauaaugcuugugcccauuccaaucugaacggagugugguaucggggagggcauuaccggagccgcuaucaggauggaguguacugggccgaguuucggggcgggaguuauagccuuaaaaagguagugaugaugauuagaccuaaucccaacaccuuucauuag

SEQ ID NO: 172496 - RNA, 576 nt, Artificial Sequence
  derived and/or modified sequence
augcaagucuggugcgaccagcgucaugaccccgguggcuggaccgugauccaacgcagacuggacggcagcgugaauuucuuucggaacugggagacuuacaagcagggcuuuggaaauauugauggcgaguacuggcuaggacuugaaaauauuuauugguugacaaaucaaggaaauuacaaacugcuagugacgauggaggacuggagcggcagaaaagucuuugccgaguacgcaaguuuccggcuugaacccgaaucugaguauuacaaauuacgucugggccgauaccacgggaaugcaggcgacaguuucaccuggcauaacgggaaacaguuuacgacccuggacagggaucacgacguuuacaccgggaacugcgcgcacuaccaaaaaggcggcuggugguauaacgcuugcgcccacagcaaccugaacgggguaugguaucggggcggccauuaucgaaguagguaucaggauggcguauauugggcagaauuuagaggaggcucauauucccucaaaaaaguaguaaugaugaucagaccaaauccaaacacauuucacuag

SEQ ID NO: 172497 - RNA, 1482 nt, Artificial Sequence
  derived and/or modified sequence
augcgaccauuaugcgugaccugcugguggcugggcuugcuggcagcaaugggcgcuguugcuggacaggaggaugguuuugaggguacagaagaaggcagcccccgcgaauuuaucuauuugaaucgguauaaacgugcuggcgagucccaggacaaauguacauacaccuucaucgucccccaacagagagugacgggagcuauuugugugaauucuaaagaaccugaagugcuguuagaaaaucgcguccauaagcaagaacuagagcugcuaaauaacgagcuucuuaagcagaagagacaaauagaaacucuccagcagcugguagaaguagaugguggaaucgucagcgaaguuaaguuguuacgaaaagaaucaagaaauaugaacagccgagugacacaauuauacaugcagcuccuccacgagauuauucggaagcgggacaacgcucuagagcugucccaguuagagaaucguauccucaaccaaaccgcugauauguuacagcucgccucaaaauauaaggacuuggaacacaaauaucaacaccuugcaacccuugcucacaaucagucagaaaucauagcucagcucgaagaacacugccaaagaguuccaagcgccagaccugucccccagccaccucccgccgcgccuccgagagucuaucagccacccacauacaaucgcaucaucaaccaaauuuccacuaacgaaauucaguccgaucagaaccuaaaagugcucccucccccccuccccaccaugccuacccugacaagucugccuaguaguaccgauaagccuagcggaccguggagagauugucugcaagcccucgaagauggacacgauacaucaagcauuuaccuaguuaagccggagaauacuaauagacugaugcaggucuggugugaucaaagacacgauccaggugguuggacagugauccaacggagacuggaugggucuguuaauuucuuuagaaacugggaaacguauaagcagggauuuggcaacaucgacggggaguacuggcugggucucgaaaauauuuauuggcucacuaaccaggguaacuacaaacugcuggugacaauggaagacuggagcggcagaaaaguguucgcggaauaugcaucguuuagguuggaaccagagagugaauauuauaaacugcgcuuggggagguaucacggcaacgccggggacuccuuuacauggcauaauggcaagcaguucacuacuuuggaucgagaccacgacguguauaccggcaauugugcccauuaccagaaaggaggguggugguauaacgcuugugcccacaguaacuugaauggaguuugguaccgaggaggucacuauaggaguagguaucaggauggcguguauugggccgaguucagaggaggaagcuauucucuaaaaaaaguugugaugaugauucgccccaacccuaacacauuccauuag

SEQ ID NO: 172498 - protein, 510 aa, Artificial Sequence
  derived and/or modified sequence
MEEPQAGDAARFSCPPNFTAKPPASESPRFSLEALTGPDTELWLIQAPADFAPECFNGRHVPLSGSQIVKGKLAGKRHRYRVLSSCPQAGEATLLAPSTEAGGGLTCASAPQGTLRILEGPQQSLSGSPLQPIPASPPPQIPPGLRPRFCAFGGNPPVTGPRSALAPNLLTSGKKKKEMQVTEAPVTQEAVNGHGALEVDMALGSPEMDVRKKKKKKNQQLKEPEAAGPVGTEPTVETLEPLGVLFPSTTKKRKKPKGKETFEPEDKTVKQEQINTEPLEDTVLSPTKKRKRQKGTEGMEPEEGVTVESQPQVKVEPLEEAIPLPPTKKRKKEKGQMAMMEPGTEAMEPVEPEMKPLESPGGTMAPQQPEGAKPQAQAALAAPKKKTKKEKQQDATVEPETEVVGPELPDDLEPQAAPTSTKKKKKKKERGHTVTEPIQPLEPELPGEGQPEARATPGSTKKRKKQSQESRMPETVPQEEMPGPPLNSESGEEAPTGRDKKRKQQQQQPV

SEQ ID NO: 172499 - DNA, 3382 bp, Artificial Sequence
  derived and/or modified sequence
ccggaagtgctgcgagccctgggccacgctggccgtgctggcagtgggccgcctcgatccctctgcagtctttcccttgaggctccaagaccagcaggtgaggcctcgcggcgctgaaaccgtgaggcccggaccacaggctccagatggaccctgggaaggacaaagagggggtgccccagccctcagggccgccagcaaggaagaaatttgtgatacccctcgacgaggatgaggtccctcctggagtggccaagcccttattccgatctacacagagccttcccactgtggacacctcggcccaggcggcccctcagacctacgccgaatatgccatctcacagcctctggaaggggctggggccacgtgccccacagggtcagagcccctggcaggagagacgcccaaccaggccctgaaacccggggcaaaatccaacagcatcattgtgagccctcggcagaggggcaatcccgtactgaagttcgtgcgcaatgtgccctgggaatttggcgacgtaattcccgactatgtgctgggccagagcacctgtgccctgttcctcagcctccgctaccacaacctgcacccagactacatccatgggcggctgcagagcctggggaagaacttcgccttgcgggtcctgcttgtccaggtggatgtgaaagatccccagcaggccctcaaggagctggctaagatgtgtatcctggccgactgcacattgatcctcgcctggagccccgaggaagctgggcggtacctggagacctacaaggcctatgagcagaaaccagcggacctcctgatggagaagctagagcaggacttcgtctcccgggtgactgaatgtctgaccaccgtgaagtcagtcaacaaaacggacagtcagaccctcctgaccacatttggatctctggaacagctcatcgccgcatcaagagaagatctggccttatgcccaggcctgggccctcagaaagcccggaggctgtttgatgtcctgcacgagcccttcttgaaagtaccctgatgaccccagctgccaaggaaacccccagtgtaataataaatcgtcctcccaggccaggctcctgctggctgcgctggtgcagtctctggggagggattctgggggtgtcaccttctggtggcccaggtgggcaccttcagctttctttagttcctcagtttcccgggggcagactacacaggctgctgctgctgctgcttccgcttcttgtcccggcctgtgggagcctcctccccagactctgaattcagtggcggccctggcatctcctcttggggcactgtctctggcatccggctttcctgactctgcttcttcctcttcttggtggatcccggagttgccctggcttcaggctgtccctcccctggcagttcaggctctagtggctgaattggctcagtcactgtgtgacctctctctttcttcttcttcttcttcttggtggatgtgggagctgcctgaggctcaaggtcatccggcagctcaggccccaccacctctgtctctggctccactgtggcatcttgctgtttttctttcttcgtcttctttttgggagctgccagagctgcctgggcctgaggcttcgctccttctggctgttgaggcgccatggtcccccctggggactccagaggcttcatctccggctccactggctccatcgcctccgtccctggctccatcattgccatctgtcccttttcttttttcctcttcttcgtagggggcagagggatggcttcctccagtggctccaccttcacctgtggctgagactcaactgtcaccccctcctctggctccatcccttccgtccccttttgcctctttctctttttggtcggggacaggactgtgtcttctagaggctcagtgttaatctgttcctgcttcactgtcttgtcttctggctcgaaggtttctttccctttgggcttcttcctcttcttggtggtggacgggaacagcactcccagaggctccagtgtctccactgtgggctctgtccccacaggccctgctgcctctggttctttcagctgctgattttttttcttcttcttcttccgcacatccatttctggcgaccccaaagccatgtccacctccagggccccgtgcccattcactgcctcctgagtgactggggcctctgtcacctgcatctcctttttcttcttccctgaggtgagcaggttgggggccaaggctgacctaggccctgtgactggtgggttgcccccaaaggcacagaaccgaggcctcaggccaggagggatctgtggtgggggacttgctgggatgggctgcagagggctccctgacagggattgctggggaccctcaaggatccttagggtgccctggggggctgaggcacaggtgagtccacctcctgcctccgttgagggggccagcagggtcgcttctccagcttggggacagctgctgaggactcgatagcggtgccgcttgcctgccaatttgcccttgacgatctgggagccagagagaggcacatgccgcccattgaagctacagagagaaacagggagggcagaggcttaagtggaacaggagagggaaggttttttgattttttttttgtttttttttgagagagtcttgctctgttgcctaggctggagtgcagtggcatgatctcggctcactgcaatgtccacctcctgggttcaagcgattctcctgcctcagcctctcaagtagctgggattacaggcacctgccaccacgcccagccaatttttgtatttttagtagagacaatttcactatgttggccaggctggtcttgaactcctgacctcaagtgatctgctcgcctcggcctcccaaaggatgggattacaggcaccagccactgcgcctggctggcctctggtttttaataaaacatgactagagtgactccatcttaaagtgagtagctaggcacttacaaggttcatgcttatggcctgaaaataaccacatcccaggctgaccaccaattataattacagaatatttatggccatacagaacatgttccaccaagcctgcagaatgtccaaatgtcctaagaatgcagcccccattacttaaatataacataaatgagcaagcttaggttgcaggattaatggtcgtggataacaccaatagcccctacctttagtgagcttatctgcacactccaagtttaactatagttccttatagtttcttataagtagaaatactaacaaagggctgtgggtttctccccctgctttctgaggacactctactctgtaaaggagtagtttccaataaacttgtttctttcactgtgc

SEQ ID NO: 172500 - DNA, 3310 bp, Artificial Sequence
  derived and/or modified sequence
ccggaagtgctgcgagccctgggccacgctggccgtgctggcagtgggccgcctcgatccctctgcagtctttcccttgaggctccaagaccagcaggtgaggcctcgcggcgctgaaaccgtgaggcccggaccacaggctccagatggaccctgggaaggacaaagagggggtgccccagccctcagggccgccagcaaggaagaaatttgtgatacccctcgacgaggatgaggtccctcctggagtggccaagcccttattccgatctacacagagccttcccactgtggacacctcggcccaggcggcccctcagacctacgccgaatatgccatctcacagcctctggaaggggctggggccacgtgccccacagggtcagagcccctggcaggagagacgcccaaccaggccctgaaacccggggcaaaatccaacagcatcattgtgagccctcggcagaggggcaatcccgtactgaagttcgtgcgcaatgtgccctgggaatttggcgacgtaattcccgactatgtgctgggccagagcacctgtgccctgttcctcagcctccgctaccacaacctgcacccagactacatccatgggcggctgcagagcctggggaagaacttcgccttgcgggtcctgcttgtccaggtggatgtgaaagatccccagcaggccctcaaggagctggctaagatgtgtatcctggccgactgcacattgatcctcgcctggagccccgaggaagctgggcggtacctggagacctacaaggcctatgagcagaaaccagcggacctcctgatggagaagctagagcaggacttcgtctcccggtctctggaacagctcatcgccgcatcaagagaagatctggccttatgcccaggcctgggccctcagaaagcccggaggctgtttgatgtcctgcacgagcccttcttgaaagtaccctgatgaccccagctgccaaggaaacccccagtgtaataataaatcgtcctcccaggccaggctcctgctggctgcgctggtgcagtctctggggagggattctgggggtgtcaccttctggtggcccaggtgggcaccttcagctttctttagttcctcagtttcccgggggcagactacacaggctgctgctgctgctgcttccgcttcttgtcccggcctgtgggagcctcctccccagactctgaattcagtggcggccctggcatctcctcttggggcactgtctctggcatccggctttcctgactctgcttcttcctcttcttggtggatcccggagttgccctggcttcaggctgtccctcccctggcagttcaggctctagtggctgaattggctcagtcactgtgtgacctctctctttcttcttcttcttcttcttggtggatgtgggagctgcctgaggctcaaggtcatccggcagctcaggccccaccacctctgtctctggctccactgtggcatcttgctgtttttctttcttcgtcttctttttgggagctgccagagctgcctgggcctgaggcttcgctccttctggctgttgaggcgccatggtcccccctggggactccagaggcttcatctccggctccactggctccatcgcctccgtccctggctccatcattgccatctgtcccttttcttttttcctcttcttcgtagggggcagagggatggcttcctccagtggctccaccttcacctgtggctgagactcaactgtcaccccctcctctggctccatcccttccgtccccttttgcctctttctctttttggtcggggacaggactgtgtcttctagaggctcagtgttaatctgttcctgcttcactgtcttgtcttctggctcgaaggtttctttccctttgggcttcttcctcttcttggtggtggacgggaacagcactcccagaggctccagtgtctccactgtgggctctgtccccacaggccctgctgcctctggttctttcagctgctgattttttttcttcttcttcttccgcacatccatttctggcgaccccaaagccatgtccacctccagggccccgtgcccattcactgcctcctgagtgactggggcctctgtcacctgcatctcctttttcttcttccctgaggtgagcaggttgggggccaaggctgacctaggccctgtgactggtgggttgcccccaaaggcacagaaccgaggcctcaggccaggagggatctgtggtgggggacttgctgggatgggctgcagagggctccctgacagggattgctggggaccctcaaggatccttagggtgccctggggggctgaggcacaggtgagtccacctcctgcctccgttgagggggccagcagggtcgcttctccagcttggggacagctgctgaggactcgatagcggtgccgcttgcctgccaatttgcccttgacgatctgggagccagagagaggcacatgccgcccattgaagctacagagagaaacagggagggcagaggcttaagtggaacaggagagggaaggttttttgattttttttttgtttttttttgagagagtcttgctctgttgcctaggctggagtgcagtggcatgatctcggctcactgcaatgtccacctcctgggttcaagcgattctcctgcctcagcctctcaagtagctgggattacaggcacctgccaccacgcccagccaatttttgtatttttagtagagacaatttcactatgttggccaggctggtcttgaactcctgacctcaagtgatctgctcgcctcggcctcccaaaggatgggattacaggcaccagccactgcgcctggctggcctctggtttttaataaaacatgactagagtgactccatcttaaagtgagtagctaggcacttacaaggttcatgcttatggcctgaaaataaccacatcccaggctgaccaccaattataattacagaatatttatggccatacagaacatgttccaccaagcctgcagaatgtccaaatgtcctaagaatgcagcccccattacttaaatataacataaatgagcaagcttaggttgcaggattaatggtcgtggataacaccaatagcccctacctttagtgagcttatctgcacactccaagtttaactatagttccttatagtttcttataagtagaaatactaacaaagggctgtgggtttctccccctgctttctgaggacactctactctgtaaaggagtagtttccaataaacttgtttctttcactgtgc

SEQ ID NO: 172501 - DNA, 3119 bp, Artificial Sequence
  derived and/or modified sequence
acatctctcacgataaatgagtggggagaacttatagcccttgaagtcaaccatctcacacctttccaaaggacgcgaccataactctaaaaggctccagatggaccctgggaaggacaaagagggggtgccccagccctcagggccgccagcaaggaagaaatttgtgatacccctcgacgaggatgaggtccctcctggagtgaggggcaatcccgtactgaagttcgtgcgcaatgtgccctgggaatttggcgacgtaattcccgactatgtgctgggccagagcacctgtgccctgttcctcagcctccgctaccacaacctgcacccagactacatccatgggcggctgcagagcctggggaagaacttcgccttgcgggtcctgcttgtccaggtggatgtgaaagatccccagcaggccctcaaggagctggctaagatgtgtatcctggccgactgcacattgatcctcgcctggagccccgaggaagctgggcggtacctggagacctacaaggcctatgagcagaaaccagcggacctcctgatggagaagctagagcaggacttcgtctcccgggtgactgaatgtctgaccaccgtgaagtcagtcaacaaaacggacagtcagaccctcctgaccacatttggatctctggaacagctcatcgccgcatcaagagaagatctggccttatgcccaggcctgggccctcagaaagcccggaggctgtttgatgtcctgcacgagcccttcttgaaagtaccctgatgaccccagctgccaaggaaacccccagtgtaataataaatcgtcctcccaggccaggctcctgctggctgcgctggtgcagtctctggggagggattctgggggtgtcaccttctggtggcccaggtgggcaccttcagctttctttagttcctcagtttcccgggggcagactacacaggctgctgctgctgctgcttccgcttcttgtcccggcctgtgggagcctcctccccagactctgaattcagtggcggccctggcatctcctcttggggcactgtctctggcatccggctttcctgactctgcttcttcctcttcttggtggatcccggagttgccctggcttcaggctgtccctcccctggcagttcaggctctagtggctgaattggctcagtcactgtgtgacctctctctttcttcttcttcttcttcttggtggatgtgggagctgcctgaggctcaaggtcatccggcagctcaggccccaccacctctgtctctggctccactgtggcatcttgctgtttttctttcttcgtcttctttttgggagctgccagagctgcctgggcctgaggcttcgctccttctggctgttgaggcgccatggtcccccctggggactccagaggcttcatctccggctccactggctccatcgcctccgtccctggctccatcattgccatctgtcccttttcttttttcctcttcttcgtagggggcagagggatggcttcctccagtggctccaccttcacctgtggctgagactcaactgtcaccccctcctctggctccatcccttccgtccccttttgcctctttctctttttggtcggggacaggactgtgtcttctagaggctcagtgttaatctgttcctgcttcactgtcttgtcttctggctcgaaggtttctttccctttgggcttcttcctcttcttggtggtggacgggaacagcactcccagaggctccagtgtctccactgtgggctctgtccccacaggccctgctgcctctggttctttcagctgctgattttttttcttcttcttcttccgcacatccatttctggcgaccccaaagccatgtccacctccagggccccgtgcccattcactgcctcctgagtgactggggcctctgtcacctgcatctcctttttcttcttccctgaggtgagcaggttgggggccaaggctgacctaggccctgtgactggtgggttgcccccaaaggcacagaaccgaggcctcaggccaggagggatctgtggtgggggacttgctgggatgggctgcagagggctccctgacagggattgctggggaccctcaaggatccttagggtgccctggggggctgaggcacaggtgagtccacctcctgcctccgttgagggggccagcagggtcgcttctccagcttggggacagctgctgaggactcgatagcggtgccgcttgcctgccaatttgcccttgacgatctgggagccagagagaggcacatgccgcccattgaagctacagagagaaacagggagggcagaggcttaagtggaacaggagagggaaggttttttgattttttttttgtttttttttgagagagtcttgctctgttgcctaggctggagtgcagtggcatgatctcggctcactgcaatgtccacctcctgggttcaagcgattctcctgcctcagcctctcaagtagctgggattacaggcacctgccaccacgcccagccaatttttgtatttttagtagagacaatttcactatgttggccaggctggtcttgaactcctgacctcaagtgatctgctcgcctcggcctcccaaaggatgggattacaggcaccagccactgcgcctggctggcctctggtttttaataaaacatgactagagtgactccatcttaaagtgagtagctaggcacttacaaggttcatgcttatggcctgaaaataaccacatcccaggctgaccaccaattataattacagaatatttatggccatacagaacatgttccaccaagcctgcagaatgtccaaatgtcctaagaatgcagcccccattacttaaatataacataaatgagcaagcttaggttgcaggattaatggtcgtggataacaccaatagcccctacctttagtgagcttatctgcacactccaagtttaactatagttccttatagtttcttataagtagaaatactaacaaagggctgtgggtttctccccctgctttctgaggacactctactctgtaaaggagtagtttccaataaacttgtttctttcactgtg

SEQ ID NO: 172502 - DNA, 1533 bp, Artificial Sequence
  derived and/or modified sequence
atggaggaacctcaagccggagatgccgctaggttttcctgtccccccaacttcacagccaagcctcctgcaagcgagagccccaggtttagcctagaagctctgacaggcccagataccgagctgtggctgatacaggcccccgcggactttgcacccgaatgtttcaacggccgacacgtccctctgtccgggagccagattgtgaagggcaagctggccggcaagcgacaccgctaccgcgtgctgagctcatgtccgcaggccggcgaagcgacactgttggctccctcaaccgaagctggcggtgggctgacatgcgccagcgccccccaaggaactctcaggattcttgaaggaccacagcaatcactatcaggaagccctctgcaacccattcctgctagcccccccccccagatacccccgggcctacggcctagattctgcgcctttggcggcaacccgcctgtgacggggccaaggtcggccttagcaccaaacttgttaacgagcgggaaaaaaaaaaaggaaatgcaggtgacagaagcgcccgtcacccaagaagctgttaatggacatggtgcactcgaagtagatatggccctcgggtcacctgagatggacgtgagaaagaaaaagaagaagaagaatcaacagcttaaggaacccgaggctgctggcccagtgggtactgagcccaccgttgaaacactggagccactgggcgtgctgtttcccagtacgacaaaaaagcgcaagaaacccaaaggaaaggagactttcgaacccgaagataagacagtgaaacaggaacagatcaacacagagccactggaagatacggttttgagccctaccaaaaaacgcaagagacagaagggcacagagggaatggagcctgaagagggagtcaccgtggagagccagccccaggtgaaggtggaacccctcgaagaagccattccgctccctcccactaaaaaaaggaaaaaggagaagggccagatggccatgatggagccgggcactgaagccatggaaccagtcgaaccagaaatgaaacccctcgagagcccgggcggcactatggcgcctcagcaacctgaaggcgctaagcctcaagcccaagcagcacttgccgcccccaaaaagaaaaccaagaaggaaaaacagcaggatgccactgtggaacctgaaaccgaagtggtgggacccgagctgcctgatgacctggagccgcaggcggcaccaactagcactaagaagaaaaagaagaagaaagagagaggacacacagtgactgagccaattcagcctctggaacctgaactgcctggtgaaggccagccagaagcacgggcaacccccggaagcacaaagaaacgcaagaagcagtcccaggaatctaggatgcctgagactgtgccgcaggaggagatgcccgggcctccattgaactccgagagtggtgaagaagccccgactggacgggacaaaaagcggaagcaacagcaacagcagccagtgtag

SEQ ID NO: 172503 - DNA, 1533 bp, Artificial Sequence
  derived and/or modified sequence
atggaggagccccaggccggagatgctgcccgcttcagctgcccccccaacttcaccgccaagcccccagccagcgagagcccccgcttcagcctggaggccctgaccggccctgacacagagctgtggctgatccaggccccagctgactttgcccctgagtgcttcaacggccgccacgtgcccctgagcggcagccagatcgtgaagggcaagctggccggcaagaggcaccgctacagagtgctgagcagctgcccccaggccggggaggccaccctgctggcccccagcacagaagctgggggcggcctgacctgtgccagcgccccccagggcaccctgcgcatcctggagggcccccagcagagcctgagcggcagccccctgcagcccatcccagccagccccccaccccagatccccccaggcctgcggccccgcttctgtgccttcggcggcaacccccctgtgacaggccccaggtctgccctggcccccaacctgctgaccagcggcaagaagaagaaggagatgcaggtgacagaggcccctgtgacccaggaggccgtgaatggccacggggccctggaggtggacatggccctgggcagccctgagatggatgtgaggaagaagaagaagaagaagaaccagcagctgaaggagcctgaggccgccggccctgtgggcacagagcccaccgtggagaccctggagcccctgggcgtgctcttccccagcaccaccaagaagaggaagaagcccaagggcaaggagacctttgagcctgaggacaagacagtgaagcaggagcagatcaacacagagcccctggaggacacagtgctgagccccaccaagaagaggaagaggcagaagggcacagagggcatggagcctgaggagggcgtgacagtggagagccagccccaggtgaaggtggagcccctggaggaggccatccccctgccccccaccaagaagaggaagaaggagaagggccagatggccatgatggagcccggcacagaggccatggagcctgtggagcctgagatgaagcccctggagagccctgggggcaccatggccccccagcagcctgagggcgccaagccccaggcccaggccgccctggccgcccccaagaagaagaccaagaaggagaagcagcaggatgccaccgtggagcctgagacagaggtggtgggccctgagctgcctgatgacctggagccccaggccgcccccaccagcaccaagaagaagaagaagaagaaggagcggggccacacagtgacagagcccatccagcccctggagcctgagctgcccggggagggccagcctgaggcccgggccaccccaggcagcaccaagaagaggaagaagcagagccaggagagcaggatgcctgagaccgtgccccaggaggagatgcctggcccccccctgaacagcgagagcggggaggaggcccccaccggccgggacaagaagaggaagcagcagcagcagcagcctgtgtag

SEQ ID NO: 172504 - DNA, 1533 bp, Artificial Sequence
  derived and/or modified sequence
atggaggagccccaggccggcgacgccgcccggttcagctgccccccaaattttactgcgaagccaccagcttcggagagccccagattcagcctcgaagccttgactggccccgacactgagctgtggcttatccaggcgccggccgattttgctcctgagtgctttaacggtcgtcatgtgccattgagcgggtcgcagattgtgaaaggtaaactggcaggaaagcgtcatcgctatcgtgttctctctagctgcccccaggctggggaagcaactcttctggcccccagcactgaggccgggggcggccttacatgtgcctccgctccacaggggacgctacgcattttggaaggtccacagcagtctctgtctgggtcaccactgcaaccaatccccgcttccccacctccacagatccccccaggccttaggccccgcttttgtgccttcggcggcaatcccccggtcacagggccacgatcagccctggctccaaacctactgactagcggaaaaaagaagaaggaaatgcaggtgactgaagcccctgttacccaggaagcagtgaatggccacggggctcttgaggtggatatggccctcgggtctcccgagatggacgtgagaaaaaagaaaaagaagaagaatcaacagcttaaagagcccgaagctgctgggccagtgggaacggagcccacagtggaaaccttggagccgctaggggttctgtttccctctaccacgaaaaagcgaaagaaaccaaaagggaaagagacctttgagcctgaggataaaaccgtgaaacaggaacagattaatacagaaccgctcgaggacactgtcctcagtcctaccaagaaacggaaacggcagaagggtacggaaggcatggagcccgaagagggagtgacagtagaatcccagccccaagtcaaggtggaaccattggaggaggcgatcccattgccaccgacaaagaagcgcaagaaggagaagggtcaaatggcgatgatggagcccggaaccgaggccatggagcccgtagagcccgagatgaaaccactggagtccccaggtgggaccatggctccacagcaacccgaaggcgccaagcctcaggctcaggctgcactggctgcccccaaaaagaagacaaaaaaagagaagcagcaggatgcgacagtagagcctgaaacggaggtggttgggcctgagctgcccgatgatttggaacctcaggccgctcccaccagtaccaagaaaaagaaaaagaagaaagaacgcggccataccgtaactgagccaatacagcctttagagccagaactgccgggtgagggccaaccagaggctcgtgccactccgggcagcactaagaaaagaaaaaagcagtcacaggagagtcgaatgcctgagaccgtaccacaggaggaaatgcccggaccacctctgaattcagaatccggagaggaagcccccaccggccgggataagaaacgcaagcaacaacagcaacagccagtttag

SEQ ID NO: 172505 - DNA, 1533 bp, Artificial Sequence
  derived and/or modified sequence
atggaggagccccaggcaggcgatgcagccagattcagttgccctccaaacttcacagccaaacccccagcttccgaaagccccaggtttagtctagaggcccttacaggcccagataccgaactgtggctgattcaggctccggctgacttcgctcccgagtgttttaatgggaggcatgtccctttaagcgggtctcaaattgtcaaaggcaagcttgccggaaagagacacagataccgggtgctaagtagctgcccacaggccggtgaggccaccctgttggctccttctaccgaggctggaggaggacttacttgcgcaagtgctccccaaggcacacttcgtattctggaggggccacagcagagtctttccgggagcccgttacagccaatccctgcctctcctcctccgcaaataccacctggcctgcggccacgattctgtgcttttgggggtaacccgcctgtgaccggtccaagatcggctttggccccaaatttactgactagtggcaagaagaaaaaagagatgcaagtgacggaggccccagtcacccaggaagcagtgaatgggcatggggctctggaggtcgacatggctttagggtctccagaaatggatgtgaggaaaaaaaagaaaaaaaagaaccagcaactgaaggagccggaggcagccggacctgtgggtacagaacccaccgttgagacactggagccactgggagtactgttcccctccaccaccaaaaagcgaaaaaagcccaaaggaaaagagacgtttgagcccgaagacaagaccgtgaaacaagaacagataaacaccgagcccttggaggacacagtgctcagcccaacaaaaaagagaaagcggcagaaaggtactgagggaatggagcccgaggaaggggtgactgttgaaagccagcctcaggtgaaggtggagccgttagaggaggctattccactaccacctacaaagaagcgaaaaaaagagaagggccagatggccatgatggagcctggtactgaggcgatggaaccagtagaacctgagatgaagccactggagtccccaggcggaacgatggctccccagcaacccgagggcgcaaagccccaggcccaggcagcactggccgcaccaaaaaagaaaacaaagaaggaaaaacagcaggacgccaccgtggaacctgagaccgaggttgtgggcccagagctccctgacgatcttgaaccccaggcagctcccactagtaccaaaaaaaagaagaagaagaaggaaaggggccacacagtcacagaacctatccagcccttggaaccagaactgcccggagaggggcaacccgaggcaagagcaacccctggttccactaaaaagcgcaagaaacaatctcaggagtcaagaatgccagaaaccgtgcctcaggaggagatgcccggtccccctcttaattcagaaagtggcgaagaggccccaactggccgtgataaaaagcggaagcaacagcagcaacagcctgtttag

SEQ ID NO: 172506 - DNA, 3286 bp, Artificial Sequence
  derived and/or modified sequence
aagttctgaacttgtgaggcatctgggcctccccagaagacatttaacacagaaagcacagccctactaactagtattcttacctgtctcttcaagaatttcagaccaatcgaccgtcctgtctctttaaggcttaggaagagcagtgtggctgcccctttaaggaggcgttgcaacaaaccatattggacagacgatgggggcgacccatcgggacccgacgggcctctgactccagcaatacagcgaatcagcggctttcgggaatacatttttcggaaaaagacttcttcctcggttttctgctctgcacacgttgaaattttccccagtttttcctgcagatcgggagtcgagcaatgcctacccccgcgctcccgcaccagttgggcgctcccggatgatgccctacccctttggatccacgtggtctgcaacctggtgcgagcagcccgggctacagggttgcctgaggtgtgggtcccaggatggaggagccccaggccggcgatgctgctcggttctcttgtccccccaactttaccgcgaagcccccagcctcagagtcccctcgtttctccttggaggcgctgacgggtccagatacggagctgtggcttattcaggcccctgcagactttgccccagaatgcttcaatgggcggcatgtgcctctctctggctcccagatcgtcaagggcaaattggcaggcaagcggcaccgctatcgagtcctcagcagctgtccccaagctggagaagcgaccctgctggccccctcaacggaggcaggaggtggactcacctgtgcctcagccccccagggcaccctaaggatccttgagggtccccagcaatccctgtcagggagccctctgcagcccatcccagcaagtcccccaccacagatccctcctggcctgaggcctcggttctgtgcctttgggggcaacccaccagtcacagggcctaggtcagccttggcccccaacctgctcacctcagggaagaagaaaaaggagatgcaggtgacagaggccccagtcactcaggaggcagtgaatgggcacggggccctggaggtggacatggctttggggtcgccagaaatggatgtgcggaagaagaagaagaaaaaaaatcagcagctgaaagaaccagaggcagcagggcctgtggggacagagcccacagtggagacactggagcctctgggagtgctgttcccgtccaccaccaagaagaggaagaagcccaaagggaaagaaaccttcgagccagaagacaagacagtgaagcaggaacagattaacactgagcctctagaagacacagtcctgtccccgaccaaaaagagaaagaggcaaaaggggacggaagggatggagccagaggagggggtgacagttgagtctcagccacaggtgaaggtggagccactggaggaagccatccctctgccccctacgaagaagaggaaaaaagaaaagggacagatggcaatgatggagccagggacggaggcgatggagccagtggagccggagatgaagcctctggagtccccaggggggaccatggcgcctcaacagccagaaggagcgaagcctcaggcccaggcagctctggcagctcccaaaaagaagacgaagaaagaaaaacagcaagatgccacagtggagccagagacagaggtggtggggcctgagctgccggatgaccttgagcctcaggcagctcccacatccaccaagaagaagaagaagaagaaagagagaggtcacacagtgactgagccaattcagccactagagcctgaactgccaggggagggacagcctgaagccagggcaactccgggatccaccaagaagaggaagaagcagagtcaggaaagccggatgccagagacagtgccccaagaggagatgccagggccgccactgaattcagagtctggggaggaggctcccacaggccgggacaagaagcggaagcagcagcagcagcagcctgtgtagtctgcccccgggaaactgaggaactaaagaaagctgaaggtgcccacctgggccaccagaaggtgacacccccagaatccctccccagagactgcaccagcgcagccagcaggagcctggcctgggaggacgatttattattacactgggggtttccttggcagctggggtcatcagggtactttcaagaagggctcgtgcaggacatcaaacagcctccgggcctggatgggagggagaaaaaaatgaggaaccagtcattaaaggagctgtttcctgggtaaatctagagtggggttttggttctttattttcccctataccctcaagcatttatccattgagttacaaacaatccagttacaatctttttaagttattattattattattattttttttttttttgagatggagtctcgctctgtcgcccaggttggagtgcagtggcgcaatctcggctcactgcaagctccgcctcccgggttcacgccattctcctgcctcagcctcctgagtagctgggactacaggcccctgcccagctaattttttgtatttttttttagtagagatggggtttcaccacgttagccaggatggtctcgatctcctgacctcctgatgcgcctgcctcagcctcccagtgctgggattataggtgtgagccactgcgcctggctaagttattattatttttttgagacagtctcctggtgtcacccaggctggagtgcagtggtgtgatcttggctcactgcaacctccgcctcctgggttccaacgattctcctgcctcagcctcccgagtagctgggcctaaaggtgcccaccactatacccggctaatttttgtatttttagtagagacaggggtttcaccatattggccaggctggtctcgaactcctgacctcgtgatccacctgccttgacctcccaaagtgctaggataacaggtgtgagccaccgcaccctgccaagttattttaaaatgtaccattattattgactatagtcacctggttgtgttatcaaatagtatgtcttattcattctttctttgtgtgtgtgtgtgtgtgtgtgtgtgtgtgtggtacccattaaccttccccatctccctgccagcccctaactaccctccccagcctccaggaactatccatccactcttatctccatgagttcaattgttttgatttttagatacacaaataaataagaacatgcaatgtttgtctttctgtgcctggcttatttcactt

SEQ ID NO: 172507 - DNA, 1533 bp, Artificial Sequence
  derived and/or modified sequence
atggaggagccccaggccggcgacgccgccagattcagctgcccccccaacttcaccgccaagccccccgccagcgagagccccagattcagcctggaggccctgaccggccccgacaccgagctgtggctgatccaggcccccgccgacttcgcccccgagtgcttcaacggcagacacgtgcccctgagcggcagccagatcgtgaagggcaagctggccggcaagagacacagatacagagtgctgagcagctgcccccaggccggcgaggccaccctgctggcccccagcaccgaggccggcggcggcctgacctgcgccagcgccccccagggcaccctgagaatcctggagggcccccagcagagcctgagcggcagccccctgcagcccatccccgccagcccccccccccagatcccccccggcctgagacccagattctgcgccttcggcggcaacccccccgtgaccggccccagaagcgccctggcccccaacctgctgaccagcggcaagaagaagaaggagatgcaggtgaccgaggcccccgtgacccaggaggccgtgaacggccacggcgccctggaggtggacatggccctgggcagccccgagatggacgtgagaaagaagaagaagaagaagaaccagcagctgaaggagcccgaggccgccggccccgtgggcaccgagcccaccgtggagaccctggagcccctgggcgtgctgttccccagcaccaccaagaagagaaagaagcccaagggcaaggagaccttcgagcccgaggacaagaccgtgaagcaggagcagatcaacaccgagcccctggaggacaccgtgctgagccccaccaagaagagaaagagacagaagggcaccgagggcatggagcccgaggagggcgtgaccgtggagagccagccccaggtgaaggtggagcccctggaggaggccatccccctgccccccaccaagaagagaaagaaggagaagggccagatggccatgatggagcccggcaccgaggccatggagcccgtggagcccgagatgaagcccctggagagccccggcggcaccatggccccccagcagcccgagggcgccaagccccaggcccaggccgccctggccgcccccaagaagaagaccaagaaggagaagcagcaggacgccaccgtggagcccgagaccgaggtggtgggccccgagctgcccgacgacctggagccccaggccgcccccaccagcaccaagaagaagaagaagaagaaggagagaggccacaccgtgaccgagcccatccagcccctggagcccgagctgcccggcgagggccagcccgaggccagagccacccccggcagcaccaagaagagaaagaagcagagccaggagagcagaatgcccgagaccgtgccccaggaggagatgcccggcccccccctgaacagcgagagcggcgaggaggcccccaccggcagagacaagaagagaaagcagcagcagcagcagcccgtgtag

SEQ ID NO: 172508 - protein, 485 aa, Artificial Sequence [sequence omitted]

SEQ ID NO: 172509 - protein, 441 aa, Artificial Sequence
  derived and/or modified sequence
MSGHSPTRGAMQVAMNGKARKEAVQTAAKELLKFVNRSPSPFHAVAECRNRLLQAGFSELKETEKWNIKPESKYFMTRNSSTIIAFAVGGQYVPGNGFSLIGAHTDSPCLRVKRRSRRSQVGFQQVGVETYGGGIWSTWFDRDLTLAGRVIVKCPTSGRLEQQLVHVERPILRIPHLAIHLQRNINENFGPNTEMHLVPILATAIQEELEKGTPEPGPLNAVDERHHSVLMSLLCAHLGLSPKDIVEMELCLADTQPVVLGGAYDEFIFAPRLDNLHSCFCALQALIDSCAGPGSLATEPHVRMVTLYDNEEVGSESAQGAQSLLTELVLRRISASCQHPTAFEEAIPKSFMISADMAHAVHPNYLDKHEENHRPLFHKGPVIKVNSKQRYASNAVSEALIREVANKSRSPCRISWSGMTPPVEPPLDLSWLLGWGCGCWI

SEQ ID NO: 172510 - DNA, 1458 bp, Artificial Sequence
  derived and/or modified sequence
atgagcggccacagccccaccagaggcgccatgcaggtggccatgaacggcaaggccagaaaggaggccgtgcagaccgccgccaaggagctgctgaagttcgtgaacagaagccccagccccttccacgccgtggccgagtgcagaaacagactgctgcaggccggcttcagcgagctgaaggagaccgagaagtggaacatcaagcccgagagcaagtacttcatgaccagaaacagcagcaccatcatcgccttcgccgtgggcggccagtacgtgcccggcaacggcttcagcctgatcggcgcccacaccgacagcccctgcctgagagtgaagagaagaagcagaagaagccaggtgggcttccagcaggtgggcgtggagacctacggcggcggcatctggagcacctggttcgacagagacctgaccctggccggcagagtgatcgtgaagtgccccaccagcggcagactggagcagcagctggtgcacgtggagagacccatcctgagaatcccccacctggccatccacctgcagagaaacatcaacgagaacttcggccccaacaccgagatgcacctggtgcccatcctggccaccgccatccaggaggagctggagaagggcacccccgagcccggccccctgaacgccgtggacgagagacaccacagcgtgctgatgagcctgctgtgcgcccacctgggcctgagccccaaggacatcgtggagatggagctgtgcctggccgacacccagcccgtggtgctgggcggcgcctacgacgagttcatcttcgcccccagactggacaacctgcacagctgcttctgcgccctgcaggccctgatcgacagctgcgccggccccggcagcctggccaccgagccccacgtgagaatggtgaccctgtacgacaacgaggaggtgggcagcgagagcgcccagggcgcccagagcctgctgaccgagctggtgctgagaagaatcagcgccagctgccagcaccccaccgccttcgaggaggccatccccaagagcttcatgatcagcgccgacatggcccacgccgtgcaccccaactacctggacaagcacgaggagaaccacagacccctgttccacaagggccccgtgatcaaggtgaacagcaagcagagatacgccagcaacgccgtgagcgaggccctgatcagagaggtggccaacaaggtgaaggtgcccctgcaggacctgatggtgagaaacgacaccccctgcggcaccaccatcggccccatcctggccagcagactgggcctgagagtgctggacctgggcagcccccagctggccatgcacagcatcagagagatggcctgcaccaccggcgtgctgcagaccctgaccctgttcaagggcttcttcgagctgttccccagcctgagccacaacctgctggtggactag

SEQ ID NO: 172511 - DNA, 1326 bp, Artificial Sequence
  derived and/or modified sequence
atgagcggccacagccccaccagaggcgccatgcaggtggccatgaacggcaaggccagaaaggaggccgtgcagaccgccgccaaggagctgctgaagttcgtgaacagaagccccagccccttccacgccgtggccgagtgcagaaacagactgctgcaggccggcttcagcgagctgaaggagaccgagaagtggaacatcaagcccgagagcaagtacttcatgaccagaaacagcagcaccatcatcgccttcgccgtgggcggccagtacgtgcccggcaacggcttcagcctgatcggcgcccacaccgacagcccctgcctgagagtgaagagaagaagcagaagaagccaggtgggcttccagcaggtgggcgtggagacctacggcggcggcatctggagcacctggttcgacagagacctgaccctggccggcagagtgatcgtgaagtgccccaccagcggcagactggagcagcagctggtgcacgtggagagacccatcctgagaatcccccacctggccatccacctgcagagaaacatcaacgagaacttcggccccaacaccgagatgcacctggtgcccatcctggccaccgccatccaggaggagctggagaagggcacccccgagcccggccccctgaacgccgtggacgagagacaccacagcgtgctgatgagcctgctgtgcgcccacctgggcctgagccccaaggacatcgtggagatggagctgtgcctggccgacacccagcccgtggtgctgggcggcgcctacgacgagttcatcttcgcccccagactggacaacctgcacagctgcttctgcgccctgcaggccctgatcgacagctgcgccggccccggcagcctggccaccgagccccacgtgagaatggtgaccctgtacgacaacgaggaggtgggcagcgagagcgcccagggcgcccagagcctgctgaccgagctggtgctgagaagaatcagcgccagctgccagcaccccaccgccttcgaggaggccatccccaagagcttcatgatcagcgccgacatggcccacgccgtgcaccccaactacctggacaagcacgaggagaaccacagacccctgttccacaagggccccgtgatcaaggtgaacagcaagcagagatacgccagcaacgccgtgagcgaggccctgatcagagaggtggccaacaagagcagaagcccctgcagaatcagctggagcggcatgaccccccccgtggagccccccctggacctgagctggctgctgggctggggctgcggctgctggatctag

SEQ ID NO: 172512 - DNA, 1458 bp, Artificial Sequence
  derived and/or modified sequence
atgagcgggcactctcctactaggggggccatgcaggtggctatgaatggaaaagcccgcaaggaggcagttcaaacagccgcaaaggagctgttaaagtttgtgaaccggtctcccagcccctttcacgctgtagccgaatgtagaaaccggctgttgcaggccggctttagcgagctcaaagaaaccgaaaaatggaacatcaagcccgaatcaaagtattttatgaccaggaacagctccacaatcattgctttcgctgttggcggtcagtatgtccctggcaatggattctctcttatcggcgcccatacagatagtccctgccttcgggtgaaaagacgctcacgacgcagccaggtgggctttcagcaggtcggtgtggaaacctatggaggcgggatttggagcacttggttcgacagagatctaaccctggccggacgggtaattgtgaaatgcccaacttctggcagattagagcagcaactcgtgcatgtggaaagacctattctgagaattcctcacttggctatccacctgcagagaaacatcaatgaaaactttgggcctaacacggagatgcacttggtccccatcctggcaaccgcaatccaggaagagctggagaagggaactcctgagcccgggcccctgaatgcagttgacgagcgacaccactctgtactcatgtcactgctgtgcgcccacctggggttgagccctaaggatatcgttgaaatggaactgtgccttgccgatactcagcccgtggtcttaggcggtgcttatgatgaatttatcttcgcaccaagacttgataacctgcattcttgcttctgcgcactacaagcccttattgactcatgcgctggacccggttcacttgccactgaaccccatgtcaggatggtgactctgtatgacaatgaggaggtaggcagtgaaagcgcacaaggcgcgcagtccctgctgactgaattagtgctgcgacggatcagcgcttcttgccagcatcctactgcatttgaagaagcaattcctaagtcttttatgatctctgccgacatggcgcatgcagtgcaccctaattatctggataagcacgaggagaaccacaggcccctctttcataaaggacctgtaattaaggtaaattccaaacagcgttacgcttcgaacgctgtctccgaagcgttgattagggaagtggccaacaaagtgaaagtgccgctgcaggatctcatggtgcggaacgacactccgtgtggcacaacgattggtcctatccttgccagcaggttaggtttacgcgtgctcgatctggggagcccacagctggctatgcactctattcgcgagatggcctgtaccactggcgtgctccagacgcttactttgttcaagggattcttcgagctgtttccctcgctctctcataacctgctggtcgattag

SEQ ID NO: 172513 - DNA, 1326 bp, Artificial Sequence
  derived and/or modified sequence
atgagcggtcatagccccacccggggcgccatgcaggttgcaatgaatgggaaagcacggaaggaagctgtccagacagccgctaaagaactcttaaaatttgtgaacagatccccctccccgttccacgctgtggccgaatgcaggaaccggctgctccaggctgggtttagcgaactgaaggagacagaaaaatggaacattaagcctgaatcgaaatacttcatgaccagaaactccagtactatcattgcctttgctgtcggtggtcaatatgtcccagggaacggattcagcctgattggggcacatactgattccccttgcctgcgggtgaaacgcaggagccggcggagccaggtggggttccaacaggtcggcgtcgaaacatacggcggcgggatttggtccacctggttcgacagggatctgacacttgcaggccgagtgatcgtgaagtgcccgacatcaggccggttagagcagcaactagtccatgttgagagacccattctgcgtattccacacctcgccatccatctgcagagaaacattaacgagaacttcggccctaatacggagatgcatttggttccaatcctagccactgccattcaggaagaactagagaaaggcactcctgagcctggcccactgaatgccgtggacgagcgccatcactctgtgcttatgtcgctgctgtgtgcgcatcttggccttagtcctaaggacatcgtagagatggaattgtgtctggctgacacacagccagttgtgcttgggggcgcttatgacgagttcatattcgccccaagactggataacttacactcatgcttctgcgcactccaagccctgatcgattcttgcgccggacccggatcgctggccaccgagcctcacgtgcggatggttaccctgtatgataatgaggaagtggggagcgaatctgcacagggcgcgcagagcctactgacagagctggtgttgaggagaatctcagccagctgtcaacacccaacggcattcgaggaggctattcctaaaagctttatgatctctgcagacatggcccatgctgtccacccaaactacttagataagcatgaagaaaatcaccggcctttgttccataagggccccgtgataaaagtgaatagtaaacaacggtacgcctctaatgccgtttccgaagccctgattcgtgaagtggccaacaaatctcggtccccctgtaggatctcctggagcggaatgacacccccagttgaaccccccttagacttatcctggctcctagggtggggttgcgggtgctggatttag

SEQ ID NO: 172514 - DNA, 1458 bp, Artificial Sequence
  derived and/or modified sequence
atgagcggccacagccccaccaggggggccatgcaggtggccatgaatggcaaggccaggaaggaggccgtgcagacagctgccaaggagctgctgaagtttgtgaacagaagccccagccccttccacgctgtggctgaatgtagaaaccggctgctgcaggccggcttcagcgagctgaaggagacagagaagtggaacatcaagccagagagcaagtacttcatgaccaggaacagcagcaccatcatcgcctttgctgtgggcggccagtatgtgcctggaaatggcttcagcctgattggagcccacacagacagcccctgcctgcgggtgaagaggaggagcagaagaagccaggtgggcttccagcaggtgggcgtggagacctatggaggcggcatctggagcacctggtttgaccgggacctgaccctggccggccgggtgattgtgaagtgccccaccagcggccgcctggagcagcagctggtgcacgtggagcggcccatcctgcgcatcccccacctggccatccacctgcagaggaacatcaatgaaaattttggccccaacacagagatgcacctggtgcccatcctggccacagccatccaggaggagctggagaagggcaccccagagcccggccccctgaatgctgtggatgagcggcaccacagcgtgctgatgagcctgctgtgtgcccacctgggcctgagccccaaggacatcgtggagatggagctgtgcctggccgacacccagcctgtggtgctgggcggggcctatgatgagttcatctttgccccccggctggacaacctgcacagctgcttctgtgccctgcaggccctgattgacagctgtgccggccctggcagcctggccacagagccccacgtgaggatggtgaccctgtatgacaatgaggaggtgggcagcgagagcgcccagggcgcccagagcctgctgacagagctggtgctgcggcgcatcagcgccagctgccagcaccccacagcctttgaggaggccatccccaagagcttcatgatctctgctgacatggcccatgctgtgcaccccaactacctggacaagcatgaggagaaccaccggcccctcttccacaagggccctgtgatcaaggtgaacagcaagcagagatatgccagcaatgctgtgtctgaggccctgatccgggaggtggccaacaaggtgaaggtgcccctgcaggacctgatggtgagaaatgacaccccctgtggcaccaccatcggccccatcctggccagccggctgggcctgcgggtgctggacctgggcagcccccagctggccatgcacagcatccgggagatggcctgcaccactggagtgctgcagaccctgaccctcttcaagggcttctttgagctgttccccagcctgagccacaacctgctggtggactag

SEQ ID NO: 172515 - DNA, 1326 bp, Artificial Sequence
  derived and/or modified sequence
atgagcggccacagccccaccaggggggccatgcaggtggccatgaatggcaaggccaggaaggaggccgtgcagacagctgccaaggagctgctgaagtttgtgaacagaagccccagccccttccacgctgtggctgaatgtagaaaccggctgctgcaggccggcttcagcgagctgaaggagacagagaagtggaacatcaagccagagagcaagtacttcatgaccaggaacagcagcaccatcatcgcctttgctgtgggcggccagtatgtgcctggaaatggcttcagcctgattggagcccacacagacagcccctgcctgcgggtgaagaggaggagcagaagaagccaggtgggcttccagcaggtgggcgtggagacctatggaggcggcatctggagcacctggtttgaccgggacctgaccctggccggccgggtgattgtgaagtgccccaccagcggccgcctggagcagcagctggtgcacgtggagcggcccatcctgcgcatcccccacctggccatccacctgcagaggaacatcaatgaaaattttggccccaacacagagatgcacctggtgcccatcctggccacagccatccaggaggagctggagaagggcaccccagagcccggccccctgaatgctgtggatgagcggcaccacagcgtgctgatgagcctgctgtgtgcccacctgggcctgagccccaaggacatcgtggagatggagctgtgcctggccgacacccagcctgtggtgctgggcggggcctatgatgagttcatctttgccccccggctggacaacctgcacagctgcttctgtgccctgcaggccctgattgacagctgtgccggccctggcagcctggccacagagccccacgtgaggatggtgaccctgtatgacaatgaggaggtgggcagcgagagcgcccagggcgcccagagcctgctgacagagctggtgctgcggcgcatcagcgccagctgccagcaccccacagcctttgaggaggccatccccaagagcttcatgatctctgctgacatggcccatgctgtgcaccccaactacctggacaagcatgaggagaaccaccggcccctcttccacaagggccctgtgatcaaggtgaacagcaagcagagatatgccagcaatgctgtgtctgaggccctgatccgggaggtggccaacaagagccgcagcccctgccgcatctcctggagcggcatgaccccacctgtggagccccccctggacctgtcctggctgctgggctggggctgcggctgctggatctag

SEQ ID NO: 172516 - DNA, 1458 bp, Artificial Sequence
  derived and/or modified sequence
atgagcggccacagccccacccggggcgccatgcaggtggccatgaacgggaaggcacgaaaagaggccgttcagacagccgccaaggagctgctgaagtttgtgaataggtccccatccccattccacgcagtcgccgagtgccggaacaggctactgcaggctggcttctccgagctaaaagaaaccgagaaatggaatatcaagccagaaagcaaatatttcatgacaagaaacagtagcaccatcatcgcttttgccgtcgggggccaatacgtgccaggaaatgggtttagcctgataggggctcacactgactctccttgtctgcgcgtaaagaggcggtcccgtcggagccaagtgggttttcagcaggttggagtcgagacctatggcggaggtatttggtcaacctggttcgacagagatctcactctggccggacgggtgattgttaaatgccctacttcaggacggctggaacagcaactggtccatgttgagaggccgatcctgagaatccctcatctggctatccacctgcagaggaacataaacgagaactttggccccaatacagagatgcatctagtgccaatactcgccaccgccatacaggaagaactggagaaagggactcctgagcctgggccactgaacgctgtggacgaacgacatcatagtgtcctgatgtcactgctttgtgctcacctgggattgtcccccaaagacattgtcgaaatggaactgtgtttggccgatacacagccagtggtcctcgggggagcctacgatgagtttattttcgctcctagactggacaacctgcattcatgtttctgcgcccttcaggctttgatcgacagctgcgctggacccggatctcttgcaacggagccgcatgtgcgaatggtgacactgtatgataatgaggaggtcggctccgagtctgcacagggcgcccagtctttgctgaccgagctggtgctgcgacgcattagcgcttcttgccagcatccaacagctttcgaggaggctataccaaaatccttcatgatcagcgcagacatggcgcacgcagtgcacccaaactacctcgacaagcatgaggagaaccatcggcccctttttcataaagggccagtgatcaaggtcaacagcaagcagagatacgcaagcaatgccgtttcagaagcattgattagggaggtggccaataaggtaaaagtgccccttcaggacttgatggtgcgcaatgatacaccgtgtggtacaaccatcggcccaattctcgccagccgcctgggtttacgcgtcctcgatctagggagtccacagctggcaatgcattccatcagagaaatggcatgcacaactggtgttctgcagactcttacactgtttaaggggttctttgaactctttccttcactgtcacacaacctgttagtggactag

SEQ ID NO: 172517 - DNA, 1326 bp, Artificial Sequence
  derived and/or modified sequence
atgagcggccacagccccacccggggcgccatgcaggtggccatgaacggaaaggcccggaaggaagcggtgcaaacggccgctaaagagctgctcaagttcgtcaataggtccccaagcccattccatgccgtggccgagtgccggaataggcttctgcaggctggatttagtgaattgaaggagaccgaaaaatggaatattaagccggagagcaagtacttcatgacaagaaattccagtaccattatcgcatttgcagtaggcggccagtacgtcccggggaacggctttagcctgattggcgcccacactgattccccgtgtcttagggtcaagagaagatcccgccgctctcaagtggggtttcagcaggtcggagttgaaacctatggcggcggtatctggagcacctggttcgaccgggatctcacgttagctggtagagtgatcgtgaaatgccctacatccggccggcttgagcagcagctggtgcacgttgaacgaccaatcttaaggattccccacctcgcaattcacctccagaggaatatcaacgagaacttcggacccaacacagaaatgcaccttgttcccatcctggccactgctattcaagaggagctggaaaagggcacgcccgagccaggacccctaaatgctgttgatgagcgccaccattctgtgctgatgagccttctatgcgctcacctcggcctgtcacccaaggacatcgtggagatggagctgtgtcttgccgacactcaacccgttgtcctcggcggagcctatgacgaatttattttcgctccacggctggacaatttgcattcatgcttttgcgcactacaggccttaattgacagttgcgctggaccagggtctctggcaaccgagccacatgtgcgcatggtgactctgtacgataacgaagaggtcggtagcgagtcggctcagggcgcccagtccctgctcaccgaacttgttttgcgcaggatttcagccagctgccaacaccccaccgcctttgaggaggcgattcctaagtccttcatgatatctgcagatatggctcacgccgtccaccccaactatttagacaagcatgaggagaatcacaggcctctgttccacaaggggcctgtcatcaaggttaatagcaagcagcgatatgcctccaacgcggtgagtgaggccctgatccgcgaggtggctaacaagagtcgctccccatgcaggattagctggtccggaatgaccccacctgtggagccacctctcgacttgagctggctgttgggttggggatgtggatgttggatttag

SEQ ID NO: 172518 - DNA, 1458 bp, Artificial Sequence
  derived and/or modified sequence
atgtcaggtcattccccaactaggggtgccatgcaggtggccatgaatgggaaggccaggaaggaggcagtccagactgccgcaaaggagctgctgaagttcgtgaatagatctccttccccgtttcacgcggtcgcggagtgtaggaatcggctgttgcaagccggattctcagaactgaaagaaacagaaaagtggaacattaaacctgaatccaaatacttcatgacacgcaacagctccactatcattgctttcgctgtcgggggacagtacgtccctggcaacggattttcattgataggggcacacactgactcaccttgcttaagggttaagagacggtctcgacgtagtcaggttggatttcagcaggtcggagtggaaacctacgggggtggtatctggtccacttggttcgatcgggatctgacgctcgcgggacgagtcatcgtcaagtgtcccactagcggcaggctagaacagcaactggtgcacgtcgaacggcctattcttagaatcccccacctggccattcatctgcagcggaatattaacgaaaacttcgggcctaacacggagatgcatcttgtacccattctggccactgctattcaggaggaactggagaaggggaccccagagcctggtccactaaacgcagtcgatgagcgtcatcatagcgtgctaatgagtttgctgtgtgcacacctagggctgtctcctaaggacatcgtcgaaatggaactttgtctggccgacactcagcctgtagtgcttggcggtgcatacgatgagtttattttcgccccaagactagacaatctgcatagttgcttctgtgccctgcaggcattaattgattcatgtgcgggtccaggcagcctggctactgagccccacgtgagaatggttacactgtatgacaatgaggaagtgggatcagagagcgctcagggagctcagtccctgctcaccgagctggtgcttcgtagaatcagcgcctcttgtcagcaccctaccgccttcgaagaagcgattcctaaatcgtttatgatttcggccgacatggcacacgctgtccatccgaattacctggataagcacgaagaaaaccatcgtcctctgttccataaagggccagtgattaaagtcaattccaaacagcggtatgcttctaatgcagtgagtgaagctctgatacgcgaggtagcgaataaagtgaaagtaccgctgcaggatctcatggtcagaaatgacaccccatgtggcactaccatcggccctatcctcgcatctaggctgggcctgcgtgtgctcgacctgggctccccgcaactcgcaatgcactctatacgcgagatggcctgcacaaccggggtacttcagactctcacgttatttaagggtttctttgagctgtttccgagcctgtcacacaacctcttggtcgattag

SEQ ID NO: 172519 - DNA, 1326 bp, Artificial Sequence
  derived and/or modified sequence
atgagcggccactcacctaccagaggcgcaatgcaagttgcaatgaatggtaaggcgcgaaaggaggcggtccagacagccgcaaaagagctcctgaaattcgtgaatcgatctcccagccctttccacgcagtggctgagtgccgcaataggctcctccaagctggcttcagtgaactcaaggagaccgaaaaatggaatataaaacctgaatcaaaatacttcatgacccgaaactcatccacaattatcgctttcgcggtgggcggacagtacgtgcccggaaacggcttctcgttaatcggcgcacataccgactctccctgtttaagagtgaagagacggagccggcgatcccaggtgggcttccaacaggtaggcgtggaaacttacggaggaggtatttggagcacatggtttgaccgcgatctgaccttagctggacgtgtgatcgtaaagtgcccaacctcaggcagactggagcagcagttagttcacgtcgagagacccatcttacgaataccacacctcgcaatccatcttcaacgtaacattaatgaaaattttggtccaaatacggagatgcatctggtgcccattttggctacggcgatccaagaagaattggagaagggtaccccagagccagggcctctgaacgcagtcgatgaacggcatcattctgtccttatgtctctcctctgcgcacacctgggactgagccctaaggatattgtggaaatggagctgtgccttgccgacacccagcctgtggtgctgggcggagcatacgacgaatttatattcgctcccagactcgacaacctacattcatgcttctgcgcattgcaagcgctcattgactcatgtgcaggaccaggctccctggcaacggaaccccacgtgcgaatggttactctctacgacaacgaggaagttgggtccgagagtgcccagggtgctcagtcactgctgactgagctggtcctgcgaagaattagcgcttcttgccaacacccgaccgcgttcgaagaagccattcctaagtcttttatgatctccgctgacatggcacatgcggtgcaccctaactatttggataaacacgaagaaaatcatagaccattgtttcataagggacctgtgattaaggttaactccaagcagaggtacgcctctaatgccgtgtctgaagccctgattcgagaagtcgccaataaaagccgttcaccctgcaggatcagctggagtggcatgacccctccagtcgagccaccactcgacttgtcatggctgctggggtggggatgcggatgttggatctag

SEQ ID NO: 172520 - DNA, 2425 bp, Artificial Sequence
  derived and/or modified sequence
gcccgccgaggggcggggctgaccgaggtgggcggggcggatgccgaggggcggggagaggtgggcggggaggccaaacatggggcggggcggcgcggccggggaagcgtgatgaaggcctacgagtgcggcgcggcctgaaggggcacgcgggggacctgcaaagctagtgaggggcggggcaggcggcgcggtgggggcgggccgagcccggaggccagatgagcggacacagccccacgcgcggggccatgcaggtggccatgaacggtaaggcccgcaaagaggcggtgcagactgcggctaaggaactcctcaagttcgtgaaccggagtccctctcctttccatgctgtggctgaatgccgcaaccgccttctccaggctggcttcagtgaactcaaggagactgagaaatggaatattaagcccgagagcaagtacttcatgaccaggaactcctccaccatcatagcttttgctgtagggggccagtacgttcctggcaatggcttcagcctcatcggggcccacacggacagcccctgcctccgggtgaaacgtcggtctcgccgcagccaggtgggcttccagcaagtcggtgtggagacctatggtggtgggatctggagcacctggtttgaccgtgacctgactctggctggacgcgtcattgtcaagtgccctacctcaggtcggctggagcagcagctggtgcacgtggagcggcccattcttcgcatcccacacctggccatccatctgcagcgaaatatcaacgagaactttgggcccaacacagagatgcatctagtccccattcttgccacagccatccaggaggagctggagaaggggactcctgagccagggcctctcaatgctgtggatgagcggcaccattcggtcctcatgtccctgctctgtgcccatctggggctgagccccaaggacatagtggagatggagctctgccttgcagacacccagcctgtggtcttgggtggtgcctatgatgagttcatctttgctcctcggctggacaatctgcacagctgcttctgtgccctgcaggccttgatagattcctgtgcaggccctggctccctggccacagagcctcacgtgcgcatggtcacactctatgacaacgaagaggtggggtctgagagtgcacagggagcacagtcactgctgacagagctggtgctgcggcggatctcagcctcgtgccagcacccgacagccttcgaggaagccatacccaagtccttcatgatcagcgcagacatggcccatgctgtgcatcccaactacctggacaagcatgaggagaaccaccggcctttattccacaagggccccgtgatcaaggtgaacagcaagcaacgctatgcttcaaacgcggtgtcagaggccctgatccgagaggtggccaacaaagtcaaggtccccctgcaggatctcatggtccggaatgacaccccctgtggaaccaccattggacctatcttggcttctcggctggggctgcgggtgctggatttaggcagcccccaactggccatgcactctatccgggagatggcctgcaccacaggagtcctccagaccctcaccctcttcaagggcttctttgagctgttcccttctctaagccataatctcttagtggattgagccctcttggaaagacttctctgccatccctttgcacctgagaggggaagttctcagctgagctgaagctggattattaaagtggattgtcactcagactctccgtgctacgcttatttggagactagaggagtgggagttgagcctggcttgaacctttggaaccagaaaagttggggagcaggtggaggaggccacactcctgggagctgatggttttaaatctggttttaaatctcttctctgtctcaagtccatgtctgaagtgggtgaagggtggactggatcctcaagcagaaggtcacttctcccacccctagtcctccacctgggaaatggcctcaacggtcttccctctttccatccccagaatgggtgtcccgctctgccttcagagatcctgttctgcactgggccaccttcagagctgctctgggcagacaaagctgtttctcaccctcccaaaatcccttcccatcccctctcaggagctgcaaagagaagggcacagtctataccttatcacccttcatcatccacttctcagcagtccctggtattacttgattgtgaacatattatcaggaaaaaagattatcattgaaaaaattggaaaagtcaaagtctggccgggtgcagcggctcacatctgtattcccagcattttgggaggccaaggcaggtggatcacttgaggtcagagttcaagaccagccttgccaacatggtgaaacccatctctactt

SEQ ID NO: 172521 - DNA, 1842 bp, Artificial Sequence
  derived and/or modified sequence
aaacatggggcggggcggcgcggccggggaagcgtgatgaaggcctacgagtgcggcgcggcctgaaggggcacgcgggggacctgcaaagctagtgaggggcggggcaggcggcgcggtgggggcgggccgagcccggaggccagatgagcggacacagccccacgcgcggggccatgcaggtggccatgaacggtaaggcccgcaaagaggcggtgcagactgcggctaaggaactcctcaagttcgtgaaccggagtccctctcctttccatgctgtggctgaatgccgcaaccgccttctccaggctggcttcagtgaactcaaggagactgagaaatggaatattaagcccgagagcaagtacttcatgaccaggaactcctccaccatcatagcttttgctgtagggggccagtacgttcctggcaatggcttcagcctcatcggggcccacacggacagcccctgcctccgggtgaaacgtcggtctcgccgcagccaggtgggcttccagcaagtcggtgtggagacctatggtggtgggatctggagcacctggtttgaccgtgacctgactctggctggacgcgtcattgtcaagtgccctacctcaggtcggctggagcagcagctggtgcacgtggagcggcccattcttcgcatcccacacctggccatccatctgcagcgaaatatcaacgagaactttgggcccaacacagagatgcatctagtccccattcttgccacagccatccaggaggagctggagaaggggactcctgagccagggcctctcaatgctgtggatgagcggcaccattcggtcctcatgtccctgctctgtgcccatctggggctgagccccaaggacatagtggagatggagctctgccttgcagacacccagcctgtggtcttgggtggtgcctatgatgagttcatctttgctcctcggctggacaatctgcacagctgcttctgtgccctgcaggccttgatagattcctgtgcaggccctggctccctggccacagagcctcacgtgcgcatggtcacactctatgacaacgaagaggtggggtctgagagtgcacagggagcacagtcactgctgacagagctggtgctgcggcggatctcagcctcgtgccagcacccgacagccttcgaggaagccatacccaagtccttcatgatcagcgcagacatggcccatgctgtgcatcccaactacctggacaagcatgaggagaaccaccggcctttattccacaagggccccgtgatcaaggtgaacagcaagcaacgctatgcttcaaacgcggtgtcagaggccctgatccgagaggtggccaacaaatcaaggtccccctgcaggatctcatggtccggaatgacaccccctgtggaaccaccattggacctatcttggcttctcggctggggctgcgggtgctggatttaggcagcccccaactggccatgcactctatccgggagatggcctgcaccacaggagtcctccagaccctcaccctcttcaagggcttctttgagctgttcccttctctaagccataatctcttagtggattgagccctcttggaaagacttctctgccatccctttgcacctgagaggggaagttctcagctgagctgaagctggattattaaagtggattgtcactcagactctccgtgctacgcttatttggagactagaggagtgggagttgagcctggcttgaacctttggaaccagaaaagttggggagcaggtggaggaggccacactcctgggagctgatggttttaaatctggttttaaatctc

SEQ ID NO: 172522 - protein, 588 aa, Artificial Sequence
  derived and/or modified sequence
MEAADASRSNGSSPEARDARSPSGPSGSLENGTKADGKDAKTTNGHGGEAAEGKSLGSALKPGEGRSALFAGNEWRRPIIQFVESGDDKNSNYFSMDSMEGKRSPYAGLQLGAAKKPPVTFAEKGELRKSIFSESRKPTVSIMEPGETRRNSYPRADTGLFSRSKSGSEEVLCDSCIGNKQKAVKSCLVCQASFCELHLKPHLEGAAFRDHQLLEPIRDFEARKCPVHGKTMELFCQTDQTCICYLCMFQEHKNHSTVTVEEAKAEKETELSLQKEQLQLKIIEIEDEAEKWQKEKDRIKSFTTNEKAILEQNFRDLVRDLEKQKEEVRAALEQREQDAVDQVKVIMDALDERAKVLHEDKQTREQLHSISDSVLFLQEFGALMSNYSLPPPLPTYHVLLEGEGLGQSLGNFKDDLLNVCMRHVEKMCKADLSRNFIERNHMENGGDHRYVNNYTNSFGGEWSAPDTMKRYSMYLTPKGGVRTSYQPSSPGRFTKETTQKNFNNLYGTKGNYTSRVWEYSSSIQNSDNDLPVVQGSSSFSLKGYPSLMRSQSPKAQPQTWKSGKQTMLSHYRPFYVNKGNGIGSNEAP

SEQ ID NO: 172523 - protein, 97 aa, Artificial Sequence
  derived and/or modified sequence
MEAADASRSNGSSPEARDARSPSGPSGSLENGTKADGKDAKTTNGHGGEAAEGKSLGSALKPGEGRSALFAGNEWRRPIIQFVESGDDKNSNYFSMD

SEQ ID NO: 172524 - protein, 38 aa, Artificial Sequence
  derived and/or modified sequence
MEAADASRSNGSSPEARDARSPSGPSGSLENGTKADGK

SEQ ID NO: 172525 - protein, 95 aa, Artificial Sequence
  derived and/or modified sequence
MEAADASRSNGSSPEARDARSPSGPSGSLENGTKADGKDAKTTNGHGGEAAEGKSLGSALKPGEGRSALFAGNEWRRPIIQFVESGDDKNSNYFS

SEQ ID NO: 172526 - protein, 89 aa, Artificial Sequence
  derived and/or modified sequence
MEAADASRSNGSSPEARDARSPSGPSGSLENGTKADGKDAKTTNGHGGEAAEGKSLGSALKPGEGRSALFAGNEWRRPIIQFVESGDDK

SEQ ID NO: 172527 - protein, 321 aa, Artificial Sequence
  derived and/or modified sequence
MTELSLQKEQLQLKIIEIEDEAEKWQKEKDRIKSFTTNEKAILEQNFRDLVRDLEKQKEEVRAALEQREQDAVDQVKVIMDALDERAKVLHEDKQTREQLHSISDSVLFLQEFGALMSNYSLPPPLPTYHVLLEGEGLGQSLGNFKDDLLNVCMRHVEKMCKADLSRNFIERNHMENGGDHRYVNNYTNSFGGEWSAPDTMKRYSMYLTPKGGVRTSYQPSSPGRFTKETTQKNFNNLYGTKGNYTSRVWEYSSSIQNSDNDLPVVQGSSSFSLKGYPSLMRSQSPKAQPQTWKSGKQTMLSHYRPFYVNKGNGIGSNEAP

SEQ ID NO: 172528 - DNA, 3037 bp, Artificial Sequence
  derived and/or modified sequence
ctcctcacaggtgtgtctctagtcctcgtggttgcctgccccactccctgccgagacgcctgccagaaaggtcacctatcctgaaccccagcaagcctgaaacagctcagccaagcaccctgcgatggaagctgcagatgcctccaggagcaacgggtcgagcccagaagccagggatgcccggagcccgtcgggccccagtggcagcctggagaatggcaccaaggctgacggcaaggatgccaagaccaccaacgggcacggcggggaggcagctgagggcaagagcctgggcagcgccctgaagccaggggaaggtaggagcgccctgttcgcgggcaatgagtggcggcgacccatcatccagtttgtcgagtccggggacgacaagaactccaactacttcagcatggactctatggaaggcaagaggtcgccgtacgcagggctccagctgggggctgccaagaagccacccgttacctttgccgaaaagggcgagctgcgcaagtccattttctcggagtcccggaagcccacggtgtccatcatggagcccggggagacccggcggaacagctacccccgggccgacacgggccttttttcacggtccaagtccggctccgaggaggtgctgtgcgactcctgcatcggcaacaagcagaaggcggtcaagtcctgcctggtgtgccaggcctccttctgcgagctgcatctcaagccccacctggagggcgccgccttccgagaccaccagctgctcgagcccatccgggactttgaggcccgcaagtgtcccgtgcatggcaagacgatggagctcttctgccagaccgaccagacctgcatctgctacctttgcatgttccaggagcacaagaatcatagcaccgtgacagtggaggaggccaaggccgagaaggagacggagctgtcattgcaaaaggagcagctgcagctcaagatcattgagattgaggatgaagctgagaagtggcagaaggagaaggaccgcatcaagagcttcaccaccaatgagaaggccatcctggagcagaacttccgggacctggtgcgggacctggagaagcaaaaggaggaagtgagggctgcgctggagcagcgggagcaggatgctgtggaccaagtgaaggtgatcatggatgctctggatgagagagccaaggtgctgcatgaggacaagcagacccgggagcagctgcatagcatcagcgactctgtgttgtttctgcaggaatttggtgcattgatgagcaattactctctccccccacccctgcccacctatcatgtcctgctggagggggagggcctgggacagtcactaggcaacttcaaggacgacctgctcaatgtatgcatgcgccacgttgagaagatgtgcaaggcggacctgagccgtaacttcattgagaggaaccacatggagaacggtggtgaccatcgctatgtgaacaactacacgaacagcttcgggggtgagtggagtgcaccggacaccatgaagagatactccatgtacctgacacccaaaggtggggtccggacatcataccagccctcgtctcctggccgcttcaccaaggagaccacccagaagaatttcaacaatctctatggcaccaaaggtaactacacctcccgggtctgggagtactcctccagcattcagaactctgacaatgacctgcccgtcgtccaaggcagctcctccttctccctgaaaggctatccctccctcatgcggagccaaagccccaaggcccagccccagacttggaaatctggcaagcagactatgctgtctcactaccggccattctacgtcaacaaaggcaacgggattgggtccaacgaagccccatgagctcctggcggaaggaacgaggcgccacacccctgctcttcctcctgaccctgctgctcttgccttctaagctactgtgcttgtctgggtgggagggagcctggtcctgcacctgccctctgcagccctctgccagcctcttgggggcagttccggcctctccgacttccccactggccacactccattcagactcctttcctgccttgtgacctcagatggtcaccatcattcctgtgctcagaggccaacccatcacaggggtgagataggttggggcctgccctaacccgccagcctcctcctctcgggctggatctgggggctagcagtgagtacccgcatggtatcagcctgcctctcccgcccacgccctgctgtctccaggcctatagacgtttctctccaaggccctatcccccaatgttgtcagcagatgcctggacagcacagccacccatctcccattcacatggcccacctcctgcttcccagaggactggccctacgtgctctctctcgtcctacctatcaatgcccagcatggcagaacctgcagcccttggccactgcagatggaaacctctcagtgtcttgacatcaccctacccaggcggtgggtctccaccacagccactttgagtctgtggtccctggagggtggcttctcctgactggcaggatgaccttagccaagatattcctctgttccctctgctgagataaagaattcccttaacatgatataatccacccatgcaaatagctactggcccagctaccatttaccatttgcctacagaatttcattcagtctacactttggcattctctctggcgatggagtgtggctgggctgaccgcaaaaggtgccttacacactgcccccaccctcagccgttgccccatcagaggctgcctcctccttctgattaccccccatgttgcatatcagggtgctcaaggattggagaggagacaaaaccaggagcagcacagtggggacatctcccgtctcaacagccccaggcctatgggggctctggaaggatgggccagcttgcaggggttggggagggagacatccagcttgggctttcccctttggaataaaccattggtctgtcaaaaaaaaaaaaaaaaaaa

SEQ ID NO: 172529 - DNA, 1767 bp, Artificial Sequence
  derived and/or modified sequence
atggaggccgccgacgccagcagaagcaacggcagcagccccgaggccagagacgccagaagccccagcggccccagcggcagcctggagaacggcaccaaggccgacggcaaggacgccaagaccaccaacggccacggcggcgaggccgccgagggcaagagcctgggcagcgccctgaagcccggcgagggcagaagcgccctgttcgccggcaacgagtggagaagacccatcatccagttcgtggagagcggcgacgacaagaacagcaactacttcagcatggacagcatggagggcaagagaagcccctacgccggcctgcagctgggcgccgccaagaagccccccgtgaccttcgccgagaagggcgagctgagaaagagcatcttcagcgagagcagaaagcccaccgtgagcatcatggagcccggcgagaccagaagaaacagctaccccagagccgacaccggcctgttcagcagaagcaagagcggcagcgaggaggtgctgtgcgacagctgcatcggcaacaagcagaaggccgtgaagagctgcctggtgtgccaggccagcttctgcgagctgcacctgaagccccacctggagggcgccgccttcagagaccaccagctgctggagcccatcagagacttcgaggccagaaagtgccccgtgcacggcaagaccatggagctgttctgccagaccgaccagacctgcatctgctacctgtgcatgttccaggagcacaagaaccacagcaccgtgaccgtggaggaggccaaggccgagaaggagaccgagctgagcctgcagaaggagcagctgcagctgaagatcatcgagatcgaggacgaggccgagaagtggcagaaggagaaggacagaatcaagagcttcaccaccaacgagaaggccatcctggagcagaacttcagagacctggtgagagacctggagaagcagaaggaggaggtgagagccgccctggagcagagagagcaggacgccgtggaccaggtgaaggtgatcatggacgccctggacgagagagccaaggtgctgcacgaggacaagcagaccagagagcagctgcacagcatcagcgacagcgtgctgttcctgcaggagttcggcgccctgatgagcaactacagcctgcccccccccctgcccacctaccacgtgctgctggagggcgagggcctgggccagagcctgggcaacttcaaggacgacctgctgaacgtgtgcatgagacacgtggagaagatgtgcaaggccgacctgagcagaaacttcatcgagagaaaccacatggagaacggcggcgaccacagatacgtgaacaactacaccaacagcttcggcggcgagtggagcgcccccgacaccatgaagagatacagcatgtacctgacccccaagggcggcgtgagaaccagctaccagcccagcagccccggcagattcaccaaggagaccacccagaagaacttcaacaacctgtacggcaccaagggcaactacaccagcagagtgtgggagtacagcagcagcatccagaacagcgacaacgacctgcccgtggtgcagggcagcagcagcttcagcctgaagggctaccccagcctgatgagaagccagagccccaaggcccagccccagacctggaagagcggcaagcagaccatgctgagccactacagacccttctacgtgaacaagggcaacggcatcggcagcaacgaggccccctag

SEQ ID NO: 172530 - DNA, 3328 bp, Artificial Sequence
  derived and/or modified sequence
agtgaagcctgcccacttgtgaagacggagactccccgctccccggatgagaagcaagtgcgtcagagggaagcagcccaactggttgctgagttgtggaaaataagctgggggagaaaaaacacttcttttaaaaatcaggttagggatgaatgtgcagggcgtggttcctgtgcaattatctgctctgctggctgcggggctccctgcttctcccgggccgctgtgtcaggcttgtgcctgttgctcctcccctccactcctccccctcctcctcctccgcctcctccccctcctcctcctcacaggtgtgtctctagtcctcgtggttgcctgccccactccctgccgagacgcctgccagaaaggtcacctatcctgaaccccagcaagcctgaaacagctcagccaagcaccctgcgatggaagctgcagatgcctccaggagcaacgggtcgagcccagaagccagggatgcccggagcccgtcgggccccagtggcagcctggagaatggcaccaaggctgacggcaaggatgccaagaccaccaacgggcacggcggggaggcagctgagggcaagagcctgggcagcgccctgaagccaggggaaggtaggagcgccctgttcgcgggcaatgagtggcggcgacccatcatccagtttgtcgagtccggggacgacaagaactccaactacttcagcatggactctatggaaggcaagaggtcgccgtacgcagggctccagctgggggctgccaagaagccacccgttacctttgccgaaaagggcgagctgcgcaagtccattttctcggagtcccggaagcccacggtgtccatcatggagcccggggagacccggcggaacagctacccccgggccgacacgggccttttttcacggtccaagtccggctccgaggaggtgctgtgcgactcctgcatcggcaacaagcagaaggcggtcaagtcctgcctggtgtgccaggcctccttctgcgagctgcatctcaagccccacctggagggcgccgccttccgagaccaccagctgctcgagcccatccgggactttgaggcccgcaagtgtcccgtgcatggcaagacgatggagctcttctgccagaccgaccagacctgcatctgctacctttgcatgttccaggagcacaagaatcatagcaccgtgacagtggaggaggccaaggccgagaaggagacggagctgtcattgcaaaaggagcagctgcagctcaagatcattgagattgaggatgaagctgagaagtggcagaaggagaaggaccgcatcaagagcttcaccaccaatgagaaggccatcctggagcagaacttccgggacctggtgcgggacctggagaagcaaaaggaggaagtgagggctgcgctggagcagcgggagcaggatgctgtggaccaagtgaaggtgatcatggatgctctggatgagagagccaaggtgctgcatgaggacaagcagacccgggagcagctgcatagcatcagcgactctgtgttgtttctgcaggaatttggtgcattgatgagcaattactctctccccccacccctgcccacctatcatgtcctgctggagggggagggcctgggacagtcactaggcaacttcaaggacgacctgctcaatgtatgcatgcgccacgttgagaagatgtgcaaggcggacctgagccgtaacttcattgagaggaaccacatggagaacggtggtgaccatcgctatgtgaacaactacacgaacagcttcgggggtgagtggagtgcaccggacaccatgaagagatactccatgtacctgacacccaaaggtggggtccggacatcataccagccctcgtctcctggccgcttcaccaaggagaccacccagaagaatttcaacaatctctatggcaccaaaggtaactacacctcccgggtctgggagtactcctccagcattcagaactctgacaatgacctgcccgtcgtccaaggcagctcctccttctccctgaaaggctatccctccctcatgcggagccaaagccccaaggcccagccccagacttggaaatctggcaagcagactatgctgtctcactaccggccattctacgtcaacaaaggcaacgggattgggtccaacgaagccccatgagctcctggcggaaggaacgaggcgccacacccctgctcttcctcctgaccctgctgctcttgccttctaagctactgtgcttgtctgggtgggagggagcctggtcctgcacctgccctctgcagccctctgccagcctcttgggggcagttccggcctctccgacttccccactggccacactccattcagactcctttcctgccttgtgacctcagatggtcaccatcattcctgtgctcagaggccaacccatcacaggggtgagataggttggggcctgccctaacccgccagcctcctcctctcgggctggatctgggggctagcagtgagtacccgcatggtatcagcctgcctctcccgcccacgccctgctgtctccaggcctatagacgtttctctccaaggccctatcccccaatgttgtcagcagatgcctggacagcacagccacccatctcccattcacatggcccacctcctgcttcccagaggactggccctacgtgctctctctcgtcctacctatcaatgcccagcatggcagaacctgcagcccttggccactgcagatggaaacctctcagtgtcttgacatcaccctacccaggcggtgggtctccaccacagccactttgagtctgtggtccctggagggtggcttctcctgactggcaggatgaccttagccaagatattcctctgttccctctgctgagataaagaattcccttaacatgatataatccacccatgcaaatagctactggcccagctaccatttaccatttgcctacagaatttcattcagtctacactttggcattctctctggcgatggagtgtggctgggctgaccgcaaaaggtgccttacacactgcccccaccctcagccgttgccccatcagaggctgcctcctccttctgattaccccccatgttgcatatcagggtgctcaaggattggagaggagacaaaaccaggagcagcacagtggggacatctcccgtctcaacagccccaggcctatgggggctctggaaggatgggccagcttgcaggggttggggagggagacatccagcttgggctttcccctttggaataaaccattggtctgtcacttctcttgta

SEQ ID NO: 172531 - DNA, 294 bp, Artificial Sequence
  derived and/or modified sequence
atggaggccgccgacgccagcagaagcaacggcagcagccccgaggccagagacgccagaagccccagcggccccagcggcagcctggagaacggcaccaaggccgacggcaaggacgccaagaccaccaacggccacggcggcgaggccgccgagggcaagagcctgggcagcgccctgaagcccggcgagggcagaagcgccctgttcgccggcaacgagtggagaagacccatcatccagttcgtggagagcggcgacgacaagaacagcaactacttcagcatggactag

SEQ ID NO: 172532 - DNA, 288 bp, Artificial Sequence
  derived and/or modified sequence
atggaggccgccgacgccagcagaagcaacggcagcagccccgaggccagagacgccagaagccccagcggccccagcggcagcctggagaacggcaccaaggccgacggcaaggacgccaagaccaccaacggccacggcggcgaggccgccgagggcaagagcctgggcagcgccctgaagcccggcgagggcagaagcgccctgttcgccggcaacgagtggagaagacccatcatccagttcgtggagagcggcgacgacaagaacagcaactacttcagctag

SEQ ID NO: 172533 - DNA, 270 bp, Artificial Sequence
  derived and/or modified sequence
atggaggccgccgacgccagcagaagcaacggcagcagccccgaggccagagacgccagaagccccagcggccccagcggcagcctggagaacggcaccaaggccgacggcaaggacgccaagaccaccaacggccacggcggcgaggccgccgagggcaagagcctgggcagcgccctgaagcccggcgagggcagaagcgccctgttcgccggcaacgagtggagaagacccatcatccagttcgtggagagcggcgacgacaagtag

SEQ ID NO: 172534 - DNA, 1767 bp, Artificial Sequence
  derived and/or modified sequence
atggaggccgcggatgcttcgcgttctaatggtagcagcccagaagctagagacgcgagatctccgtccggccccagcgggtccctcgaaaatggaactaaagccgacgggaaggatgccaagaccacgaacggccacggaggcgaggctgctgaaggtaagtcattaggctcagctctgaagcctggagaaggaagaagcgctctcttcgccggcaacgagtggcgtagacctattattcagtttgttgagagtggtgacgataagaattcgaattacttttcaatggacagtatggaagggaaacggtcaccttatgctggcctccagctaggcgctgccaagaagcccccggttacattcgctgaaaagggggagctccggaaaagtattttttccgagtcacgcaagccaactgtatctataatggaacccggagagactcggagaaacagctatcccagagcagatacaggcctcttcagccgatccaaaagcggaagtgaagaggtgttgtgtgatagttgcataggaaacaagcagaaagcggtgaaaagttgcctggtgtgccaagcttctttctgtgagttacacctgaaaccccacctggagggcgccgcgttccgagaccatcagctcctggaacctatccgggacttcgaggcacgcaaatgccccgtgcatggaaagaccatggagctattctgccagaccgatcagacttgtatatgctacctgtgcatgttccaggaacataagaaccattctactgtaacagtggaagaagccaaggcagaaaaggaaactgaactgtccctccagaaagagcagcttcagctgaagatcatagagatcgaggacgaggcagagaagtggcagaaggagaaggatagaatcaagtcttttaccactaatgaaaaggccatccttgaacagaattttagagatctggttcgcgacctagagaaacagaaagaagaagtcagagcagccctggaacaaagagagcaggatgccgtggaccaggtgaaggtgattatggatgctctcgacgagagagcaaaggtgctgcacgaagataaacaaacacgagagcagctgcatagcatcagcgatagcgtcctgttcctccaggagttcggagcactgatgagtaactatagtctgccgcctcccttaccaacgtaccatgtgctactcgagggagaaggcttaggccagtccctgggcaacttcaaagacgatctcttgaatgtctgtatgcgtcacgttgaaaagatgtgcaaagccgatctgtctcgcaatttcatcgagagaaatcatatggagaatggcggagaccacaggtatgtgaacaactatacaaacagttttgggggtgaatggtccgcgcctgacacgatgaagcgctatagcatgtatctgacccctaaaggcggagtgcggacaagctatcaacccagtagcccagggaggtttaccaaagaaactacccagaagaattttaataatctgtacgggacgaaaggaaactacacttcgcgcgtctgggaatactcctcatctatccagaacagcgataatgatctgcccgtggttcagggctccagctcttttagcttgaagggttaccctagtctgatgagatctcagtctcccaaggcgcagcctcagacgtggaagtctggaaaacagacgatgctgagccactaccgaccattttatgtgaacaaaggaaacggcatcggcagcaatgaagcaccctag

SEQ ID NO: 172535 - DNA, 294 bp, Artificial Sequence
  derived and/or modified sequence
atggaggctgccgacgcatccaggtccaatgggtcatccccggaggccagagacgctagatccccttcgggcccctcggggagcttagagaacgggaccaaagctgatggcaaagacgctaaaaccactaacgggcatggaggcgaggctgctgagggtaaatctcttgggagcgcccttaaacccggagaaggtaggtccgccttgtttgccggcaacgagtggagaaggccaatcatccagttcgttgaatctggtgatgacaaaaacagcaactacttctctatggattag

SEQ ID NO: 172536 - DNA, 288 bp, Artificial Sequence
  derived and/or modified sequence
atggaagctgccgatgctagtcggagtaacggatcctctccagaagccagggacgctagaagcccttcaggccccagcgggagtttagagaatggaaccaaagccgacggaaaagatgcgaaaacaacaaacggccatggaggcgaagccgccgaaggaaagagcttaggatccgccctcaagcctggagagggaaggagcgctctttttgccggaaacgagtggcggcggcccatcattcagtttgtagaatctggcgatgacaagaacagcaactattttagttag

SEQ ID NO: 172537 - DNA, 270 bp, Artificial Sequence
  derived and/or modified sequence
atggaggcggccgacgcttctaggagtaacggctcttcccccgaggcccgcgatgctcgctccccttctgggccatccggatctctggaaaatggtactaaagctgacggcaaagacgctaagacaacaaacggacatggcggggaggccgccgaaggtaaatctctggggagcgccctcaaaccgggcgagggcagaagcgccctgtttgccggaaatgagtggcgccggccgattattcagtttgttgagagtggtgatgacaagtag

SEQ ID NO: 172538 - DNA, 1767 bp, Artificial Sequence
  derived and/or modified sequence
atggaggccgcagatgccagccgcagcaatggcagcagccctgaggccagagatgcccggagccccagcggccccagcggcagcctggagaatggcaccaaggcagatggcaaggatgccaagaccaccaacggccacggcggggaggccgctgagggcaagagcctgggcagcgccctgaagccaggagagggccgcagcgccctgtttgctggaaatgagtggaggcggcccatcatccagtttgtggagagcggagatgacaagaacagcaactacttctccatggacagcatggagggcaagaggagcccctatgccggcctgcagctgggcgccgccaagaagccccctgtgacctttgctgagaagggggagctgaggaagagcatcttcagcgagagcaggaagcccaccgtgtccatcatggagcctggagagaccaggaggaacagctaccccagggctgacaccggcctcttcagccgcagcaagagcggcagcgaggaggtgctgtgtgacagctgcatcggcaacaagcagaaggctgtgaagagctgcctggtgtgccaggccagcttctgtgagctgcacctgaagccccacctggagggcgccgccttccgggaccaccagctgctggagcccatccgggactttgaggccaggaagtgccctgtgcacggcaagaccatggagctgttctgccagacagaccagacctgcatctgctacctgtgcatgttccaggagcacaagaaccacagcacagtgacagtggaggaggccaaggccgagaaggagacagagctgagcctgcagaaggagcagctgcagctgaagatcattgaaattgaagatgaagctgagaagtggcagaaggagaaggaccgcatcaagagcttcaccaccaatgagaaggccatcctggagcagaacttccgggacctggtgcgggacctggagaagcagaaggaggaggtgcgggccgccctggagcagcgggagcaggatgctgtggaccaggtgaaggtgatcatggatgccctggatgagcgggccaaggtgctgcacgaggacaagcagacccgggagcagctgcacagcatcagtgacagcgtgctcttcctgcaggagtttggagccctgatgagcaactacagcctgcccccacccctgcccacctaccacgtgctgctggagggggagggcctgggccagagcctgggcaacttcaaggatgacctgctgaatgtgtgcatgagacatgtggagaagatgtgcaaggctgacctgagcaggaacttcattgaaagaaaccacatggagaatggaggagaccaccgctacgtgaacaactacaccaacagctttggaggagagtggagcgccccagacaccatgaagcgctacagcatgtacctgacccccaagggcggcgtgaggaccagctaccagcccagcagccctggccgcttcaccaaggagaccacccagaagaacttcaacaacctgtatggcaccaagggcaactacaccagccgggtgtgggagtacagcagcagcatccagaacagcgacaatgacctgcctgtggtgcagggcagcagcagcttcagcctgaagggctaccccagcctgatgaggagccagagccccaaggcccagccccagacctggaagagcggcaagcagaccatgctgagccactaccggcccttctacgtgaacaagggaaatggcatcggcagcaatgaggccccctag

SEQ ID NO: 172539 - DNA, 294 bp, Artificial Sequence
  derived and/or modified sequence
atggaggccgcagatgccagccgcagcaatggcagcagccctgaggccagagatgcccggagccccagcggccccagcggcagcctggagaatggcaccaaggcagatggcaaggatgccaagaccaccaacggccacggcggggaggccgctgagggcaagagcctgggcagcgccctgaagccaggagagggccgcagcgccctgtttgctggaaatgagtggaggcggcccatcatccagtttgtggagagcggagatgacaagaacagcaactacttctccatggactag

SEQ ID NO: 172540 - DNA, 288 bp, Artificial Sequence
  derived and/or modified sequence
atggaggccgcagatgccagccgcagcaatggcagcagccctgaggccagagatgcccggagccccagcggccccagcggcagcctggagaatggcaccaaggcagatggcaaggatgccaagaccaccaacggccacggcggggaggccgctgagggcaagagcctgggcagcgccctgaagccaggagagggccgcagcgccctgtttgctggaaatgagtggaggcggcccatcatccagtttgtggagagcggagatgacaagaacagcaactacttctcctag

SEQ ID NO: 172541 - DNA, 270 bp, Artificial Sequence
  derived and/or modified sequence
atggaggccgcagatgccagccgcagcaatggcagcagccctgaggccagagatgcccggagccccagcggccccagcggcagcctggagaatggcaccaaggcagatggcaaggatgccaagaccaccaacggccacggcggggaggccgctgagggcaagagcctgggcagcgccctgaagccaggagagggccgcagcgccctgtttgctggaaatgagtggaggcggcccatcatccagtttgtggagagcggagatgacaagtag

SEQ ID NO: 172542 - DNA, 1767 bp, Artificial Sequence
  derived and/or modified sequence
atggaggccgccgacgccagccggagcaacggcagcagccccgaggctagggacgctagaagcccctccggtccatcggggtcactggagaatgggaccaaagcagatggcaaagacgccaagacaaccaatggacatggaggcgaggccgctgaagggaaatcgttgggcagtgccctcaaacctggggaaggacggtcggccctgtttgccgggaatgaatggcgtcgcccaatcattcagttcgtagagagtggcgacgataagaattccaactattttagcatggattccatggaaggcaagcgaagcccatatgctggcctgcagctcggggcagcaaagaaacccccagtgacattcgcagagaaaggggaacttcggaaaagcatcttttccgagagcagaaaacctaccgtgtcaatcatggaacccggcgagacaaggagaaactcttacccacgggcagatactggcctgttctctcgatcgaaatccggctcggaggaggtcctatgtgacagttgcatcggtaacaagcagaaggcagttaagtcgtgtctggtgtgccaggcctctttctgtgaactccatctcaagccccacctggagggtgcagccttccgcgaccatcagttgctagagcctataagagactttgaggcgcgcaagtgtcccgtccacggtaagactatggaactattttgtcagacggaccagacctgcatctgttacctctgtatgttccaagagcataaaaatcacagtacagtcacagtggaagaggcgaaagcagaaaaggagacagaactgtccttacagaaagaacaactgcagctgaagataattgaaattgaagacgaggcagagaaatggcagaaggagaaagatcgcataaagagcttcacaactaacgagaaagcaattctggagcagaattttagggatctcgtaagagatttggaaaagcaaaaggaggaggttcgggcagcccttgagcaacgtgaacaggatgcagtcgaccaggtcaaggttattatggacgcccttgatgagagggcaaaggtgctacacgaagacaaacaaactcgggaacagctacacagtatcagcgatagtgtgctcttcctgcaagagttcggtgccctgatgagtaactattcgctgccccctccgctccctacataccatgtgctattagagggtgagggattaggccagagcctcgggaacttcaaggacgacctgctcaatgtttgtatgcgacatgtcgaaaaaatgtgtaaagccgatctgtctcgcaactttatagaaaggaatcacatggaaaatggtggcgaccaccgctatgtgaataactacaccaactcattcggcggagagtggagtgctccagatactatgaagcgctacagcatgtatcttacccccaagggtggcgtgcggacttcttatcagccttcttcccctgggagatttacgaaagagacaacccagaaaaactttaacaatctatatggtaccaagggaaattatacaagtagggtctgggagtattcatcatctatccaaaactcagacaatgacctgccagtggttcagggctcttcctcattttcgctaaagggatacccatcactgatgcggagtcagtctccaaaagctcaaccccagacatggaagtccggtaaacagacgatgctctcacactatagaccgttttacgtgaataagggcaacggcattgggtctaatgaggccccatag

SEQ ID NO: 172543 - DNA, 294 bp, Artificial Sequence
  derived and/or modified sequence
atggaggccgccgacgccagccggagcaacggcagcagccccgaggccagggacgcgcgaagcccgagtggaccttctggttctttggaaaatggcactaaggccgacggaaaggacgcaaagaccacaaacgggcatgggggtgaagctgccgagggaaaaagtctgggcagcgccttgaaacccggcgaaggtagatcagccctctttgccggtaacgaatggcgacgaccaatcatccagttcgtggagtctggggacgacaaaaattctaactacttttcgatggactag

SEQ ID NO: 172544 - DNA, 288 bp, Artificial Sequence
  derived and/or modified sequence
atggaggccgccgacgccagccggagcaacggcagcagccccgaggccagggacgctcgtagcccttcgggtccgagtgggagcctggaaaatggaaccaaggccgacggaaaagatgccaagaccacgaacggccatgggggcgaggccgcagaggggaagagccttggtagcgccctgaagcccggggaaggcagaagtgccttgttcgccgggaacgagtggagacggcccattatccaatttgtggaatcaggcgacgacaagaactctaactattttagctag

SEQ ID NO: 172545 - DNA, 270 bp, Artificial Sequence
  derived and/or modified sequence
atggaggccgccgacgccagccggagcaacggcagcagccccgaggctagagacgctaggagccctagcgggccgagcggcagcctggaaaatgggaccaaggcggatggcaaagacgctaagactactaacgggcacgggggcgaggccgcagagggcaagagccttggctctgcactgaaacccggcgagggcaggtctgcattgtttgctggcaatgagtggcggcgccccatcatccaatttgtggaaagcggagatgacaaatag

SEQ ID NO: 172546 - DNA, 1767 bp, Artificial Sequence
  derived and/or modified sequence
atggaggcagccgacgcgagtcgttcaaacggcagcagcccagaagcgcgagacgctagaagccctagcgggccaagcgggtcccttgagaatggtaccaaggctgacggtaaagacgccaaaactactaacgggcatggcggagaggccgctgaaggaaaaagtctgggttctgccttgaaacctggagaggggagatccgcccttttcgctggcaatgaatggaggcggccaatcatacagtttgtcgagagcggtgacgataaaaattcaaattattttagcatggattctatggaagggaaacgcagcccctatgccggtttacagttgggcgcagctaagaaacctcccgtaacctttgctgagaagggggagctgcgaaagtctatcttctcagagtcccggaagcccaccgtgtccatcatggagcccggtgaaaccagaagaaattcctatcccagggcagacacagggttatttagccgctctaagtccggctcagaggaagttctgtgtgattcatgcatcggtaacaagcagaaggctgtgaagagctgcttagtgtgtcaggctagtttctgcgagctccacctcaagcctcacctcgagggcgctgcttttcgagaccatcagctgcttgaaccgatccgcgattttgaggcgaggaaatgccctgttcacgggaaaactatggagctgttctgccagaccgatcagacatgcatatgttacctgtgtatgtttcaggagcataagaatcactccaccgtcactgtcgaggaagcaaaggctgagaaggagacagagttatcactgcagaaagaacagctccagctcaagataattgaaatcgaagacgaagccgagaagtggcagaaggagaaggaccgaatcaagtcttttacgactaatgaaaaggctattttagagcagaactttcgcgacctggtgagggacctcgagaaacagaaggaggaagtgcgcgctgccctggaacagcgggagcaggacgcagttgatcaggtgaaggtcattatggacgcccttgacgagcgcgcaaaggtgctgcatgaggacaaacagacgcgggagcagcttcacagcatctccgacagcgttctgtttctgcaggagtttggtgctttgatgtctaactattctctgccgccacctctgccgacctatcatgtgctgttggaaggggagggactgggacagtccctcggaaattttaaggacgacctccttaacgtgtgcatgcggcatgtggaaaaaatgtgcaaagccgaccttagcaggaactttattgaaaggaaccacatggaaaatgggggagaccacagatatgtcaataactacaccaattccttcggcggtgaatggtcagcccctgatacaatgaaaagatacagtatgtatctgaccccaaaaggcggagtgcgcacctcgtaccagcctagctccccaggacggtttacgaaggagaccactcagaagaatttcaacaatctgtacgggactaaggggaactatacctcccgcgtgtgggagtattctagctcaatccagaacagtgacaatgacctgcctgtcgtgcaaggtagttcctccttttcattgaaaggctacccctcccttatgaggagccaaagtccgaaagcccagcctcagacttggaagagcggtaagcagacaatgttaagccactaccggcctttctatgtgaacaaaggaaatggcatcggatctaacgaagctccttag

SEQ ID NO: 172547 - DNA, 294 bp, Artificial Sequence
  derived and/or modified sequence
atggaggctgccgatgcttcacgttcaaacggaagctcccccgaggccagggacgctagaagcccatccgggccatctggctcactggagaacggcactaaagccgacggtaaggacgctaagaccacaaacggccacgggggagaggccgctgagggcaagtccctaggtagcgctctcaagcctggcgagggacgatccgctctgttcgcaggcaatgagtggagaagacctattatccagtttgtcgaatcaggcgacgacaagaattcaaactacttttccatggactag

SEQ ID NO: 172548 - DNA, 288 bp, Artificial Sequence
  derived and/or modified sequence
atggaggcggcagacgcatcacgatccaacgggagctctccagaagccagggatgcgcgttctcctagtgggccatcaggatcgctggagaacggaaccaaagctgacggaaaagatgccaagacaaccaacggacacgggggtgaggctgcagagggcaagtctttaggtagcgccctgaaaccaggggaaggaagatctgccttgttcgcaggtaatgaatggcgacggccaattatccaatttgtggagagtggggatgataagaatagcaattattttagctag

SEQ ID NO: 172549 - DNA, 270 bp, Artificial Sequence
  derived and/or modified sequence
atggaagcagcagacgcctccagaagtaatggttcttctccagaggccagagacgccagatccccaagcggaccttctgggagtctggagaatggaactaaagctgacggaaaagatgcaaagactaccaatggccatgggggtgaagctgccgagggaaaatccttgggctccgctctgaaacccggagaagggaggagtgctcttttcgcgggaaacgaatggcggagacccataatccagttcgttgagtcgggcgacgacaaatag

SEQ ID NO: 172550 - DNA, 547 bp, Artificial Sequence
  derived and/or modified sequence
agtgaagcctgcccacttgtgaagacggagactccccgctccccggatgagaagcaagtgcgtcagagggaagcagcccaactggttgctgagttgtggaaaataagctgggggagaaaaaacacttcttttaaaaatcaggtgtgtctctagtcctcgtggttgcctgccccactccctgccgagacgcctgccagaaaggtcacctatcctgaaccccagcaagcctgaaacagctcagccaagcaccctgcgatggaagctgcagatgcctccaggagcaacgggtcgagcccagaagccagggatgcccggagcccgtcgggccccagtggcagcctggagaatggcaccaaggctgacggcaaggatgccaagaccaccaacgggcacggcggggaggcagctgagggcaagagcctgggcagcgccctgaagccaggggaaggtaggagcgccctgttcgcgggcaatgagtggcggcgacccatcatccagtttgtcgagtccggggacgacaagaactccaactacttcagcatggact

SEQ ID NO: 172551 - DNA, 549 bp, Artificial Sequence
  derived and/or modified sequence
gaaattcagaacaggaggacacaagggcaggggaatgctgaggccaaggccttctcccaccacctgcctcctgcgggagtgattccacagtgcagagggagagccatttggaggtccggcacccgctctgcccatgcctatgcttcaggctctgtgagaaggctggactccttctggaacttcaggaccttggatgctcccctcctctgctcctgcctcccttcccccagccctggggtgtgtcagatgtgtgttttctcctggactcagctgaagcaaggtcagcccagctttcaaggggaggagcttccacactctaggtgtgtctctagtcctcgtggttgcctgccccactccctgccgagacgcctgccagaaaggtcacctatcctgaaccccagcaagcctgaaacagctcagccaagcaccctgcgatggaagctgcagatgcctccaggagcaacgggtcgagcccagaagccagggatgcccggagcccgtcgggccccagtggcagcctggagaatggcaccaaggctgacggcaagg

SEQ ID NO: 172552 - DNA, 551 bp, Artificial Sequence
  derived and/or modified sequence
gagaaattgggcctggcattttgagtgacttctgagattatctgaatctcacactttgctgacctctttttggagggcattgcctgtggcctggcccagagaggatgggcaggtgttttctgagtcacacagcagaccaagtgtggagacaggtgtgtctctagtcctcgtggttgcctgccccactccctgccgagacgcctgccagaaaggtcacctatcctgaaccccagcaagcctgaaacagctcagccaagcaccctgcgatggaagctgcagatgcctccaggagcaacgggtcgagcccagaagccagggatgcccggagcccgtcgggccccagtggcagcctggagaatggcaccaaggctgacggcaaggatgccaagaccaccaacgggcacggcggggaggcagctgagggcaagagcctgggcagcgccctgaagccaggggaaggtaggagcgccctgttcgcgggcaatgagtggcggcgacccatcatccagtttgtcgagtccggggacgacaagaactccaactacttcagc

SEQ ID NO: 172553 - DNA, 555 bp, Artificial Sequence
  derived and/or modified sequence
tttggaggtccggcacccgctctgcccatgcctatgcttcaggctctgtgagaaggctggactccttctggaacttcaggaccttggatgctcccctcctctgctcctgcctcccttcccccagccctggggtgtgtcagatgtgtgttttctcctggactcagctgaagcaaggtgtgtctctagtcctcgtggttgcctgccccactccctgccgagacgcctgccagaaaggtcacctatcctgaaccccagcaagcctgaaacagctcagccaagcaccctgcgatggaagctgcagatgcctccaggagcaacgggtcgagcccagaagccagggatgcccggagcccgtcgggccccagtggcagcctggagaatggcaccaaggctgacggcaaggatgccaagaccaccaacgggcacggcggggaggcagctgagggcaagagcctgggcagcgccctgaagccaggggaaggtaggagcgccctgttcgcgggcaatgagtggcggcgacccatcatccagtttgtcgagtccggggacgacaag

SEQ ID NO: 172554 - protein, 212 aa, Artificial Sequence
  derived and/or modified sequence
MIIGGIDHSLYTGSLWYTPIRREWYYEVIIVRVEINGQDLKMDCKEYNYDKSIVDSGTTNLRLPKKVFEAAVKSIKAASSTEKFPDGFWLGEQLVCWQAGTTPWNIFPVISLYLMGEVTNQSFRITILPQQYLRWKMWPRPKTTVTCHLTVIHGHCYGSCYHGGLLLSLIGPENELALLSALAMCTMSSGRQRWKACHLGHGRLWLQHSTDR

SEQ ID NO: 172555 - protein, 501 aa, Artificial Sequence [sequence omitted]

SEQ ID NO: 172556 - DNA, 1506 bp, Artificial Sequence
  derived and/or modified sequence
atggcccaggctctcccttggctccttttatggatgggtgccggagtgctgcctgcacacggcacgcagcatggtatccggttgccactccgctctggactaggtggcgcccctctgggcttgagactgccccgtgaaaccgacgaagaacctgaggaacctggacggcgggggtctttcgttgagatggtggacaatcttcgtgggaagtctgggcagggatattacgtcgagatgacagttggcagtccaccacagaccctgaatatacttgttgacactgggtcaagtaactttgccgtcggggcggctccacatccgttcctgcatcgatattaccagcgccaactctccagtacctaccgcgatctccgtaaaggagtctatgtgccttatactcagggcaagtgggagggagaactgggcacagacctcgtgagcatccctcatggaccgaacgtgactgtgcgcgccaacatcgcagcaatcaccgagtcagataagttttttatcaatggatctaactgggaaggcatactcggcctggcatacgccgagatcgctagaccagacgacagcctggaaccgtttttcgattccctggttaagcaaacccatgtccctaaccttttttccctccagctgtgcggcgccggattccccctgaaccagagcgaagtcctagcaagtgttgggggttcaatgatcatcggcggaattgatcattccctctataccggctcgctgtggtatacacccatcaggagagagtggtactacgaggtcataatcgtccgtgtggaaatcaatggacaggatttaaaaatggactgtaaggagtataactacgataaaagtatcgtggactcaggcactacaaacctacggctgccaaagaaagtttttgaggcggctgtgaaatctattaaggcggcttccagtacagaaaaattccctgacggattttggttaggtgagcaactggtgtgttggcaggcgggcaccaccccctggaatatcttccctgttatttcgctgtacctgatgggtgaagtaacaaaccagtcctttagaataacgattctgccacagcaatatctgcgccctgtggaggatgtggccacatctcaggacgattgctacaagttcgccatctcccagagctccaccggcaccgttatgggcgcggtgatcatggaaggcttttacgtggtgtttgacagagctcgcaaacggattggcttcgccgtttccgcttgtcatgtccatgatgagtttcgcactgccgcagttgagggcccctttgtcacccttgacatggaagactgcggatacaatatcccacagacagatgagagcaccctgatgactatcgcctacgtgatggcggccatctgcgcactgtttatgctgccattatgtctgatggtttgtcaatggtgttgtctcaggtgtctccggcagcagcatgatgatttcgccgacgatatttccctcttgaaatag

SEQ ID NO: 172557 - DNA, 1506 bp, Artificial Sequence
  derived and/or modified sequence
atggcccaggccctgccctggctgctgctgtggatgggcgctggggtgctgcctgcccacggcacccagcacggcatccggctgcccctgcggagcggcctgggcggggcccccctgggcctgcggctgccccgggagacagatgaggagcctgaggagcccggccggcggggcagctttgtggagatggtggacaacctgcggggcaagagcggccagggctactacgtggagatgacagtgggcagccccccccagaccctgaacatcctggtggacaccggcagcagcaactttgctgtgggcgccgccccccaccccttcctgcaccgctactaccagaggcagctgagcagcacctacagagacctgaggaagggcgtgtatgtgccctacacccagggcaagtgggagggggagctgggcacagacctggtgtccatcccccacggccccaacgtgacagtgcgggccaacattgctgccatcacagaaagtgacaagttcttcatcaatggcagcaactgggagggcatcctgggcctggcctatgcagaaattgcccggccagatgacagcctggagcccttctttgacagcctggtgaagcagacccacgtgcccaacctcttcagcctgcagctgtgtggggccggcttccccctgaaccagagcgaggtgctggcctctgtgggcggctccatgatcattggaggcatcgaccacagcctgtacacaggcagcctgtggtacacccccatcagaagagagtggtactatgaggtgatcatcgtgcgggtggagatcaatggccaggacctgaagatggactgcaaggagtacaactatgacaagagcatcgtggacagcggcaccaccaacctgcggctgcccaagaaggtgtttgaggccgctgtgaagagcatcaaggccgccagcagcacagagaagttcccagatggcttctggctgggggagcagctggtgtgctggcaggccggcaccaccccctggaacatcttccctgtgatcagcctgtacctgatgggagaggtgaccaaccagagcttccgcatcaccatcctgccccagcagtacctgcggcctgtggaggatgtggccaccagccaggatgactgctacaagtttgccatcagccagagcagcacaggcaccgtgatgggcgccgtcatcatggagggcttctacgtggtgtttgaccgggccaggaagagaattggatttgctgtgtctgcctgccacgtgcatgatgagttcagaacagctgctgtggagggcccctttgtgaccctggacatggaggactgtggctacaacatcccccagacagatgagagcaccctgatgaccatcgcctacgtgatggccgccatctgtgccctcttcatgctgcccctgtgcctgatggtgtgccagtggtgctgcctgcgctgcctgcggcagcagcatgatgactttgctgatgacatcagcctgctgaagtag

SEQ ID NO: 172558 - DNA, 1506 bp, Artificial Sequence
  derived and/or modified sequence
atggcccaggccctgccctggctgctgctgtggatgggcgccggcgtgcttcccgctcatggcactcaacatgggatcaggctgccgttgcgaagtggactgggcggggccccccttggtttgagacttccccgtgaaaccgatgaagagccagaggagcctggcagaagaggttcgttcgtggaaatggtcgataacctacggggaaagtccggccaaggatactacgtcgagatgaccgtcggctccccccctcagaccctgaacatcctcgtagatacaggtagttccaacttcgctgtaggagcagccccccatcctttcttacacagatactaccagagacaactgtcctccacgtaccgggatttgcgtaaaggcgtatatgtgccctacacgcagggcaaatgggaaggggagctcgggacagatctggtttccatccctcatggacctaatgtcaccgtgcgggctaacatcgctgcgataacagagtccgacaaattttttattaatggatctaactgggaaggcattctgggactagcttacgccgaaatcgctaggccagatgactctctggaaccttttttcgactctctggttaagcaaacacacgtgccaaacctcttctccctgcagctgtgcggcgccggatttcctctgaaccaatcggaagtgctcgcgtctgtggggggttcgatgatcattgggggtattgatcactccctgtatacaggttcactctggtatactcctatccggagggagtggtattatgaagtgattattgtgcgcgtcgaaataaatggacaggaccttaagatggactgcaaagagtataattatgataagtcaatcgtggactcaggaaccacaaacctgcggctgccaaagaaggtcttcgaagctgcggtcaagtcaattaaagccgctagctccacagagaaatttcccgacggtttctggctgggcgagcagttagtttgctggcaggccggcactaccccatggaacatattcccagtaatcagtctgtatctgatgggggaggtgacaaatcagagtttccggatcacaatccttccgcagcagtatttgcgccccgtggaagatgtcgcgacctcccaggatgattgctacaaattcgccatcagtcagtcatcaaccggcacggttatgggtgctgtgatcatggagggcttttatgtggtttttgaccgggctcgcaagcggatcggatttgctgtctccgcttgtcacgttcacgacgagttcagaacagctgccgtggagggcccgttcgtgaccctcgatatggaagactgtggctataatattccacagacggatgagtcaacacttatgaccatcgcttacgtcatggcagcaatctgcgcactcttcatgcttcccctgtgtcttatggtgtgccaatggtgttgcctcagatgcctgcgccaacagcacgacgatttcgccgacgatatcagtctgcttaaatag

SEQ ID NO: 172559 - DNA, 1506 bp, Artificial Sequence
  derived and/or modified sequence
atggcacaggccctgccttggctacttttatggatgggggcaggagtcctgccagcccatgggacgcagcatggaatccgcctgcctctgcgctcaggacttgggggtgctcccctcgggttgagattaccccgtgagactgatgaagaacccgaagaacccggtagacgagggtctttcgtggaaatggtcgacaacctccgaggtaagtctggccaagggtactatgtagagatgaccgtgggcagccctccacagactctcaacattctggttgacaccggcagttcaaatttcgctgtcggggcagctccacaccccttcctccacaggtattaccaaagacagctctcaagtacctatagggatctgcgcaaaggggtgtatgttccttacacccagggcaagtgggagggagagctgggcactgatctcgtgagcattcctcatggccctaatgttaccgtgcgtgctaacattgctgctattaccgagagcgacaagttttttataaacggctcaaattgggaagggatcctgggcttggcctatgcggagatcgcacggcctgacgactcgcttgaacccttttttgattctctggtgaaacagactcatgtgcctaatctgttctcgttgcagctctgtggcgcaggattcccattaaaccaaagtgaggtgctcgcttcagtggggggtagcatgatcattggcggaattgaccactctctgtacaccggctccttatggtacacccccataaggcgggaatggtattatgaggtgataatcgtgcgcgtcgaaattaacgggcaggacctcaaaatggactgcaaggagtacaactatgacaaaagcattgtcgattcaggtacaactaacctgaggttgcccaagaaagtctttgaggccgctgtgaaaagcatcaaagccgcttcgtccactgaaaagttcccagacggcttctggcttggagagcaactcgtttgttggcaggcgggtactactccatggaacatattccccgtgatctccctgtatttgatgggggaggtgactaaccaatcttttagaattaccatattgccacagcagtacttaaggccagtggaggatgtcgccacatcgcaggacgattgctacaagttcgcaattagtcagtcatctaccggcactgtgatgggcgctgtgatcatggaaggattttatgtcgtgttcgaccgggcaagaaagaggatcggctttgcagtcagtgcatgccacgtccatgacgagtttcggacagccgcagtagaagggccttttgtgacactagacatggaggattgtgggtataacatcccccagaccgacgagagtaccctgatgacgatagcttacgtgatggccgcaatttgcgctttgttcatgctgcctctgtgtctgatggtttgtcagtggtgttgccttcgctgcctgcgtcaacagcacgacgatttcgcagacgacatcagcctcttaaaatag

SEQ ID NO: 172560 - DNA, 1802 bp, Artificial Sequence
  derived and/or modified sequence
acaagtctttccgcctccccagcccgcccgggagctgcgagccgcgagctggattatggtggcctgagcagccaacgcagccgcaggagcccggagcccttgcccctgcccgcgccgccgcccgccggggggaccagggaagccgccaccggcccgccatgcccgcccctcccagccccgccgggagcccgcgcccgctgcccaggctggccgccgccgtgccgatgtagcgggctccggatcccagcctctcccctgctcccgtgctctgcggatctcccctgaccgctctccacagcccggacccgggggctggcccagggccctgcaggccctggcgtcctgatgcccccaagctccctctcctgagaagccaccagcaccacccagacttgggggcaggcgccagggacggacgtgggccagtgcgagcccagagggcccgaaggccggggcccaccatggcccaagccctgccctggctcctgctgtggatgggcgcgggagtgctgcctgcccacggcacccagcacggcatccggctgcccctgcgcagcggcctggggggcgcccccctggggctgcggctgccccgggagaccgacgaagagcccgaggagcccggccggaggggcagctttgtggagatggtggacaacctgaggggcaagtcggggcagggctactacgtggagatgaccgtgggcagccccccgcagacgctcaacatcctggtggatacaggcagcagtaactttgcagtgggtgctgccccccaccccttcctgcatcgctactaccagaggcagctgtccagcacataccgggacctccggaagggtgtgtatgtgccctacacccagggcaagtgggaaggggagctgggcaccgacctggtaagcatcccccatggccccaacgtcactgtgcgtgccaacattgctgccatcactgaatcagacaagttcttcatcaacggctccaactgggaaggcatcctggggctggcctatgctgagattgccaggcctgacgactccctggagcctttctttgactctctggtaaagcagacccacgttcccaacctcttctccctgcagctttgtggtgctggcttccccctcaaccagtctgaagtgctggcctctgtcggagggagcatgatcattggaggtatcgaccactcgctgtacacaggcagtctctggtatacacccatccggcgggagtggtattatgaggtgatcattgtgcgggtggagatcaatggacaggatctgaaaatggactgcaaggagtacaactatgacaagagcattgtggacagtggcaccaccaaccttcgtttgcccaagaaagtgtttgaagctgcagtcaaatccatcaaggcagcctcctccacggagaagttccctgatggtttctggctaggagagcagctggtgtgctggcaagcaggcaccaccccttggaacattttcccagtcatctcactctacctaatgggtgaggttaccaaccagtccttccgcatcaccatccttccgcagcaatacctgcggtggaagatgtggccacgtcccaagacgactgttacatgccatctcacagtcatccacgggcactgttatgggagctgttatcatggagggcttctattgtctttgatcgggcccgaaaacgaattggctttgctgtcagcgcttgccatgtgcacgatgagttcaggacggcagcggtggaaggcctgtcaccttggacatggaagactgtggctacaacattccacagacagatga

SEQ ID NO: 172561 - DNA, 5847 bp, Artificial Sequence
  derived and/or modified sequence
acaagtctttccgcctccccagcccgcccgggagctgcgagccgcgagctggattatggtggcctgagcagccaacgcagccgcaggagcccggagcccttgcccctgcccgcgccgccgcccgccggggggaccagggaagccgccaccggcccgccatgcccgcccctcccagccccgccgggagcccgcgcccgctgcccaggctggccgccgccgtgccgatgtagcgggctccggatcccagcctctcccctgctcccgtgctctgcggatctcccctgaccgctctccacagcccggacccgggggctggcccagggccctgcaggccctggcgtcctgatgcccccaagctccctctcctgagaagccaccagcaccacccagacttgggggcaggcgccagggacggacgtgggccagtgcgagcccagagggcccgaaggccggggcccaccatggcccaagccctgccctggctcctgctgtggatgggcgcgggagtgctgcctgcccacggcacccagcacggcatccggctgcccctgcgcagcggcctggggggcgcccccctggggctgcggctgccccgggagaccgacgaagagcccgaggagcccggccggaggggcagctttgtggagatggtggacaacctgaggggcaagtcggggcagggctactacgtggagatgaccgtgggcagccccccgcagacgctcaacatcctggtggatacaggcagcagtaactttgcagtgggtgctgccccccaccccttcctgcatcgctactaccagaggcagctgtccagcacataccgggacctccggaagggtgtgtatgtgccctacacccagggcaagtgggaaggggagctgggcaccgacctggtaagcatcccccatggccccaacgtcactgtgcgtgccaacattgctgccatcactgaatcagacaagttcttcatcaacggctccaactgggaaggcatcctggggctggcctatgctgagattgccaggcctgacgactccctggagcctttctttgactctctggtaaagcagacccacgttcccaacctcttctccctgcagctttgtggtgctggcttccccctcaaccagtctgaagtgctggcctctgtcggagggagcatgatcattggaggtatcgaccactcgctgtacacaggcagtctctggtatacacccatccggcgggagtggtattatgaggtgatcattgtgcgggtggagatcaatggacaggatctgaaaatggactgcaaggagtacaactatgacaagagcattgtggacagtggcaccaccaaccttcgtttgcccaagaaagtgtttgaagctgcagtcaaatccatcaaggcagcctcctccacggagaagttccctgatggtttctggctaggagagcagctggtgtgctggcaagcaggcaccaccccttggaacattttcccagtcatctcactctacctaatgggtgaggttaccaaccagtccttccgcatcaccatccttccgcagcaatacctgcggccagtggaagatgtggccacgtcccaagacgactgttacaagtttgccatctcacagtcatccacgggcactgttatgggagctgttatcatggagggcttctacgttgtctttgatcgggcccgaaaacgaattggctttgctgtcagcgcttgccatgtgcacgatgagttcaggacggcagcggtggaaggcccttttgtcaccttggacatggaagactgtggctacaacattccacagacagatgagtcaaccctcatgaccatagcctatgtcatggctgccatctgcgccctcttcatgctgccactctgcctcatggtgtgtcagtggtgctgcctccgctgcctgcgccagcagcatgatgactttgctgatgacatctccctgctgaagtgaggaggcccatgggcagaagatagagattcccctggaccacacctccgtggttcactttggtcacaagtaggagacacagatggcacctgtggccagagcacctcaggaccctccccacccaccaaatgcctctgccttgatggagaaggaaaaggctggcaaggtgggttccagggactgtacctgtaggaaacagaaaagagaagaaagaagcactctgctggcgggaatactcttggtcacctcaaatttaagtcgggaaattctgctgcttgaaacttcagccctgaacctttgtccaccattcctttaaattctccaacccaaagtattcttcttttcttagtttcagaagtactggcatcacacgcaggttaccttggcgtgtgtccctgtggtaccctggcagagaagagaccaagcttgtttccctgctggccaaagtcagtaggagaggatgcacagtttgctatttgctttagagacagggactgtataaacaagcctaacattggtgcaaagattgcctcttgaattaaaaaaaaaaactagattgactatttatacaaatgggggcggctggaaagaggagaaggagagggagtacaaagacagggaatagtgggatcaaagctaggaaaggcagaaacacaaccactcaccagtcctagttttagacctcatctccaagatagcatcccatctcagaagatgggtgttgttttcaatgttttcttttctgtggttgcagcctgaccaaaagtgagatgggaagggcttatctagccaaagagctcttttttagctctcttaaatgaagtgcccactaagaagttccacttaacacatgaatttctgccatattaatttcattgtctctatctgaaccaccctttattctacatatgataggcagcactgaaatatcctaaccccctaagctccaggtgccctgtgggagagcaactggactatagcagggctgggctctgtcttcctggtcataggctcactctttcccccaaatcttcctctggagctttgcagccaaggtgctaaaaggaataggtaggagacctcttctatctaatccttaaaagcataatgttgaacattcattcaacagctgatgccctataacccctgcctggatttcttcctattaggctataagaagtagcaagatctttacataattcagagtggtttcattgccttcctaccctctctaatggcccctccatttatttgactaaagcatcacacagtggcactagcattataccaagagtatgagaaatacagtgctttatggctctaacattactgccttcagtatcaaggctgcctggagaaaggatggcagcctcagggcttccttatgtcctccaccacaagagctccttgatgaaggtcatctttttcccctatcctgttcttcccctccccgctcctaatggtacgtgggtacccaggctggttcttgggctaggtagtggggaccaagttcattacctccctatcagttctagcatagtaaactacggtaccagtgttagtgggaagagctgggttttcctagtatacccactgcatcctactcctacctggtcaacccgctgcttccaggtatgggacctgctaagtgtggaattacctgataagggagagggaaatacaaggagggcctctggtgttcctggcctcagccagctgcccacaagccataaaccaataaaacaagaatactgagtcagttttttatctgggttctcttcattcccactgcacttggtgctgctttggctgactgggaacaccccataactacagagtctgacaggaagactggagactgtccacttctagctcggaacttactgtgtaaataaactttcagaactgctaccatgaagtgaaaatgccacattttgctttataatttctacccatgttgggaaaaactggctttttcccagccctttccagggcataaaactcaaccccttcgatagcaagtcccatcagcctattatttttttaaagaaaacttgcacttgtttttctttttacagttacttccttcctgccccaaaattataaactctaagtgtaaaaaaaagtcttaacaacagcttcttgcttgtaaaaatatgtattatacatctgtatttttaaattctgctcctgaaaaatgactgtcccattctccactcactgcatttggggcctttcccattggtctgcatgtcttttatcattgcaggccagtggacagagggagaagggagaacaggggtcgccaacacttgtgttgctttctgactgatcctgaacaagaaagagtaacactgaggcgctcgctcccatgcacaactctccaaaacacttatcctcctgcaagagtgggctttccagggtctttactgggaagcagttaagccccctcctcaccccttccttttttctttctttactcctttggcttcaaaggattttggaaaagaaacaatatgctttacactcattttcaatttctaaatttgcaggggatactgaaaaatacggcaggtggcctaaggctgctgtaaagttgaggggagaggaaatcttaagattacaagataaaaaacgaatcccctaaacaaaaagaacaatagaactggtcttccattttgccacctttcctgttcatgacagctactaacctggagacagtaacatttcattaaccaaagaaagtgggtcacctgacctctgaagagctgagtactcaggccactccaatcaccctacaagatgccaaggaggtcccaggaagtccagctccttaaactgacgctagtcaataaacctgggcaagtgaggcaagagaaatgaggaagaatccatctgtgaggtgataggcaaggatgaaagacaaagaaggaaaagagtatcaaaggcagaaaggagatcatttagttgggtctgaaaggaaaagtctttgctatccgacatgtactgctagtacctgtaagcattttaggtcccagaatggaaaaaaaaatcagctattggtaatataataatgtcctttccctggagtcagtttttttaaaaagttaactcttagtttttacttgtttaattctaaaagagaagggagctgaggccattccctgtaggagtaaagataaaaggataggaaaagattcaaagctctaatagagtcacagctttcccaggtataaaacctaaaattaagaagtacaataagcagaggtggaaaatgatctagttcctgatagctacccacagagcaagtgatttataaatttgaaatccaaactactttcttaatatcactttggtctccatttttcccaggacaggaaatatgtccccccctaactttcttgcttcaaaaattaaaatccagcatcccaagatcattctacaagtaattttgcacagacatctcctcaccccagtgcctgtctggagctcacccaaggtcaccaaacaacttggttgtgaaccaactgccttaaccttctgggggagggggattagctagactaggagaccagaagtgaatgggaaagggtgaggacttcacaatgttggcctgtcagagcttgattagaagccaagacagtggcagcaaaggaagacttggcccaggaaaaacctgtgggttgtgctaatttctgtccagaaaatagggtggacagaagcttgtggggtacatggaggaattgggacctggttatgttgttattctcggactgtgaattttggtgatgtaaaacagaatattctgtaaacctaatgtctgtataaataatgagcgttaacacagtaaaatattcaataagaagtcaaactactagggtta

SEQ ID NO: 172562 - DNA, 1506 bp, Artificial Sequence
  derived and/or modified sequence
atggcccaggccctgccctggctgctgctgtggatgggcgccggcgtgctgcccgcccacggcacccagcacggcatcagactgcccctgagaagcggcctgggcggcgcccccctgggcctgagactgcccagagagaccgacgaggagcccgaggagcccggcagaagaggcagcttcgtggagatggtggacaacctgagaggcaagagcggccagggctactacgtggagatgaccgtgggcagccccccccagaccctgaacatcctggtggacaccggcagcagcaacttcgccgtgggcgccgccccccaccccttcctgcacagatactaccagagacagctgagcagcacctacagagacctgagaaagggcgtgtacgtgccctacacccagggcaagtgggagggcgagctgggcaccgacctggtgagcatcccccacggccccaacgtgaccgtgagagccaacatcgccgccatcaccgagagcgacaagttcttcatcaacggcagcaactgggagggcatcctgggcctggcctacgccgagatcgccagacccgacgacagcctggagcccttcttcgacagcctggtgaagcagacccacgtgcccaacctgttcagcctgcagctgtgcggcgccggcttccccctgaaccagagcgaggtgctggccagcgtgggcggcagcatgatcatcggcggcatcgaccacagcctgtacaccggcagcctgtggtacacccccatcagaagagagtggtactacgaggtgatcatcgtgagagtggagatcaacggccaggacctgaagatggactgcaaggagtacaactacgacaagagcatcgtggacagcggcaccaccaacctgagactgcccaagaaggtgttcgaggccgccgtgaagagcatcaaggccgccagcagcaccgagaagttccccgacggcttctggctgggcgagcagctggtgtgctggcaggccggcaccaccccctggaacatcttccccgtgatcagcctgtacctgatgggcgaggtgaccaaccagagcttcagaatcaccatcctgccccagcagtacctgagacccgtggaggacgtggccaccagccaggacgactgctacaagttcgccatcagccagagcagcaccggcaccgtgatgggcgccgtgatcatggagggcttctacgtggtgttcgacagagccagaaagagaatcggcttcgccgtgagcgcctgccacgtgcacgacgagttcagaaccgccgccgtggagggccccttcgtgaccctggacatggaggactgcggctacaacatcccccagaccgacgagagcaccctgatgaccatcgcctacgtgatggccgccatctgcgccctgttcatgctgcccctgtgcctgatggtgtgccagtggtgctgcctgagatgcctgagacagcagcacgacgacttcgccgacgacatcagcctgctgaagtag

SEQ ID NO: 172563 - protein, 518 aa, Artificial Sequence
  derived and/or modified sequence
MGALARALLLPLLAQWLLRAAPELAPAPFTLPLRVAAATNRVVAPTPGPGTPAERHADGLALALEPALASPAGAANFLAMVDNLQGDSGRGYYLEMLIGTPPQKLQILVDTGSSNFAVAGTPHSYIDTYFDTERSSTYRSKGFDVTVKYTQGSWTGFVGEDLVTIPKGFNTSFLVNIATIFESENFFLPGIKWNGILGLAYATLAKPSSSLETFFDSLVTQANIPNVFSMQMCGAGLPVAGSGTNGGSLVLGGIEPSLYKGDIWYTPIKEEWYYQIEILKLEIGGQSLNLDCREYNADKAIVDSGTTLLRLPQKVFDAVVEAVARASLIPEFSDGFWTGSQLACWTNSETPWSYFPKISIYLRDENSSRSFRITILPQLYIQPMMGAGLNYECYRFGISPSTNALVIGATVMEGFYVIFDRAQKRVGFAASPCAEIAGAAVSEISGPFSTEDVASNCVPAQSLSEPILWIVSYALMSVCGAILLVLIVLLLLPFRCQRRPRDPEVVNDESSLVRHRWK

SEQ ID NO: 172564 - protein, 423 aa, Artificial Sequence
  derived and/or modified sequence
MLIGTPPQKLQILVDTGSSNFAVAGTPHSYIDTYFDTERSSTYRSKGFDVTVKYTQGSWTGFVGEDLVTIPKGFNTSFLVNIATIFESENFFLPGIKWNGILGLAYATLAKPSSSLETFFDSLVTQANIPNVFSMQMCGAGLPVAGSGTNGGSLVLGGIEPSLYKGDIWYTPIKEEWYYQIEILKLEIGGQSLNLDCREYNADKAIVDSGTTLLRLPQKVFDAVVEAVARASLIPEFSDGFWTGSQLACWTNSETPWSYFPKISIYLRDENSSRSFRITILPQLYIQPMMGAGLNYECYRFGISPSTNALVIGATVMEGFYVIFDRAQKRVGFAASPCAEIAGAAVSEISGPFSTEDVASNCVPAQSLSEPILWIVSYALMSVCGAILLVLIVLLLLPFRCQRRPRDPEVVNDESSLVRHRWK

SEQ ID NO: 172565 - DNA, 1557 bp, Artificial Sequence
  derived and/or modified sequence
atgggcgctcttgctagagcactgttgctgcccctgctggcacagtggttactccgggctgcacctgagctcgccccagcacctttcacgttgccactgagagtcgctgccgctacaaaccgggttgttgcccccacccctgggcccggtacacccgccgagcgccacgctgatggcttggctttggccctagagcctgccctggcctcacccgccggcgcagcaaactttctggccatggtggataacctccagggtgacagtgggagaggatattatttagaaatgctgatcggcacaccccctcaaaagctccagatccttgtcgatactggtagctctaattttgccgtcgccggcaccccgcacagctacatcgatacatactttgacaccgaaagatctagcacttacaggtccaaaggattcgacgtgactgtcaaatatactcaagggagttggacggggtttgtgggggaggacctcgtgactattcccaagggatttaacacatcttttctggtcaatatcgccaccatttttgaatccgaaaacttctttctgccaggtatcaagtggaacggcattctgggcctggcgtacgcaaccctggctaaaccttccagtagtcttgaaacattttttgactccctcgtcacccaggctaacatcccaaacgtcttcagcatgcaaatgtgcggtgcaggtctgcccgtggcagggagcgggactaatggcggatccctggtactgggcggcatcgaaccgagcttgtacaaaggtgacatctggtacacacccatcaaggaggaatggtactatcagattgaaatcctgaaacttgagataggtggacaatcacttaatctggattgtcgagaatacaatgccgataaagccatcgtggattctggtacaactctcctacgactccctcagaaagtattcgatgcagtagttgaggcggtggcccgggccagcttgatcccagagttctcagacggattttggacgggcagccaactagcctgctggacaaactccgagaccccatggtcctacttccccaagatttccatctacctgcgagatgagaattcctctcgatccttccggatcacgatcctgccgcagctgtatatccagcccatgatgggagctggtctgaactacgaatgttaccggttcggcatttcaccttcaacgaacgctctggttataggcgccaccgtgatggagggtttttacgtcatctttgatagggcacagaaacgcgtgggcttcgccgcgtccccctgcgcggagattgctggggcggcagtaagcgaaatttcgggtccattctcaaccgaagacgtggctagtaactgtgtgcctgcccagtcgttgtccgaaccgatcctgtggatcgtgagttacgccctcatgtctgtatgtggagccatcctcttggtgctgatcgtgctgctcctgttaccatttcggtgtcagcgccgaccgcgcgaccctgaggtggtcaacgatgagtcatcactcgtgcggcacaggtggaagtag

SEQ ID NO: 172566 - DNA, 1272 bp, Artificial Sequence
  derived and/or modified sequence
atgctgattggtaccccaccacagaagctgcagatcttggtagacaccggatcatcaaattttgcagtggccggaacaccacatagctacatcgatacatactttgacaccgaaaggtcaagtacttaccggagcaaaggcttcgatgtgaccgttaagtacacacaggggagctggaccggttttgtcggcgaagatttggtgacaatcccaaaaggttttaacactagctttctcgtgaatattgccactatttttgaatcggagaatttcttcctgccaggcatcaaatggaatggaatattaggcctggcctacgctactctcgcgaagccctcctcaagcctcgagacattctttgatagtctcgtgacccaggcaaatatacccaacgtcttcagcatgcaaatgtgcggagccgggttgcctgtggccggctctggtactaacggaggaagtctcgtgctggggggtatcgaaccctctctgtataaaggcgatatttggtacacccctatcaaagaggagtggtattaccaaatagaaatactcaagctcgagataggcggccaaagcctgaacctggattgtcgtgagtacaatgcagacaaagctatcgtagattctggaactacccttctgagattgcctcagaaggtgtttgacgcagtggtagaagccgtcgcgcgggcttctctgattccagaattcagtgatgggttttggaccggttcgcaattggcctgctggacaaattccgagacaccgtggagttacttcccgaaaattagcatatacctgcgcgacgaaaatagctctagaagtttccgtatcaccattctgccacagctatatatccaacccatgatgggggcaggtttaaactatgaatgctaccgttttggcatctcccctagtactaacgctttggtcataggcgccacagttatggaagggttctacgttattttcgatcgggcacaaaagcgagtgggcttcgctgccagtccctgcgcggagatagctggagccgccgtcagtgaaatcagcggcccgttcagtaccgaggacgtggcatcaaactgtgtacctgcgcagtcgttgagcgaacccatattatggatcgttagttacgccctgatgagcgtgtgtggcgcgattctgttggtgctgatcgtccttctcctactcccgttccgatgccagcgacgccctagagatcccgaggtagtgaacgacgaatcaagcctggtccggcatcggtggaagtag

SEQ ID NO: 172567 - DNA, 1557 bp, Artificial Sequence
  derived and/or modified sequence
atgggcgccctggcccgggccctgctgctgcccctgctggcccagtggctgctgcgggccgcccctgagctggccccagcccccttcaccctgcccctgcgggtggccgccgccaccaacagagtggtggcccccaccccaggccctggcaccccagctgagagacatgctgatggcctggccctggccctggagcccgccctggccagccctgctggggccgccaacttcctggccatggtggacaacctgcagggcgacagcggccggggctactacctggagatgctgattggcaccccaccccagaagctgcagatcctggtggacaccggcagcagcaactttgctgtggccggcaccccccacagctacatcgacacctactttgacacagagaggagcagcacctaccgcagcaaaggatttgatgtgacagtgaagtacacccagggctcctggacaggctttgtgggggaggacctggtgaccatccccaagggcttcaacaccagcttcctggtgaacatcgccaccatctttgaaagtgagaacttcttcctgcccggcatcaagtggaatggcatcctgggcctggcctatgccaccctggccaagcccagcagcagcctggagaccttctttgacagcctggtgacccaggccaacatccccaacgtgttctccatgcagatgtgtggggccggcctgcctgtggccggcagcggcaccaatggaggcagcctggtgctgggcggcatcgagcccagcctgtacaagggggacatctggtacacccccatcaaggaggagtggtactaccagatcgagatcctgaagctggagattggaggccagagcctgaacctggactgccgggagtacaatgctgacaaggccatcgtggacagcggcaccaccctgctgcggctgccccagaaggtgtttgatgctgtggtggaggccgtggcccgggccagcctcatccctgagttcagtgatggcttctggacaggcagccagctggcctgctggaccaacagcgagaccccctggagctacttccccaagatcagcatctacctgagagatgagaacagcagccgctccttccgcatcaccatcctgccccagctgtacatccagcccatgatgggcgccggcctgaactatgagtgctaccgcttcggcatcagccccagcaccaatgccctggtgattggagccaccgtgatggagggcttctacgtgatctttgaccgggcccagaagagggtgggctttgctgccagcccctgtgccgagattgctggagctgctgtgtctgagatcagcggccccttcagcacagaagatgtggccagcaactgtgtgcctgcccagagcctgtctgagcccatcctgtggatcgtgtcctatgccctgatgtctgtgtgtggggccatcctgctggtgctgattgtgctgctgctgctgcccttccgctgccagaggcggccccgggaccctgaggtggtgaatgatgagagcagcctggtgcgccaccgctggaagtag

SEQ ID NO: 172568 - DNA, 1272 bp, Artificial Sequence
  derived and/or modified sequence
atgctgattggcaccccaccccagaagctgcagatcctggtggacaccggcagcagcaactttgctgtggccggcaccccccacagctacatcgacacctactttgacacagagaggagcagcacctaccgcagcaagggctttgatgtgacagtgaagtacacccagggctcctggacaggctttgtgggggaggacctggtgaccatccccaagggcttcaacaccagcttcctggtgaacatcgccaccatctttgaaagtgagaacttcttcctgcccggcatcaagtggaatggcatcctgggcctggcctatgccaccctggccaagcccagcagcagcctggagaccttctttgacagcctggtgacccaggccaacatccccaacgtgttctccatgcagatgtgtggggccggcctgcctgtggccggcagcggcaccaacggcggcagcctggtgctgggcggcatcgagcccagcctgtacaagggggacatctggtacacccccatcaaggaggagtggtactaccagatcgagatcctgaagctggagatcggcggccagagcctgaacctggactgccgggagtacaatgctgacaaggccatcgtggacagcggcaccaccctgctgcggctgccccagaaggtgtttgatgctgtggtggaggccgtggcccgggccagcctcatccctgagttcagtgatggcttctggacaggcagccagctggcctgctggaccaacagcgagaccccctggagctacttccccaagatcagcatctacctgagagatgagaacagcagccgctccttccgcatcaccatcctgccccagctgtacatccagcccatgatgggcgccggcctgaactatgagtgctacagatttggcatcagccccagcaccaatgccctggtgattggagccaccgtgatggagggcttctacgtgatctttgaccgggcccagaagagggtgggctttgctgccagcccctgtgccgagattgctggagctgctgtgtctgagatcagcggccccttcagcacagaagatgtggccagcaactgtgtgcctgcccagagcctgtctgagcccatcctgtggatcgtgtcctatgccctgatgtctgtgtgtggggccatcctgctggtgctgattgtgctgctgctgctgcccttccgctgccagaggcggccccgggaccctgaggtggtgaatgatgagagcagcctggtgcgccaccgctggaagtag

SEQ ID NO: 172569 - DNA, 1557 bp, Artificial Sequence
  derived and/or modified sequence
atgggcgccctggcccgggccctgctgctgcccctgctggcccagtggttactgcgcgcagcccctgaattggctcccgcaccttttaccctgcccctgcgtgtagctgcggccacaaatcgagtcgtcgcccccactcccggccccggaacacccgcagagcggcatgccgacgggttagcactggcactggaaccggccttggctagccctgccggggccgctaacttcttagccatggtggataacctgcagggtgatagcgggcgcggctactatctggaaatgcttataggcacgccgccacagaaactgcaaattctcgtagatacaggcagttctaacttcgctgtggcgggaacaccgcacagctatatagatacctacttcgatacagaacgatcatctacctataggagcaaagggttcgatgtgactgtgaaatacactcagggctcctggactggatttgtgggcgaggacctcgtgaccattcctaaaggcttcaacacctcttttcttgtgaatatcgctacgattttcgagagcgaaaatttttttctacctggaattaagtggaacggcattcttgggctagcttacgccactctcgccaaacccagctcttcattggagacgtttttcgatagcttagtcacccaggctaatatacctaatgtgttttctatgcagatgtgcggggctggtttgcctgtggccgggagcggaacaaatggtggatccctggtactgggcggtatagaaccgtccctttacaaaggagatatctggtacacgcccatcaaggaagaatggtactaccagatcgagattttaaaactggaaatcggaggccaaagtctgaatctggattgcagggaatataacgcagacaaagcgatcgtggatagcggaactacccttctgcgccttccgcaaaaggtctttgacgcagttgtggaagccgtggctcgggctagtcttattccagagttctcagacggattttggacgggaagccagttagcctgctggactaatagtgagacaccttggagctacttccctaagatctctatttatctgagggatgagaactccagccgttcctttcgaattacaatcctgccgcagttgtacatacagcccatgatgggcgcgggccttaactacgagtgctatagattcggaatctcccccagcaccaatgctctggtgatcggagcaactgtgatggaaggcttttatgtgatcttcgaccgggcacagaagagagtgggatttgcagccagcccttgtgctgagatagccggcgccgccgtgtctgagatcagtggtccctttagcactgaggatgttgctagtaactgtgttcctgcacagtcattaagtgagcccattttatggatcgtgtcatatgctctgatgtccgtctgcggggccattctcctggtgctgattgtgctcttactgctgccgttccgctgccagaggcgcccccgtgatcccgaagtagtgaacgatgaaagtagcctggtccgacatagatggaaatag

SEQ ID NO: 172570 - DNA, 1272 bp, Artificial Sequence
  derived and/or modified sequence
atgctgatcggcacccccccccagaagctgcagatcctggtggacactgggagctccaactttgcagtggccggaacacctcatagctatatcgacacctactttgatactgaacgaagctctacttaccgctctaagggatttgacgtgactgtaaaatatactcagggtagctggaccggatttgtaggagaggatctggtgacgatccccaagggcttcaatacctcctttttagtcaatatcgctacaatcttcgaatccgaaaacttcttcctgcccggcattaagtggaacggtatactaggactcgcgtacgcaactcttgctaagccgtcaagttcacttgagacttttttcgattctctcgtaacccaagcaaatatcccaaacgtgtttagcatgcagatgtgcggagcggggcttcctgtagccggcagcggcacaaatggagggagtctagtgctgggcggcatcgaaccctccctgtacaagggtgatatctggtacaccccaattaaggaagagtggtattatcaaatagagattctgaagcttgagattggtggacaatcccttaatcttgactgtcgcgagtacaatgccgataaggcaatcgtcgattcagggacaacactcctgcggttgccgcaaaaggtgttcgacgccgtggtggaagccgtggcacgagcctccttgatacctgagttctcagatgggttttggaccgggtctcagctcgcttgttggactaattctgagactccttggtcatacttcccaaagattagtatttacttgagggatgaaaacagtagtagaagcttccgcataaccatacttccacagctgtatatccagccgatgatgggcgcggggctcaattacgagtgctacagatttgggatctcaccatccactaatgcgctggtaatcggagccaccgtcatggagggcttctatgtgatctttgacagagcgcagaagagggtcggattcgcagcctccccgtgtgctgagatagccggggccgctgttagcgaaatcagtggaccatttagtacagaggacgtggcaagcaattgcgtacccgcgcagagcttgtcagaaccaatcttatggatagtgtcctatgctctgatgtccgtctgtggggcaattttgcttgtcttgatcgtgctgctgttattaccttttagatgccagcggcggcctcgagacccggaggtggtgaatgacgaatcgagtctcgtgaggcacagatggaaatag

SEQ ID NO: 172571 - DNA, 1557 bp, Artificial Sequence
  derived and/or modified sequence
atgggggcactggccagggctctcctgctccctctccttgctcagtggttactaagggcggctcccgaactggcgccagccccattcaccctgccccttagggtggctgccgcaacaaacagggtagtggctccgacaccgggaccaggtactccagctgaacgtcatgctgacggccttgctttggctctggaaccagcactggcttcccccgctggggcagccaacttcctcgccatggtagacaacctccagggcgactcaggtcgaggctattatctcgagatgctgattggaacacccccacagaaactgcagatcctggtggacactggctccagcaacttcgctgttgcgggtactccgcactcctatatagacacatatttcgataccgagcgatccagcacataccgcagcaaaggctttgacgtgacagtgaaatatacccagggcagctggaccggctttgttggcgaggatctggtgacaattccaaaaggtttcaacacatcattccttgtcaatatcgccactatcttcgaatccgaaaacttcttccttccgggaatcaagtggaatggcatcctcgggctggcctatgccactttagcgaagccgtctagctccttggagacattttttgactccctggtcacacaggccaacatccccaatgtgttctccatgcagatgtgcggtgcaggcctgcccgttgccggatccgggacaaatggcggaagccttgtattgggtgggatcgagcctagcctctacaaaggagacatttggtatacccctataaaggaggagtggtattaccaaattgagattttaaagctggagatcggcggacagagcctaaacctagattgccgagagtacaacgcggacaaggccattgttgactcaggcacaaccctactgcggctgcctcagaaagtcttcgacgctgttgtggaggctgtagcacgcgcttcacttatacctgagttctcagatggattttggactggtagccagctggcttgctggactaactccgagaccccctggtcctatttccccaaaatcagcatctatcttagagacgaaaactcatcccggtcgttccgcattaccatcttacctcagctttatatacaaccgatgatgggggcaggtctcaattatgagtgctatagatttggtatcagcccgagcaccaacgcgttagttattggggcaaccgtgatggaggggttctacgtgatttttgaccgcgctcagaagcgcgtgggttttgctgcctcaccgtgtgcagaaatagctggggcagcggtgagcgagatcagcggcccattttccacagaggacgtcgcctcaaattgcgttcccgctcaatctttgagcgaaccgatcttatggattgtgtcgtacgcattgatgagtgtgtgtggggctatactgctggttctaatcgttttgttgctgctccccttccggtgccagagacgccctcgcgatcctgaggttgtgaatgacgaatcctccctagtgcgccaccggtggaaatag

SEQ ID NO: 172572 - DNA, 1272 bp, Artificial Sequence
  derived and/or modified sequence
atgcttatcggaacacctccacagaagctgcagatcttggtggataccggctctagtaattttgcggtggcaggcacaccccattcttatatagacacatattttgacacagagcgatcttcaacctataggagcaagggcttcgacgtgactgtgaagtacactcagggatcttggaccggttttgtcggagaagatcttgtgacaatccctaaagggttcaatacttcttttttggtcaatatcgccacgattttcgaatcagagaactttttcttgccagggataaagtggaatgggattctggggctggcttacgcaacactggccaagcctagttcatcgctggaaaccttcttcgattcactagtgacacaggccaacattcccaacgtctttagtatgcaaatgtgcggggctggtctgccagttgccggaagcggaacaaacggcggaagtctggtgctgggcggtattgaacccagtctgtataagggggatatttggtacactcccataaaagaagagtggtactaccagatcgagatcctgaaacttgagataggcggacagtctttaaacctggattgtagggaatacaacgcagataaggccatcgtagactctggaaccacccttctgcgattaccccagaaggtattcgacgcagttgtcgaggccgttgctagggcatcgctgattcccgaattttctgacggattttggaccgggtctcagctggcttgctggaccaacagtgagacaccgtggtcatattttcctaagatttctatatacctaagagacgagaatagctctcgctccttccgaattacaattctgccacaactgtacatccaaccaatgatgggcgctggtctgaactatgaatgttacagattcgggatttctccttccaccaatgccctggtcattggcgctacagttatggagggcttttacgtgatttttgaccgagcccaaaaaagggtcggatttgctgccagcccctgcgcagagatagctggagccgcagtaagtgaaatctccggccctttttctaccgaggacgtggcttcaaattgtgtgccggcacagagtctcagtgaacctattctatggatcgtgagttacgctcttatgtcagtgtgtggggctatcctgctcgtgttgatagttttgctgctgctccccttcagatgccagcgcagaccaagagatccagaagtcgtgaacgacgagagctccctggtacggcatagatggaagtag

SEQ ID NO: 172573 - DNA, 2993 bp, Artificial Sequence
  derived and/or modified sequence
cgctggggcgctttccgaggaaattcgggactcgagtttcccggggaagaggcgcggcctgagcccggcgagggtggggagggcaggcgcaggtggaccccggcgccccccgagccccgctgtgaccttggccgcgggggaggggctgggccgctgcggggcagtcgcggccgccagagggggcagcggagaagaacttgcccaacttggcggcgcgggctggggcggctctgcgcctccgcgcccgcctccccggcctccgccttctcccctcccgcgagcctcctcccctcccgcgagcctcctcccctgggccctcctcccgtcctccccgccgccgccggtcccggtgcgcgcccatccctgcccgcagccccgcgcgccggccgagtcgctgagccgcggctgccggacgggacgggaccggctaggctgggcgcgccccccgggccccgccgtgggcatgggcgcactggcccgggcgctgctgctgcctctgctggcccagtggctcctgcgcgccgccccggagctggcccccgcgcccttcacgctgcccctccgggtggccgcggccacgaaccgcgtagttgcgcccaccccgggacccgggacccctgccgagcgccacgccgacggcttggcgctcgccctggagcctgccctggcgtcccccgcgggcgccgccaacttcttggccatggtagacaacctgcagggggactctggccgcggctactacctggagatgctgatcgggacccccccgcagaagctacagattctcgttgacactggaagcagtaactttgccgtggcaggaaccccgcactcctacatagacacgtactttgacacagagaggtctagcacataccgctccaagggctttgacgtcacagtgaagtacacacaaggaagctggacgggcttcgttggggaagacctcgtcaccatccccaaaggcttcaatacttcttttcttgtcaacattgccactatttttgaatcagagaatttctttttgcctgggattaaatggaatggaatacttggcctagcttatgccacacttgccaagccatcaagttctctggagaccttcttcgactccctggtgacacaagcaaacatccccaacgttttctccatgcagatgtgtggagccggcttgcccgttgctggatctgggaccaacggaggtagtcttgtcttgggtggaattgaaccaagtttgtataaaggagacatctggtatacccctattaaggaagagtggtactaccagatagaaattctgaaattggaaattggaggccaaagccttaatctggactgcagagagtataacgcagacaaggccatcgtggacagtggcaccacgctgctgcgcctgccccagaaggtgtttgatgcggtggtggaagctgtggcccgcgcatctctgattccagaattctctgatggtttctggactgggtcccagctggcgtgctggacgaattcggaaacaccttggtcttacttccctaaaatctccatctacctgagagacgagaactccagcaggtcattccgtatcacaatcctgcctcagctttacattcagcccatgatgggggccggcctgaattatgaatgttaccgattcggcatttccccatccacaaatgcgctggtgatcggtgccacggtgatggagggcttctacgtcatcttcgacagagcccagaagagggtgggcttcgcagcgagcccctgtgcagaaattgcaggtgctgcagtgtctgaaatttccgggcctttctcaacagaggatgtagccagcaactgtgtccccgctcagtctttgagcgagcccattttgtggattgtgtcctatgcgctcatgagcgtctgtggagccatcctccttgtcttaatcgtcctgctgctgctgccgttccggtgtcagcgtcgcccccgtgaccctgaggtcgtcaatgatgagtcctctctggtcagacatcgctggaaatgaatagccaggcctgacctcaagcaaccatgaactcagctattaagaaaatcacatttccagggcagcagccgggatcgatggtggcgctttctcctgtgcccacccgtcttcaatctctgttctgctcccagatgccttctagattcactgtcttttgattcttgattttcaagctttcaaatcctccctacttccaagaaaaataattaaaaaaaaaacttcattctaaaccaaaacagagtggattgggctgcaggctctatggggttcgttatgccaaagtgtctacatgtgccaccaacataaaacaaaaccaagccttggctcgttctcttctctcttcaatctctggaaaaataagtacatatagttgataacccctcttagcttacaggaagctttttgtattaattgcctttgaggttattttccgccagacctcaacctgggtcaaagtggtacaggaaggcttgcagtatgatggcaggagaatcagcctggggcctggggatgtaaccaagctgtacccttgagacctggaaccagagccacaggccccttttgtgggtttctctgtgctctgaatgggagccagaattcactaggaggtcatcaaccgatggtcctcacaagcctcttctgaagatggaaggccttttgcccgttgaggtagaggggaaggaaatctcctcttttgtacccaatacttatgttgtattgttggtgcgaaagtaaaaacactacctcttttgagactttgcccagggtcctgtgcctggatgggggtgcaggcagccttgaccacggctgttcccctcacccaaaagaattatcatcccaacagccaagacccaacaggtgctgaactgtgcatcaaccaggaagagttctatccccaagctggccactatcacatatgcttactcttgcttaaaattaataaatcatgttttgatgagaaaaaactattcta

SEQ ID NO: 172574 - DNA, 1712 bp, Artificial Sequence
  derived and/or modified sequence
ctccccgccgccgccggtcccggtgcgcgcccatccctgcccgcagccccgcgcgccggccgagtcgctgagccgcggctgccggacgggacgggaccggctaggctgggcgcgccccccgggccccgccgtgggcatgggcgcactggcccgggcgctgctgctgcctctgctggcccagtggctcctgcgcgccgccccggagctggcccccgcgcccttcacgcggctactacctggagatgctgatcgggacccccccgcagaagctacagattctcgttgacactggaagcagtaactttgccgtggcaggaaccccgcactcctacatagacacgtactttgacacagagaggtctagcacataccgctccaagggctttgacgtcacagtgaagtacacacaaggaagctggacgggcttcgttggggaagacctcgtcaccatccccaaaggcttcaatacttcttttcttgtcaacattgccactatttttgaatcagagaatttctttttgcctgggattaaatggaatggaatacttggcctagcttatgccacacttgccaagccatcaagttctctggagaccttcttcgactccctggtgacacaagcaaacatccccaacgttttctccatgcagatgtgtggagccggcttgcccgttgctggatctgggaccaacggaggtagtcttgtcttgggtggaattgaaccaagtttgtataaaggagacatctggtatacccctattaaggaagagtggtactaccagatagaaattctgaaattggaaattggaggccaaagccttaatctggactgcagagagtataacgcagacaaggccatcgtggacagtggcaccacgctgctgcgcctgccccagaaggtgtttgatgcggtggtggaagctgtggcccgcgcatctctgattccagaattctctgatggtttctggactgggtcccagctggcgtgctggacgaattcggaaacaccttggtcttacttccctaaaatctccatctacctgagagacgagaactccagcaggtcattccgtatcacaatcctgcctcagctttacattcagcccatgatgggggccggcctgaattatgaatgttaccgattcggcatttccccatccacaaatgcgctggtgatcggtgccacggtgatggagggcttctacgtcatcttcgacagagcccagaagagggtgggcttcgcagcgagcccctgtgcagaaattgcaggtgctgcagtgtctgaaatttccgggcctttctcaacagaggatgtagccagcaactgtgtccccgctcagtctttgagcgagcccattttgtggattgtgtcctatgcgctcatgagcgtctgtggagccatcctccttgtcttaatcgtcctgctgctgctgccgttccggtgtcagcgtcgcccccgtgaccctgaggtcgtcaatgatgagtcctctctggtcagacatcgctggaaatgaatagccaggcctgacctcaagcaaccatgaactcagctattaagaaaatcacatttccagggcagcagccgggatcgatggtggcgctttctcctgtgcccacccgtcttcaatctctgttctgctcccagatgccttctagattcactgtcttttgattcttgattttcaagctttcaaatcctccctacttccaag

SEQ ID NO: 172575 - DNA, 1557 bp, Artificial Sequence
  derived and/or modified sequence
atgggcgccctggccagagccctgctgctgcccctgctggcccagtggctgctgagagccgcccccgagctggcccccgcccccttcaccctgcccctgagagtggccgccgccaccaacagagtggtggcccccacccccggccccggcacccccgccgagagacacgccgacggcctggccctggccctggagcccgccctggccagccccgccggcgccgccaacttcctggccatggtggacaacctgcagggcgacagcggcagaggctactacctggagatgctgatcggcacccccccccagaagctgcagatcctggtggacaccggcagcagcaacttcgccgtggccggcaccccccacagctacatcgacacctacttcgacaccgagagaagcagcacctacagaagcaagggcttcgacgtgaccgtgaagtacacccagggcagctggaccggcttcgtgggcgaggacctggtgaccatccccaagggcttcaacaccagcttcctggtgaacatcgccaccatcttcgagagcgagaacttcttcctgcccggcatcaagtggaacggcatcctgggcctggcctacgccaccctggccaagcccagcagcagcctggagaccttcttcgacagcctggtgacccaggccaacatccccaacgtgttcagcatgcagatgtgcggcgccggcctgcccgtggccggcagcggcaccaacggcggcagcctggtgctgggcggcatcgagcccagcctgtacaagggcgacatctggtacacccccatcaaggaggagtggtactaccagatcgagatcctgaagctggagatcggcggccagagcctgaacctggactgcagagagtacaacgccgacaaggccatcgtggacagcggcaccaccctgctgagactgccccagaaggtgttcgacgccgtggtggaggccgtggccagagccagcctgatccccgagttcagcgacggcttctggaccggcagccagctggcctgctggaccaacagcgagaccccctggagctacttccccaagatcagcatctacctgagagacgagaacagcagcagaagcttcagaatcaccatcctgccccagctgtacatccagcccatgatgggcgccggcctgaactacgagtgctacagattcggcatcagccccagcaccaacgccctggtgatcggcgccaccgtgatggagggcttctacgtgatcttcgacagagcccagaagagagtgggcttcgccgccagcccctgcgccgagatcgccggcgccgccgtgagcgagatcagcggccccttcagcaccgaggacgtggccagcaactgcgtgcccgcccagagcctgagcgagcccatcctgtggatcgtgagctacgccctgatgagcgtgtgcggcgccatcctgctggtgctgatcgtgctgctgctgctgcccttcagatgccagagaagacccagagaccccgaggtggtgaacgacgagagcagcctggtgagacacagatggaagtag

SEQ ID NO: 172576 - DNA, 1272 bp, Artificial Sequence
  derived and/or modified sequence
atgctgatcggcacccccccccagaagctgcagatcctggtggacaccggcagcagcaacttcgccgtggccggcaccccccacagctacatcgacacctacttcgacaccgagagaagcagcacctacagaagcaagggcttcgacgtgaccgtgaagtacacccagggcagctggaccggcttcgtgggcgaggacctggtgaccatccccaagggcttcaacaccagcttcctggtgaacatcgccaccatcttcgagagcgagaacttcttcctgcccggcatcaagtggaacggcatcctgggcctggcctacgccaccctggccaagcccagcagcagcctggagaccttcttcgacagcctggtgacccaggccaacatccccaacgtgttcagcatgcagatgtgcggcgccggcctgcccgtggccggcagcggcaccaacggcggcagcctggtgctgggcggcatcgagcccagcctgtacaagggcgacatctggtacacccccatcaaggaggagtggtactaccagatcgagatcctgaagctggagatcggcggccagagcctgaacctggactgcagagagtacaacgccgacaaggccatcgtggacagcggcaccaccctgctgagactgccccagaaggtgttcgacgccgtggtggaggccgtggccagagccagcctgatccccgagttcagcgacggcttctggaccggcagccagctggcctgctggaccaacagcgagaccccctggagctacttccccaagatcagcatctacctgagagacgagaacagcagcagaagcttcagaatcaccatcctgccccagctgtacatccagcccatgatgggcgccggcctgaactacgagtgctacagattcggcatcagccccagcaccaacgccctggtgatcggcgccaccgtgatggagggcttctacgtgatcttcgacagagcccagaagagagtgggcttcgccgccagcccctgcgccgagatcgccggcgccgccgtgagcgagatcagcggccccttcagcaccgaggacgtggccagcaactgcgtgcccgcccagagcctgagcgagcccatcctgtggatcgtgagctacgccctgatgagcgtgtgcggcgccatcctgctggtgctgatcgtgctgctgctgctgcccttcagatgccagagaagacccagagaccccgaggtggtgaacgacgagagcagcctggtgagacacagatggaagtag

SEQ ID NO: 172577 - protein, 163 aa, Artificial Sequence
  derived and/or modified sequence
MDALEGESFALSFSSASDAEFDAVVGYLEDIIMDDEFQLLQRNFMDKYYLEFEDTEENKLIYTPIFNEYISLVEKYIEEQLLQRIPEFNMAAFTTTLQHHKDEVAGDIFDMLLTFTDFLAFKEMFLDYRAEKEGRGLDLSSGLVVTSLCKSSSLPASQNNLRH

SEQ ID NO: 172578 - DNA, 2130 bp, Artificial Sequence
  derived and/or modified sequence
aggaggcggggcgccgcgcccctccggcagtcaccgaggcccggacctgcggcgtcggcggcgcgcgcagagggccaggcgggcgtagaggccggaccgacgcgtggcggcagagggtatccaaggccggacctggcgcgcaggcgctgacccgacctggcagtgagctggccgcggccttggctgagaggccttaaccccgccgggcggccgcgccctgcatgcgagttgggccgcgggcggggttggagcctactcggggcgactgcgatggacgccttagaaggagagagctttgcgctgtctttctcctccgcctctgatgcagaatttgatgctgtggttggatatttagaggacattatcatggatgacgagttccagttattacagagaaatttcatggacaagtactacctggagtttgaagacacagaagagaataaactcatctacacacctatttttaatgaatacatttctttggtagaaaaatacattgaagaacagctgctgcagcggattcctgagttcaacatggcagccttcaccacaacattacagcaccataaggatgaagtggctggtgacatattcgacatgctgctcaccttcacagattttctggcttttaaagaaatgtttttggactacagagcagaaaaagaaggccgaggactggacttaagcagtggcttagtggtgacttcattgtgcaaatcatcttctctgccagcttcccagaacaatctgcggcactaggtcctacctccagccaatgaatgggatcattctggatgtcaccagcccaataggctcagctcatgatgacagaacacatcttggaaagactgactctgttatgtaactcttcatttatgttaagtattaataggtcaaaaccaaaatgacctaaccctcctggacctatttatcctgaaacaccttcttgtattcattaaccatagtactcctccccacctcaagtagacacctctctcaggagcttctgagtcagacgcctctggagcgagccctatgtcaggcactccacctggggggcccttccccagcatacctgctggtgtgtaagtgtggactaacccgccgccaccaccctctgttccagcaggctctgcatgaatctttgtgcacttgcacctctttttcacatgggccacagtttcagtacttcagcctcagtggggttcctgatgtttatctagggtgttactcaagcccagtttgagattttggagtctcctgtgatcacatcttgtctcggctgtaggaatcaacagaaggagacgtcctctacataaaagctccatgtgaaaagctactcctagtcttaacatttgcagtccttgtgtcactgtcttctggtcctgatgtagtcccactgtttctagaagtctcttttaagcattatttttgaaaaaaaaaatatttttatagatgaatactcaggctaacctagtggatgtgatcttggaacttccatgattatccacttaaagatcaaagtattatatgctgtgtgctttttaggtgtttgttagtactgtgaaggcaaaaatgctttctacattgacattcattcctattttactgggcacctatgaatgtatgctgtgtgctagaaatagactaaaacatattcctatagcatgttagtgtgtttgcatgtttgctgaaaatcctttgtgtataaaccagtttgtaaggttctctgggttaggtagggactctgcagtttcttcctgtcaaaatctctcctaccaagatggtgttccactgtccagcccagcatgagtagcaggtagagcacagctttactggctgtttgtatgctttggtttagtgcaatgtgtggtagattacttatcagaaaacatatatgtcatctctagaacgaagaaaaagcatagtagttcaattcccagtgtgtccctttgattttttttttttaatagtaaaaataagaatctgtactgacttttcacttggccattctggttttaaaggacaagctacaagctctgtgtttctgtactgatgtgtcacttattaaatacttttgtaccatgagtaaaacttcaggtgtttcgcaagaaccaccattctcaa

SEQ ID NO: 172579 - DNA, 492 bp, Artificial Sequence
  derived and/or modified sequence
atggatgcactggagggagagagttttgctctttctttttcctcagcgagcgacgctgaatttgacgccgtggtgggatatctagaggatatcataatggatgatgaatttcagctactgcaacgaaattttatggacaaatattacctcgagtttgaagatactgaagagaacaagctgatctatacccccatcttcaacgagtatatttccctggttgagaagtatatcgaagaacagctgttgcagcggatcccagagttcaatatggccgcttttacgacaacgctacagcaccataaggacgaagttgcaggagacattttcgacatgcttctgacgtttacagactttctggcttttaaagagatgttcttggattatcgagcagagaaagagggcaggggactagatctgtccagcggactggtggtaacatccctgtgtaagagctcctcgctgccagcatctcagaacaatttacggcactag

SEQ ID NO: 172580 - DNA, 492 bp, Artificial Sequence
  derived and/or modified sequence
atggatgccctggagggggagagctttgccctgtccttcagcagcgccagtgatgctgagtttgatgctgtggtgggctacctggaggacatcatcatggatgatgagttccagctgctgcagaggaacttcatggacaagtactacctggagtttgaggacacagaggagaacaagctgatctacacccccatcttcaatgagtacatcagcctggtggagaagtacatcgaggagcagctgctgcagagaattcctgagttcaacatggccgccttcaccaccaccctgcagcaccacaaggatgaggtggccggggacatctttgacatgctgctgaccttcacagacttcctggccttcaaggagatgttcctggactacagagctgagaaggagggccggggcctggacctgagcagcggcctggtggtgaccagcctgtgcaagagcagcagcctgcctgccagccagaacaacctgcggcactag

SEQ ID NO: 172581 - DNA, 492 bp, Artificial Sequence
  derived and/or modified sequence
atggacgccctggagggcgagagcttcgccctgagcttcagcagcgcctcagacgcagagtttgacgccgtggtcggctacctggaggacatcataatggacgatgagttccagctgttacagaggaattttatggacaagtattacttagagttcgaagatacagaggagaacaagttaatctacactccaatcttcaacgagtacatctccctggttgagaaatacatagaggaacagttgctccaacgcattcctgaattcaacatggcagcctttacgactaccctgcagcatcataaggacgaagtagctggcgacatatttgatatgctccttaccttcactgatttcttggcctttaaggagatgttcctcgattatagagccgaaaaggagggtcgcggactggacctcagctcaggtctcgtcgtcacgtctttgtgcaaatccagcagcctacccgcgagtcagaataatttacggcattag

SEQ ID NO: 172582 - DNA, 492 bp, Artificial Sequence
  derived and/or modified sequence
atggacgccctggagggagaatcatttgctctaagtttctccagcgctagcgatgcagaatttgatgctgtggtggggtatctggaggatatcattatggacgacgagttccaactgctccaacgaaattttatggataagtattatctggagttcgaagataccgaggagaacaaattaatatacacacccatattcaacgagtatattagtctggttgagaaatacatagaagagcagctgctacagcgcatcccagagttcaatatggcagcgttcaccaccacactgcagcaccacaaagacgaagtggccggagacatctttgacatgctactgacattcaccgattttttggcctttaaggaaatgtttcttgattatcgggctgagaaagagggaagaggcctggatctctcgtctggccttgttgtgaccagcttgtgtaagtcctccagtttgccggcatctcagaataacttgagacattag

SEQ ID NO: 172583 - DNA, 492 bp, Artificial Sequence
  derived and/or modified sequence
atggacgccctggagggcgagagcttcgccctgagcttcagcagcgccagcgacgccgagttcgacgccgtggtgggctacctggaggacatcatcatggacgacgagttccagctgctgcagagaaacttcatggacaagtactacctggagttcgaggacaccgaggagaacaagctgatctacacccccatcttcaacgagtacatcagcctggtggagaagtacatcgaggagcagctgctgcagagaatccccgagttcaacatggccgccttcaccaccaccctgcagcaccacaaggacgaggtggccggcgacatcttcgacatgctgctgaccttcaccgacttcctggccttcaaggagatgttcctggactacagagccgagaaggagggcagaggcctggacctgagcagcggcctggtggtgaccagcctgtgcaagagcagcagcctgcccgccagccagaacaacctgagacactag

SEQ ID NO: 172584 - protein, 295 aa, Artificial Sequence
  derived and/or modified sequence
MMAKKPPKPAPRRIFQERLKITALPLYFEGFLLIKRSGYREYEHYWTELRGTTLFFYTDKKSIIYVDKLDIVDLTCLTEQNSTEKNCAKFTLVLPKEEVQLKTENTESGEEWRGFILTVTELSVPQNVSLLPGQVIKLHEVLEREKKRRIETEQSTSVEKEKEPTEDYVDVLNPMPACFYTVSRKEATEMLQKNPSLGNMILRPGSDSRNYSITIRQEIDIPRIKHYKVMSVGQNYTIELEKPVTLPNLFSVIDYFVKETRGNLRPFICSTDENTGQEPSMEGRSEKLKKNPHIA

SEQ ID NO: 172585 - DNA, 888 bp, Artificial Sequence
  derived and/or modified sequence
atgatggctaagaagcctcctaaaccagctcccagacgcattttccaagaacggctgaaaatcacggctctgcctctgtactttgaggggttcctcctgattaagcggagcgggtacagagaatacgagcattactggactgaactgagaggcaccacactgtttttttacaccgacaagaaatctatcatttacgtggacaagctggacatagtggaccttacatgtctcaccgaacaaaattcgactgaaaaaaactgcgcaaaattcaccctcgttctgccgaaggaggaagtgcagctgaagaccgagaacaccgaatccggcgaggaatggcgggggtttatcctgacagtcaccgaactgtctgtgccacaaaacgtgagtctgctccccggccaggtgatcaagctgcatgaagtactggaacgggagaaaaagagaaggattgaaactgaacaatctacatcagtggagaaggaaaaagagccgaccgaggactatgttgatgtgctcaaccctatgccagcttgtttttacaccgtctcacggaaggaagccactgaaatgcttcagaaaaacccctccctcggaaacatgatcctaaggccagggtctgactcaagaaattattccatcacgatcaggcaggagatcgacatcccgaggattaagcactacaaagttatgtcagtcgggcagaattacaccatcgagctagagaagccagtgaccctccctaacctgttcagtgtgatcgattattttgtgaaggaaactcggggaaatctgcggccctttatttgtagtaccgatgaaaacactggacaagagccaagcatggagggcaggagcgaaaagctgaaaaagaacccacacatcgcatag

SEQ ID NO: 172586 - DNA, 888 bp, Artificial Sequence
  derived and/or modified sequence
atgatggcaaagaagccccccaagcccgctcccagacgcatctttcaggagaggcttaagataactgcgttacccttgtactttgaaggattcctgttgattaaaagaagcgggtacagggagtacgagcactattggaccgagctcagagggaccacccttttcttttacaccgacaagaaatcgattatatacgtggataagctagacatcgtcgatcttacgtgcttgactgagcagaattcaactgagaagaactgtgccaaatttacactcgtgctgccaaaggaagaggttcaactgaagactgagaacactgagagcggagaggagtggcgtggcttcatactgacagtgactgagctgtcggtgcctcagaatgtttctctgctgcccggtcaagtgatcaagctgcacgaggtgctcgaacgagagaagaagcggcgaatcgagactgaacagtcgacttccgtggagaaagagaaggagcctaccgaagattatgtcgatgtgcttaatcccatgccagcgtgcttctatactgtaagtagaaaagaggctacggaaatgttgcagaagaacccctccttgggtaatatgatcctgcgccccgggagtgactctcggaattattccatcaccattcgccaggaaattgacattccacggattaagcactacaaagtgatgtctgttggccagaactacactattgagcttgagaagccggtgacattgccgaacctgtttagcgttattgattattttgtgaaagagacccgcggcaaccttaggccttttatttgcagcaccgacgagaatacggggcaggagcccagcatggagggtaggagtgagaaactgaaaaaaaacccacacatagcttag

SEQ ID NO: 172587 - DNA, 888 bp, Artificial Sequence
  derived and/or modified sequence
atgatggccaagaagccacccaagccagccccccggcgcatcttccaggagcggctgaagatcacagccctgcccctgtactttgagggcttcctgctgatcaagaggagcggctaccgggagtatgagcactactggacagagctgcggggcaccaccctcttcttctacacagacaagaagagcatcatctacgtggacaagctggacatcgtggacctgacctgcctgacagagcagaacagcacagagaagaactgtgccaagttcaccctggtgctgcccaaggaggaggtgcagctgaagacagagaacacagagagcggggaggagtggaggggcttcatcctgactgtgacagagctgtctgtgccccagaatgtgtccctgctgcccggccaggtgatcaagctgcacgaggtgctggagcgggagaagaagaggcgcatcgagacagagcagagcacctctgtggagaaggagaaggagcccacagaggactatgtggatgtgctgaaccccatgcctgcctgcttctacacagtgtccaggaaggaggccacagagatgctgcagaagaaccccagcctgggcaacatgatcctgcggcccggcagtgacagcaggaactacagcatcaccatccggcaggagattgacatcccccgcatcaagcactacaaggtgatgtctgtgggccagaactacaccatcgagctggagaagcctgtgaccctgcccaacctcttctctgtgattgactactttgtgaaggagacccggggcaacctgcggcccttcatctgcagcacagatgaaaatacaggccaggagcccagcatggagggccgctctgagaagctgaagaagaacccccacatcgcctag

SEQ ID NO: 172588 - DNA, 888 bp, Artificial Sequence
  derived and/or modified sequence
atgatggccaagaagccccccaagcccgccccccggcggatcttccaggagaggttgaaaattactgccctgccactctactttgagggctttctgctgataaagcggagtggataccgggagtacgaacactactggacagagcttcggggtacaaccctgttcttctatacggataaaaagtccatcatctatgtcgacaagctagacattgtggaccttacctgcctcaccgaacagaacagcaccgaaaaaaactgtgcaaagtttaccctggtgctgccaaaggaggaagtccagctgaaaactgagaacacagaatccggggaagagtggagaggattcatcttaactgttacagaattgtccgtgccgcagaatgtttctttgctgcctgggcaggttatcaagctccacgaagttctagagagagagaagaagcgaagaatcgagactgagcagagtaccagcgtggaaaaggagaaagagcctactgaggactacgtagatgtgcttaatccgatgcccgcgtgtttctacaccgtatctaggaaggaggcaactgagatgctgcagaaaaacccaagcttaggcaacatgattttgaggcccggctcggattcgagaaattactccataacaatacggcaggagatcgacataccaaggatcaagcactacaaggttatgtccgttgggcagaactatacaatcgaactcgaaaagcctgtcacactgcccaacttattcagtgttattgactacttcgtgaaggaaactcgaggtaacctgcgcccctttatctgttccacagatgaaaacaccgggcaggaaccaagcatggagggccggtctgagaaactgaaaaaaaatccacacatagcctag

SEQ ID NO: 172589 - DNA, 1146 bp, Artificial Sequence
  derived and/or modified sequence
aacagttgccttttcctctcacagaaggaagatttcattttgtttgagacgagaaaccaaaccacacaccaaagagaggggtatgatggctaagaagcccccaaaaccagcccctcgcaggatcttccaggaaaggttaaagattactgctctacctttgtactttgaaggttttttattaatcaagcggtcaggataccgggagtatgagcattactggacagagttgagaggaactactcttttcttttataccgacaaaaagagtataatatatgttgacaaattagacatagtagacctcacatgccttactgagcagaattcaactgaaaagaactgtgcgaaattcacccttgttttgccgaaagaggaagtacaactgaagacagagaacacagaaagtggggaagaatggagaggcttcattcttacagtaacagagctgtcagttccccaaaacgtgtcactcctacctgggcaagtaattaaactgcatgaagtcctagagagagaaaagaaaaggaggattgagacagagcagagtacgtccgtggaaaaagagaaggaaccaactgaagattatgtggatgtactgaaccctatgccagcatgtttttatacagtgtcccggaaagaggcaactgagatgctccagaagaacccttctttgggaaatatgatcctgaggcctggtagtgacagtagaaactactccatcactattcggcaggagatagacattccaagaatcaagcactacaaagtgatgagcgtaggacaaaactacactattgaactggaaaaacctgtaacactcccaaaccttttcagtgtcattgattattttgtgaaggagactcgaggaaatttaagaccatttatatgttcaactgatgaaaacactggtcaagaacccagtatggaagggagaagtgaaaagttgaagaaaaatccacacattgcatgaaatacaatgtgaaagctcctttgtatatcttggggaaagactatgtgagacagagggagaaaacagccattgacaactcaaggagagaggcctcggggggaaaaaaagatcaacctggccaaaaccttgaaaatccggcttcttgacttgtgagaaaataaatttgtgttccttaa

SEQ ID NO: 172590 - DNA, 888 bp, Artificial Sequence
  derived and/or modified sequence
atgatggccaagaagccccccaagcccgccccccggcggatcttccaggagcggctgaagattactgccctcccattgtactttgaggggttcctgctcattaagcgctcaggctacagggaatatgaacactattggacagagcttcgaggtactacactcttcttctataccgacaaaaagagtattatatacgtagacaaattagacatcgtggacctcacttgtctgaccgaacaaaattccacggaaaagaactgtgctaagtttaccctggtactgcctaaagaagaagtgcagctcaagaccgagaatacagaatccggcgaggaatggcgaggcttcatcctaactgttacagagctgagcgtgcctcagaacgtgtccctgttaccgggccaggtgatcaagctgcatgaggtcctggaaagagagaaaaaacgacgaatagaaaccgagcaaagtacctctgtcgaaaaggaaaaagagcccaccgaggactacgttgacgtcctaaacccgatgcctgcatgtttctataccgtgtctcgtaaagaagctacagaaatgttgcagaaaaatccttccctgggcaatatgatcttgaggcccggatccgacagtcgcaattatagtattaccatccggcaggaaatagacattcctaggattaaacactataaggtaatgtccgtgggccagaactatactattgagctcgagaagcccgtgacgctgccaaacctgttcagtgtgatcgactacttcgtgaaggaaactcggggcaacctgaggcccttcatctgctcaacggatgaaaatactgggcaggagccgtccatggagggacgctccgaaaagttaaagaaaaatccccatatagcgtag

SEQ ID NO: 172591 - DNA, 888 bp, Artificial Sequence
  derived and/or modified sequence
atgatggcaaagaagccccctaagcctgcaccacgccgaatcttccaggagcggctcaaaattactgccttacccctctattttgaggggtttcttctgatcaaacgctctggatacagagaatatgagcattactggactgagctccgcggaactacacttttcttctacaccgacaagaagagtatcatttacgtggacaagcttgacattgtggacctcacttgccttaccgagcagaacagcaccgagaagaactgtgccaagttcacactcgtgcttccgaaggaagaggtccaactgaaaactgaaaacacagagagtggtgaagagtggaggggctttattctcacagtgaccgagctctctgtgccccagaatgtctccctcttacctggacaggtgattaagctccatgaggtgctcgagagagagaagaaacgcaggatcgagacggaacagagcacatccgtagagaaagaaaaagaacctaccgaggactacgtagacgtgctgaatccaatgcccgcttgcttctacaccgtgtcccggaaagaagcaactgaaatgctccagaaaaacccaagcttgggcaacatgatcctgaggccgggtagtgactctcggaattactcaatcaccattaggcaggagatcgacataccacggattaaacattacaaggtaatgtccgttggtcaaaactacaccatagagctggagaagcccgtgacactcccgaatctgttctctgtgatcgactacttcgtgaaggaaaccagaggcaatcttcggccattcatctgtagcaccgacgaaaacaccggccaggaaccgtccatggagggacggtctgagaaactgaaaaagaatccacacatcgcctag

SEQ ID NO: 172592 - DNA, 888 bp, Artificial Sequence
  derived and/or modified sequence
atgatggccaaaaaaccgccaaaaccagctcctagaaggatttttcaggaaaggcttaagattacggcattacccctctacttcgaggggtttctcttgatcaaaagatctggttaccgggaatatgagcactactggaccgagctgaggggaaccactctgttcttttataccgacaagaagagcatcatctacgtcgacaagctagatatcgttgacctgacttgcctcactgagcagaactcaacggagaagaactgtgccaagttcaccttagtcctcccaaaggaagaagtgcaactgaagacagaaaataccgaaagtggtgaggagtggaggggttttattttgaccgtgaccgaactttccgtccctcagaacgtcagcctgctgccaggccaggtcattaagctacatgaggtcctggaacgagaaaagaaacgacggatagagacagaacagagcaccagcgtcgagaaggagaaggagccgacggaggactatgttgatgtgctcaaccccatgcccgcatgtttctataccgttagtcggaaggaagccactgagatgttgcaaaagaacccatctctaggtaacatgatcttgcgccctgggtcggatagcaggaactacagtattacgattagacaagaaatagacatcccaaggattaaacattacaaagtcatgtctgttggccagaattacaccattgagctggagaagcccgtgacccttcctaacttgttctccgtcatcgattactttgtgaaagagactcggggaaatctccggcctttcatctgctctacagacgagaacacaggtcaggaaccttctatggaaggaaggagcgagaagctaaagaagaatccacacatagcctag

SEQ ID NO: 172593 - DNA, 1511 bp, Artificial Sequence
  derived and/or modified sequence
aacagttgccttttcctctcacagaaggaagatttcattttgtttgagacgagaaaccaaaccacacaccaaagagaggggtatgatggctaagaagcccccaaaaccagcccctcgcaggatcttccaggaaaggttaaagattactgctctacctttgtactttgaaggttttttattaatcaagcggtcaggataccgggagtatgagcattactggacagagttgagaggaactactcttttcttttataccgacaaaaagagtataatatatgttgacaaattagacatagtagacctcacatgccttactgagcagaattcaactgaaaagaactgtgcgaaattcacccttgttttgccgaaagaggaagtacaactgaagacagagaacacagaaagtggggaagaatggagaggcttcattcttacagtaacagagctgtcagttccccaaaacgtgtcactcctacctgggcaagtaattaaactgcatgaagtcctagagagagaaaagaaaaggaggattgagacagagcagagtacgtccgtggaaaaagagaaggaaccaactgaagattatgtggatgtactgaaccctatgccagcatgtttttatacagtgtcccggaaagaggcaactgagatgctccagaagaacccttctttgggaaatatgatcctgaggcctggtagtgacagtagaaactactccatcactattcggcaggagatagacattccaagaatcaagcactacaaagtgatgagcgtaggacaaaactacactattgaactggaaaaacctgtaacactcccaaaccttttcagtgtcattgattattttgtgaaggagactcgaggaaatttaagaccatttatatgttcaactgatgaaaacactggtcaagaacccagtatggaagggagaagtgaaaagttgaagaaaaatccacacattgcatgaaatacaatgtgaaagctcctttgtatatcttggtaatttatattttcaaaacgaagttcttacttttaaagagaattacctatattctcctgatactgattaccaagtcattcacctgaacaccagaattagaattaaacattgtaccatacaatttcattatcttatcagaatgaaaccaattcacagggaaactagagactacggctgtggtggtaacctgcagatatacacattcccatgcactgacataagttgaaaacacatagtactttctagatggaatttttttctttaggcctcaatgaaatacatttcccctatataattccaacagcagtttctctagttctaaattttaccaattcccaaaaaacctaagttttgctgaaatctgatttgaccaatttatcaaatatgtcattttaattacctagctggaagttagagacatgaaatgtactagaggagcccttttccaatggaaatattatataccacattttttgttaatggaaataaatgtcttcattcccatgtt

SEQ ID NO: 172594 - DNA, 888 bp, Artificial Sequence
  derived and/or modified sequence
atgatggccaagaagccccccaagcccgcccccagaagaatcttccaggagagactgaagatcaccgccctgcccctgtacttcgagggcttcctgctgatcaagagaagcggctacagagagtacgagcactactggaccgagctgagaggcaccaccctgttcttctacaccgacaagaagagcatcatctacgtggacaagctggacatcgtggacctgacctgcctgaccgagcagaacagcaccgagaagaactgcgccaagttcaccctggtgctgcccaaggaggaggtgcagctgaagaccgagaacaccgagagcggcgaggagtggagaggcttcatcctgaccgtgaccgagctgagcgtgccccagaacgtgagcctgctgcccggccaggtgatcaagctgcacgaggtgctggagagagagaagaagagaagaatcgagaccgagcagagcaccagcgtggagaaggagaaggagcccaccgaggactacgtggacgtgctgaaccccatgcccgcctgcttctacaccgtgagcagaaaggaggccaccgagatgctgcagaagaaccccagcctgggcaacatgatcctgagacccggcagcgacagcagaaactacagcatcaccatcagacaggagatcgacatccccagaatcaagcactacaaggtgatgagcgtgggccagaactacaccatcgagctggagaagcccgtgaccctgcccaacctgttcagcgtgatcgactacttcgtgaaggagaccagaggcaacctgagacccttcatctgcagcaccgacgagaacaccggccaggagcccagcatggagggcagaagcgagaagctgaagaagaacccccacatcgcctag

SEQ ID NO: 172595 - protein, 165 aa, Artificial Sequence
  derived and/or modified sequence
MADFDEIYEEEEDEERALEEQLLKYSPDPVVVRGSGHVTVFGLSNKFESEFPSSLTGKVAPEEFKASINRVNSCLKKNLPVNVRWLLCGCLCCCCTLGCSMWPVICLSKRTRRSIEKLLEWENNRLYHKLCLHWRLSKRKCETNNMMEYVILIEFLPKTPIFRPD

SEQ ID NO: 172596 - DNA, 498 bp, Artificial Sequence
  derived and/or modified sequence
atggctgatttcgatgaaatttacgaggaagaggaggacgaagagagggccctggaggagcagctgctcaaatactctcccgatccagtggtggtacgcggctccggtcatgtgactgtgttcggcctgtcaaataagttcgagtcagagtttccctcttcactgaccggaaaagtagccccagaggagttcaaggcctctattaaccgcgtgaatagttgtcttaaaaaaaacctgcctgtgaatgtgagatggctgctgtgcggttgtctttgttgctgttgcaccctcggctgcagtatgtggcccgttatctgtttgagcaagcgaacccgtaggtctatcgaaaaattgctggaatgggaaaacaacaggctgtatcacaagctgtgtctgcattggaggctgtcgaaacgaaagtgcgaaacgaataacatgatggaatacgtaatcctcatcgagttcttaccaaagacacctatcttccggcccgattag

SEQ ID NO: 172597 - DNA, 498 bp, Artificial Sequence
  derived and/or modified sequence
atggctgactttgatgagatctatgaggaggaggaggatgaggagcgggccctggaggagcagctgctgaagtacagcccagaccctgtggtggtgcggggcagcggccacgtgacagtgtttggcctgagcaacaagtttgaaagtgagttccccagcagcctgaccgggaaggtggcccctgaggagttcaaggccagcatcaacagagtgaacagctgcctgaagaagaacctgcctgtgaatgtgcgctggctgctgtgtggctgcctgtgctgctgctgcaccctgggctgcagcatgtggcctgtgatctgcctgagcaagaggacccggcgcagcattgagaagctgctggagtgggagaacaaccggctgtaccacaagctgtgcctgcactggaggctgagcaagaggaaatgtgagaccaacaacatgatggagtatgtgatcctgattgagttcctgcccaagacccccatcttccggccagactag

SEQ ID NO: 172598 - DNA, 498 bp, Artificial Sequence
  derived and/or modified sequence
atggccgacttcgacgagatctacgaggaggaggaggacgaggagagggctctggaggagcagctgctgaaatactctccggatcccgttgtcgtgcgaggctcaggccacgtgaccgtgtttggcctgtcaaacaaatttgagtcagagtttccttcaagcttgacaggtaaggtggcaccagaagaattcaaagcctccattaaccgggtcaactcatgcttgaagaagaacttacccgttaacgtccgctggctgttgtgtggatgtctttgctgttgttgcacactgggctgcagtatgtggcccgtgatttgcttgtccaaacgcactcggcgctccatcgaaaagctattggagtgggaaaataacaggttgtaccacaaactgtgcttacattggaggctcagcaagaggaagtgcgagaccaataacatgatggagtacgttatcctaatagagttcctgcccaaaacaccaattttcagacccgattag

SEQ ID NO: 172599 - DNA, 498 bp, Artificial Sequence
  derived and/or modified sequence
atggctgattttgatgaaatatacgaggaagaggaagacgaagaacgggctctcgaggagcagctactgaaatattcaccagatcctgtggttgtgagaggttcaggccacgtgaccgtttttggtctgagcaacaaattcgaatccgagttccctagttctttgacagggaaggtggctcccgaggaatttaaagcttccattaaccgagttaattcctgcctaaagaagaatctgcccgtaaacgtgagatggctgctgtgcggctgcctctgctgctgctgcacactcggatgttccatgtggcccgtaatttgcctgtcgaaacgcacccggaggtctatcgaaaaactcttggaatgggaaaataataggctctatcacaagttgtgtcttcactggcgcctgagtaaaagaaagtgtgagacgaacaatatgatggaatacgtcatcctcatcgaattcctcccaaagactcctatttttaggcctgattag

SEQ ID NO: 172600 - DNA, 1194 bp, Artificial Sequence
  derived and/or modified sequence
acgcgcccgcccgcccgttggcccgggaagtctcgcgatgccgtagccggctgctcccgctgcgggtggctcgggctgttgctgtggtttcctgagttgctgctgctgcggcggcggcagcggcgtctgtgcttgtggaggtgtcggcctctgggcggatgttgacattgtgttgttgttattgctgatggtaatggcggcggcggtggcggcgacggtccagaccccatcccctctgtagccggagccgagacagccgacagcgaactccgcggcctcggagccggcggcagcggcgactcccctcagcctccgccgcctcgcccgccggtaccccggcgccaaccccgggagtcaggccctttgggcaggggagctcggaggctcaggatggcggatttcgacgaaatctatgaggaagaggaggacgaggagcgggccctggaggagcagctgctcaagtactcgccggacccggtggtcgtccgcggctccggtcacgtcaccgtatttggactgagcaacaaatttgaatctgaattcccttcttcattaactggaaaagtagctcctgaagaatttaaagccagcatcaacagagttaacagttgtcttaagaagaaccttcctgttaatgtacgttggctactttgtggctgcctttgttgctgctgcacattaggttgcagtatgtggccagttatttgcctcagtaaaagaacacgaagatcgattgagaagttattagaatgggaaaacaataggttataccacaagctgtgcttgcattggagactgagcaaaaggaaatgtgaaacgaataacatgatggaatatgtcatcctcatagaatttttaccaaagacaccgatttttcgaccagattagcatttactttatttatagagactttccaagtatgttgtctttccaatggtgccttgcttggtgctctcctggtggtgacataacattggttctacagaatcgtgtggtgttttttttgtttttgtttttgttttttttttaaataaccgcatgttctaagtgtgcatttttgtcaatctttgcaacagttatttcatacagatgtttaatacttaagttattgtgctcttttctgttatgtattctgattttcaaggattacttttttgtattatcaaaaaaatacatttgaacttagcataaaaa

SEQ ID NO: 172601 - DNA, 498 bp, Artificial Sequence
  derived and/or modified sequence
atggccgacttcgacgagatctacgaggaggaggaggacgaggagagagccctggaggagcagctgctgaagtacagccccgaccccgtggtggtgagaggcagcggccacgtgaccgtgttcggcctgagcaacaagttcgagagcgagttccccagcagcctgaccggcaaggtggcccccgaggagttcaaggccagcatcaacagagtgaacagctgcctgaagaagaacctgcccgtgaacgtgagatggctgctgtgcggctgcctgtgctgctgctgcaccctgggctgcagcatgtggcccgtgatctgcctgagcaagagaaccagaagaagcatcgagaagctgctggagtgggagaacaacagactgtaccacaagctgtgcctgcactggagactgagcaagagaaagtgcgagaccaacaacatgatggagtacgtgatcctgatcgagttcctgcccaagacccccatcttcagacccgactag

SEQ ID NO: 172602 - protein, 338 aa, Artificial Sequence
  derived and/or modified sequence
MAKWGEGDPRWIVEERADATNVNNWHWTERDASNWSTDKLKTLFLAVQVQNEEGKCEVTEVSKLDGEASINNRKGKLIFFYEWSVKLNWTGTSKSGVQYKGHVEIPNLSDENSVDEVEISVSLAKDEPDTNLVALMKEEGVKLLREAMGIYISTLKTEFTQGMILPTMNGESVDPVGQPALKTEERKAKPAPSKTQARPVGVKIPTCKITLKETFLTSPEELYRVFTTQELVQAFTHAPATLEADRGGKFHMVDGNVSGEFTDLVPEKHIVMKWRFKSWPEGHFATITLTFIDKNGETELCMEGRGIPAPEEERTRQGWQRYYFEGIKQTFGYGARLF

SEQ ID NO: 172603 - protein, 288 aa, Artificial Sequence
  derived and/or modified sequence
MAKWGEGDPRWIVEERADATNVNNWHWTERDASNWSTDKLKTLFLAVQVQNEEGKCEVTEVSKLDGEASINNRKGKLIFFYEWSVKLNWTGTSKSGVQYKGHVEIPNLSDENSVDEVEISVSLAKDEPDTNLVALMKEEGVKLLREAMGIYISTLKTEFTQGMILPTMNGESVDPVGQPALKTEERKAKPAPSKTQARPVGVKIPTCKITLKETFLTSPEELYRVFTTQELVQAFTHAPATLEADRGGKFHMVDGNVSGEFTDLVPEKHIVMKWRFKSWPEGSHCHSG

SEQ ID NO: 172604 - DNA, 867 bp, Artificial Sequence
  derived and/or modified sequence
atggccaagtggggcgagggcgaccccagatggatcgtggaggagagagccgacgccaccaacgtgaacaactggcactggaccgagagagacgccagcaactggagcaccgacaagctgaagaccctgttcctggccgtgcaggtgcagaacgaggagggcaagtgcgaggtgaccgaggtgagcaagctggacggcgaggccagcatcaacaacagaaagggcaagctgatcttcttctacgagtggagcgtgaagctgaactggaccggcaccagcaagagcggcgtgcagtacaagggccacgtggagatccccaacctgagcgacgagaacagcgtggacgaggtggagatcagcgtgagcctggccaaggacgagcccgacaccaacctggtggccctgatgaaggaggagggcgtgaagctgctgagagaggccatgggcatctacatcagcaccctgaagaccgagttcacccagggcatgatcctgcccaccatgaacggcgagagcgtggaccccgtgggccagcccgccctgaagaccgaggagagaaaggccaagcccgcccccagcaagacccaggccagacccgtgggcgtgaagatccccacctgcaagatcaccctgaaggagaccttcctgaccagccccgaggagctgtacagagtgttcaccacccaggagctggtgcaggccttcacccacgcccccgccaccctggaggccgacagaggcggcaagttccacatggtggacggcaacgtgagcggcgagttcaccgacctggtgcccgagaagcacatcgtgatgaagtggagattcaagagctggcccgagggcagccactgccacagcggctag

SEQ ID NO: 172605 - DNA, 867 bp, Artificial Sequence
  derived and/or modified sequence
atggccaaatggggcgaaggagatcctaggtggattgttgaggaaagagcagatgccacaaacgtgaacaactggcactggaccgaacgcgacgcttcaaattggagcaccgacaagctgaaaacattgttcctcgctgtacaagttcagaacgaagaggggaaatgtgaagtaaccgaggtcagcaagctcgatggcgaggcctctatcaacaacaggaagggcaagctgatcttcttttatgagtggagcgtgaaactcaactggacggggacaagtaagagcggggtgcagtacaagggtcatgtggagatccctaacttaagtgatgaaaacagcgttgatgaggtggaaatttcagtcagtctagcaaaggatgaacccgataccaatcttgtcgcactaatgaaggaagaaggcgtgaagttactgagggaggcaatgggcatctatatcagcacactgaaaaccgagttcacacagggcatgatcctgcccacaatgaacggagagagcgtggaccccgtaggccagcccgcactgaagaccgaagaacgaaaggcaaagccagcaccatccaagactcaggctcgaccggtcggggtcaagattcctacatgtaaaattactttgaaggagactttcctgacgagccccgaggaactgtaccgcgttttcaccactcaggagctggtacaagcctttacccatgccccagccacactcgaggccgacaggggaggcaagttccacatggtagacgggaatgttagtggcgagttcacagatcttgttccagagaaacacattgtgatgaagtggagatttaagtcctggcccgaaggatcacattgtcatagcggatag

SEQ ID NO: 172606 - DNA, 1402 bp, Artificial Sequence
  derived and/or modified sequence
ggaagttaaggaggggagggggtggagggaaaagcaagccaggaggtgcttgcggccgcttctagtagtttccaggcgctgccgggcggctggcactaagcggtcctgaggctgtggctacggctgctccggagctggtggcgccgcgataggagagccgatggccaagtggggtgagggagacccacgctggatcgtggaggagcgggcggacgccaccaacgtcaacaactggcactggacggagagagatgcttcaaattggtccacggataagctgaaaacactgttcctggcagtgcaggttcaaaatgaagaaggcaagtgtgaggtgacggaagtgagtaagcttgatggagaggcatccattaacaatcgcaaagggaaacttatcttcttttatgaatggagcgtcaaactaaactggacaggtacttctaagtcaggagtacaatacaaaggacatgtggagatccccaatttgtctgatgaaaacagcgtggatgaagtggagattagtgtgagccttgccaaagatgagcctgacacaaatctcgtggccttaatgaaggaagaaggggtgaaacttctaagagaagcaatgggaatttacatcagcaccctcaaaacagagttcacccagggcatgatcttacctacaatgaatggagagtcagtagacccagtggggcagccagcactgaaaactgaggagcgcaaggctaagcctgctccttcaaaaacccaggccagacctgttggagtcaaaatccccacttgtaagatcactcttaaggaaaccttcctgacgtcaccagaggagctctatagagtgtttaccacccaagagctggtgcaggcctttacccatgctcctgcaacattagaagcagacagaggtggaaagttccacatggtagatggcaacgtctctggggaatttactgatctggtccctgagaaacatattgtgatgaagtggaggtttaaatcttggccagagggacactttgccaccatcaccttgaccttcatcgacaagaacggagagactgagctgtgcatggaaggtcgaggcatccctgctcctgaggaagagcggacgcgacagggctggcagcggtactactttgagggcattaaacagacctttggctatggcgcacgcttattttagggccagcggcaggggactccagcctgctggacacttcagtccagctctctcctgactggggcttgcgactcacaggattgcatcgtcccagctgctaacttggggccggggcccctcccttccacatataccttgggtttgtgcatgttttctgctgggtgggttcagagggcaatttctcttttatgtgtacatatgctaaataaacataatttaaaaaacatg

SEQ ID NO: 172607 - DNA, 867 bp, Artificial Sequence
  derived and/or modified sequence
atggccaagtggggcgagggggacccccgctggatcgtggaggagcgggcagatgccaccaacgtgaacaactggcactggacagaaagagatgccagcaactggagcacagacaagctgaagaccctcttcctggccgtgcaggtgcagaatgaggagggcaaatgtgaggtgacagaggtgtccaagctggatggagaggccagcatcaacaacaggaagggcaagctgatcttcttctatgagtggagcgtgaagctgaactggacaggcaccagcaagtctggagtgcagtacaagggccacgtggagatccccaacctgagtgatgaaaattctgtggatgaggtggagatctctgtgtccctggccaaggatgagccagacaccaacctggtggccctgatgaaggaggagggcgtgaagctgctgcgggaggccatgggcatctacatcagcaccctgaagacagagttcacccagggcatgatcctgcccaccatgaatggagagagcgtggaccctgtgggccagcctgccctgaagacagaggagaggaaggccaagccagcccccagcaagacccaggcccggcctgtgggcgtgaagatccccacctgcaagatcaccctgaaggagaccttcctgaccagccctgaggagctgtacagagtcttcaccacccaggagctggtgcaggccttcacccacgccccagccaccctggaggccgacagaggaggcaagttccacatggtggatggaaatgtgtctggagagttcacagacctggtgcctgagaagcacatcgtgatgaagtggaggttcaagtcctggccagagggcagccactgccacagcggctag

SEQ ID NO: 172608 - DNA, 867 bp, Artificial Sequence
  derived and/or modified sequence
atggccaagtggggcgagggcgacccccggtggatcgtggaggagcgggccgacgctaccaacgtcaacaattggcactggaccgaacgcgatgcctcaaattggtctactgataaactcaaaaccctgttccttgccgtgcaggtgcaaaatgaagagggaaaatgcgaggtcacagaagtgagcaaactcgatggcgaagcgtccatcaacaacaggaaagggaagcttatattcttctatgaatggtctgttaagctgaactggactggaacaagtaagagcggcgtgcagtacaagggccatgtggaaatccctaacctgtccgacgagaactcagtcgatgaggttgagattagtgtatctctagcaaaggatgagcccgatactaatctggtggctctgatgaaggaagaaggggttaagctgttacgcgaagccatgggaatttacatcagcacactgaagacggaattcacacaggggatgatcctccccacaatgaacggcgaatctgtggatcctgtggggcaaccagctctcaaaacagaagagaggaaggccaagcctgccccgtccaagacccaggctaggcctgtgggggtgaaaatccctacctgtaagattaccctcaaagaaacatttctgacctctcccgaggagttgtacagggtttttacaacacaggagctcgtgcaggccttcacccatgcaccggccactcttgaagctgatcggggcggcaaattccacatggttgatggcaatgtttcgggggagttcaccgatctcgtgccagagaaacatatcgttatgaaatggaggttcaaatcttggccagagggatcccactgccacagtgggtag

SEQ ID NO: 172609 - DNA, 867 bp, Artificial Sequence
  derived and/or modified sequence
atggccaaatggggcgaaggggaccctcggtggattgtggaggaaagggcggatgccacgaatgttaacaattggcattggaccgaaagggacgcgagtaactggagcacggacaaattgaaaactctgttcctggcagtgcaagtgcagaatgaggagggcaaatgcgaagtaaccgaggttagcaagctggatggggaggcttctatcaacaataggaagggtaagctgatattcttctatgagtggagtgtgaagctcaattggaccggcacgtctaagagtggagtgcagtataaggggcacgtggagatcccaaacctgagcgatgaaaattctgttgacgaggttgagatttctgtctccctcgccaaggacgagcccgacaccaacttggtggcactcatgaaggaggagggcgttaaactgctgagggaggcaatggggatctacatttcaaccttgaagactgagttcacgcagggcatgatcttgccaaccatgaacggggagtctgtcgacccagtgggacagcccgcactcaagacagaagaaagaaaagctaagcctgctccatcaaagacccaggctcgaccggtcggagtaaaaatacccacgtgcaaaatcacgctgaaggaaacgttccttacctctcccgaggagctctaccgcgtgtttacaacacaggagctggttcaggcattcactcacgcccctgctacactcgaggccgaccgcggagggaagtttcatatggttgacggaaacgtgtccggcgagttcacggacctcgtgcccgaaaagcatatcgtgatgaagtggagatttaagtcatggcccgaaggctcgcattgtcattccggatag

SEQ ID NO: 172610 - DNA, 1173 bp, Artificial Sequence
  derived and/or modified sequence
aagttaaggaggggagggggtggagggaaaagcaagccaggaggtgcttgcggccgcttctagtagtttccaggcgctgccgggcggctggcactaagcggtcctgaggctgtggctacggctgctccggagctggtggcgccgcgataggagagccgatggccaagtggggtgagggagacccacgctggatcgtggaggagcgggcggacgccaccaacgtcaacaactggcactggacggagagagatgcttcaaattggtccacggataagctgaaaacactgttcctggcagtgcaggttcaaaatgaagaaggcaagtgtgaggtgacggaagtgagtaagcttgatggagaggcatccattaacaatcgcaaagggaaacttatcttcttttatgaatggagcgtcaaactaaactggacaggtacttctaagtcaggagtacaatacaaaggacatgtggagatccccaatttgtctgatgaaaacagcgtggatgaagtggagattagtgtgagccttgccaaagatgagcctgacacaaatctcgtggccttaatgaaggaagaaggggtgaaacttctaagagaagcaatgggaatttacatcagcaccctcaaaacagagttcacccagggcatgatcttacctacaatgaatggagagtcagtagacccagtggggcagccagcactgaaaactgaggagcgcaaggctaagcctgctccttcaaaaacccaggccagacctgttggagtcaaaatccccacttgtaagatcactcttaaggaaaccttcctgacgtcaccagaggagctctatagagtgtttaccacccaagagctggtgcaggcctttacccatgctcctgcaacattagaagcagacagaggtggaaagttccacatggtagatggcaacgtctctggggaatttactgatctggtccctgagaaacatattgtgatgaagtggaggtttaaatcttggccagaggggtctcactgtcactcaggctagagtgcagtggcataatcacagcaaactgcagccttaacctcccagacccaaacgatcctcctgcttcagcttcccaagtagctgagactacgtgtgccaccatgccagcttttttttttttttttttttttttacttttttacttttt

SEQ ID NO: 172611 - DNA, 1017 bp, Artificial Sequence
  derived and/or modified sequence
atggcaaagtggggggagggtgatccgcggtggattgtcgaggagcgggccgatgccaccaatgtcaataattggcattggactgagcgggacgccagcaactggtccaccgacaagctcaagacactattcctggctgtgcaggtgcagaacgaggagggtaagtgcgaggttactgaggtgagcaaactcgatggagaagcctcaatcaataatcggaaaggcaagctgatttttttttatgaatggagtgtgaagctcaactggactggcaccagcaagagtggcgttcagtataaaggtcatgtcgagataccaaatctgtccgacgagaattccgtcgacgaggtggagatttctgtgagcctggccaaagacgaacctgacaccaatcttgttgctttgatgaaagaagagggggtcaaactattgcgcgaggccatgggcatctacatttcaacactcaagaccgagttcactcaaggcatgattctccccacaatgaacggcgaaagcgtcgacccggttggccagccggcacttaaaactgaggagagaaaagctaaacccgcccctagcaagacacaggcacgtccggtcggcgtgaaaattcccacttgtaagattacgttgaaggagacttttcttacctcaccagaagaactgtatcgtgtgttcaccactcaggagttggtgcaagcatttacacacgccccagccaccttagaagcagatcgcggcggaaaatttcatatggttgatgggaatgtgtccggagagttcacagacttggtgccagagaagcacatcgttatgaaatggcgcttcaagagttggcctgaggggcattttgctaccataacgctaacttttattgataaaaacggcgagactgaattgtgcatggaggggagagggatcccagctccagaagaagagaggacccgccagggttggcagcgctactactttgaaggaatcaaacagacctttggatacggggcaaggctgttctag

SEQ ID NO: 172612 - DNA, 1017 bp, Artificial Sequence
  derived and/or modified sequence
atggccaagtggggcgagggggacccccgctggatcgtggaggagcgggcagatgccaccaacgtgaacaactggcactggacagaaagagatgccagcaactggagcacagacaagctgaagaccctcttcctggccgtgcaggtgcagaatgaggagggcaaatgtgaggtgacagaggtgtccaagctggatggagaggccagcatcaacaacaggaagggcaagctgatcttcttctatgagtggagcgtgaagctgaactggacaggcaccagcaagtctggagtgcagtacaagggccacgtggagatccccaacctgagtgatgaaaattctgtggatgaggtggagatctctgtgtccctggccaaggatgagccagacaccaacctggtggccctgatgaaggaggagggcgtgaagctgctgcgggaggccatgggcatctacatcagcaccctgaagacagagttcacccagggcatgatcctgcccaccatgaatggagagagcgtggaccctgtgggccagcctgccctgaagacagaggagaggaaggccaagccagcccccagcaagacccaggcccggcctgtgggcgtgaagatccccacctgcaagatcaccctgaaggagaccttcctgaccagccctgaggagctgtacagagtcttcaccacccaggagctggtgcaggccttcacccacgccccagccaccctggaggccgacagaggaggcaagttccacatggtggatggaaatgtgtctggagagttcacagacctggtgcctgagaagcacatcgtgatgaagtggaggttcaagtcctggccagagggccactttgccaccatcaccctgaccttcatcgacaagaatggagaaacagagctgtgcatggagggccggggcatcccagcccctgaggaggagaggacccggcagggctggcagcgctactactttgagggcatcaagcagaccttcggctatggagcccggctcttctag

SEQ ID NO: 172613 - DNA, 1017 bp, Artificial Sequence
  derived and/or modified sequence
atggccaagtggggcgagggcgacccccggtggatcgtggaggagagagctgatgcaactaacgtgaacaactggcactggacagaacgcgacgcatcaaattggtctaccgacaaactgaaaacactcttcctggccgtgcaggtgcagaacgaggagggaaagtgtgaggtgacagaagtctccaagctagacggcgaggcttctattaacaatcggaaagggaagctgatttttttctatgagtggtccgtgaagcttaactggaccgggacatcaaagtccggcgtacaatacaagggccatgtggagatacctaacctgagtgacgaaaattcagtcgacgaggtggagatctcagtcagtcttgcaaaggacgagcccgatacgaatctcgttgctcttatgaaagaagagggtgttaaattactccgggaggcaatgggcatttacatctccaccctcaagacagagtttactcagggcatgattttaccaacgatgaatggagagagtgtcgacccagttgggcagccagcactgaagactgaagaaagaaaggctaagccagccccgtcaaagacacaagccaggcccgttggcgtaaaaatacctacatgcaaaataactctgaaagagacgttcctgacctcaccagaggagctgtacagggtgttcacaacgcaggagcttgtgcaagcgtttacgcatgctccagcaacactggaggccgaccggggaggtaagttccacatggtcgacggtaatgtgtccggagagttcacagaccttgtgcctgagaagcatatcgtgatgaaatggcggtttaagtcatggccagaagggcacttcgccacgattacattgactttcatcgataagaacggggaaaccgagctatgcatggagggtcgcgggattccagccccagaagaggagcgaaccagacagggatggcagcggtactatttcgagggaatcaagcagacctttgggtacggagcaagactcttttag

SEQ ID NO: 172614 - DNA, 1017 bp, Artificial Sequence
  derived and/or modified sequence
atggccaagtggggggaaggagatcctagatggatcgtggaggagagggctgatgcgacaaatgttaataactggcactggacagaaagggacgcttccaattggagcacagataaactgaagacgctgtttctggcagtacaggttcagaatgaagagggtaagtgcgaagtcacagaggtgtccaagttggacggggaggcaagcatcaacaaccggaaagggaagctcattttcttctacgaatggtctgtgaaactgaactggactggcacgtccaaatccggtgttcagtataaaggacacgtcgaaattcccaacctcagcgatgagaactccgtggatgaggtcgagatctcagtaagtctggctaaggacgaaccggacacgaatctcgttgcattgatgaaagaggaaggtgtgaagctcttgagggaagccatggggatttacatttcgactcttaagaccgagttcacccagggtatgatcttgcctacgatgaatggcgaatccgtggaccccgtcggccagcctgcactcaagaccgaagagaggaaagcaaaacccgctccttctaaaactcaggccagacctgtgggagtgaagatcccaacttgtaaaatcaccctgaaggaaacgttcctaacctcccctgaggagttatacagggtctttacaacccaggagctggtacaggctttcacccatgccccagcgacactcgaggctgaccgcggaggtaagtttcacatggtcgacgggaatgtaagtggcgaatttaccgatttggtgccagaaaagcacattgttatgaaatggcgatttaagtcctggcctgaaggccactttgccaccatcaccctgaccttcattgacaagaatggcgagacagaactttgcatggagggcagaggcatccccgctccagaagaagagcggacaagacaggggtggcaacgttattacttcgagggcatcaaacaaactttcggctatggtgctcggcttttctag

SEQ ID NO: 172615 - DNA, 1017 bp, Artificial Sequence
  derived and/or modified sequence
atggccaagtggggcgagggcgaccccagatggatcgtggaggagagagccgacgccaccaacgtgaacaactggcactggaccgagagagacgccagcaactggagcaccgacaagctgaagaccctgttcctggccgtgcaggtgcagaacgaggagggcaagtgcgaggtgaccgaggtgagcaagctggacggcgaggccagcatcaacaacagaaagggcaagctgatcttcttctacgagtggagcgtgaagctgaactggaccggcaccagcaagagcggcgtgcagtacaagggccacgtggagatccccaacctgagcgacgagaacagcgtggacgaggtggagatcagcgtgagcctggccaaggacgagcccgacaccaacctggtggccctgatgaaggaggagggcgtgaagctgctgagagaggccatgggcatctacatcagcaccctgaagaccgagttcacccagggcatgatcctgcccaccatgaacggcgagagcgtggaccccgtgggccagcccgccctgaagaccgaggagagaaaggccaagcccgcccccagcaagacccaggccagacccgtgggcgtgaagatccccacctgcaagatcaccctgaaggagaccttcctgaccagccccgaggagctgtacagagtgttcaccacccaggagctggtgcaggccttcacccacgcccccgccaccctggaggccgacagaggcggcaagttccacatggtggacggcaacgtgagcggcgagttcaccgacctggtgcccgagaagcacatcgtgatgaagtggagattcaagagctggcccgagggccacttcgccaccatcaccctgaccttcatcgacaagaacggcgagaccgagctgtgcatggagggcagaggcatccccgcccccgaggaggagagaaccagacagggctggcagagatactacttcgagggcatcaagcagaccttcggctacggcgccagactgttctag

SEQ ID NO: 172616 - protein, 242 aa, Artificial Sequence
  derived and/or modified sequence
MSNPRSLEEEKYDMSGARLALILCVTKAREGSEEDLDALEHMFRQLRFESTMKRDPTAEQFQEELEKFQQAIDSREDPVSCAFVVLMAHGREGFLKGEDGEMVKLENLFEALNNKNCQALRAKPKVYIIQACRGEQRDPGETVGGDEIVMVIKDSPQTIPTYTDALHVYSTVEGYIAYRHDQKGSCFIQTLVDVFTKRKGHILELLTEVTRRMAEAELVQEGKARKTNPEIQSTLRKRLYLQ

SEQ ID NO: 172617 - protein, 250 aa, Artificial Sequence
  derived and/or modified sequence
ALLLAVIQGRPGAQHDVEALGGLCWALGFETTVRTDPTAQAFQEELAQFREQLDTCRGPVSCALVALMAHGGPRGQLLGADGQEVQPEALMQELSRCQVLQGRPKIFLLQACRGGNRDAGVGPTALPWYWSWLRAPPSVPSHADVLQIYAEAQGSSCRGTPPGSSDQADILTVYSAAEGYVAYRDDKGSDFIQTLVEVLRANPGRDLLELLTEVNRRVCEQEVLGPDCDELRKACLEIRSSLRRRLCLQA

SEQ ID NO: 172618 - DNA, 729 bp, Artificial Sequence
  derived and/or modified sequence
atgagcaaccccagaagcctggaggaggagaagtacgacatgagcggcgccagactggccctgatcctgtgcgtgaccaaggccagagagggcagcgaggaggacctggacgccctggagcacatgttcagacagctgagattcgagagcaccatgaagagagaccccaccgccgagcagttccaggaggagctggagaagttccagcaggccatcgacagcagagaggaccccgtgagctgcgccttcgtggtgctgatggcccacggcagagagggcttcctgaagggcgaggacggcgagatggtgaagctggagaacctgttcgaggccctgaacaacaagaactgccaggccctgagagccaagcccaaggtgtacatcatccaggcctgcagaggcgagcagagagaccccggcgagaccgtgggcggcgacgagatcgtgatggtgatcaaggacagcccccagaccatccccacctacaccgacgccctgcacgtgtacagcaccgtggagggctacatcgcctacagacacgaccagaagggcagctgcttcatccagaccctggtggacgtgttcaccaagagaaagggccacatcctggagctgctgaccgaggtgaccagaagaatggccgaggccgagctggtgcaggagggcaaggccagaaagaccaaccccgagatccagagcaccctgagaaagagactgtacctgcagtag

SEQ ID NO: 172619 - DNA, 729 bp, Artificial Sequence
  derived and/or modified sequence
atgtccaaccccaggtctctcgaggaggaaaagtacgatatgagcggggccagactggctctgattctttgcgtaacaaaagctagagagggttctgaagaggacttggacgcactcgagcacatgtttagacaactccggttcgagtccacaatgaagagggatccaacagctgaacagtttcaggaggaattggaaaaatttcagcaggcaatcgacagtcgcgaagatccggttagctgcgcgttcgttgtactgatggcccacggccgggaaggctttctgaaaggagaggatggcgaaatggtaaaactggaaaacctgtttgaagctctgaacaacaaaaattgtcaggctcttagagctaagcctaaggtgtacatcattcaagcatgtcgcggggagcagcgggacccaggcgagactgtaggcggcgacgagattgttatggtgatcaaggactcccctcagacgatccctacctatactgatgcactgcacgtgtattccacagtcgaaggctacatcgcatatcggcacgatcaaaagggaagctgctttatccagacgttagtggacgtgttcactaagaggaaggggcacattctcgagctcctgactgaggtgactagaaggatggccgaagcggagctcgtgcaggaaggcaaggcacgcaagacaaaccccgagatccagagcacgctgagaaaacgcctgtatctacagtag

SEQ ID NO: 172620 - DNA, 729 bp, Artificial Sequence
  derived and/or modified sequence
atgagcaaccccaggagcctggaggaggagaagtatgacatgtctggggcccggctggccctgatcctgtgtgtgaccaaggcccgggagggcagcgaggaggacctggatgccctggagcacatgttccggcagctgcgctttgagagcaccatgaagagggaccccacagctgagcagttccaggaggagctggagaagttccagcaggccatcgacagccgggaggaccctgtgtcctgtgcctttgtggtgctgatggcccacggccgggagggcttcctgaagggggaggatggagagatggtgaagctggagaacctgtttgaggccctgaacaacaagaactgccaggccctgcgggccaagcccaaggtgtacatcatccaggcctgccgcggggagcagagggaccctggagagaccgtgggcggagatgagatcgtgatggtgatcaaggacagcccccagaccatccccacctacacagatgccctgcacgtgtacagcacagtggagggctacatcgcctacagacatgaccagaagggcagctgcttcatccagaccctggtggatgtgttcaccaagaggaagggccacatcctggagctgctgacagaggtgaccaggaggatggccgaggccgagctggtgcaggagggcaaggccaggaagaccaaccctgagatccagagcaccctgaggaagaggctgtacctgcagtag

SEQ ID NO: 172621 - DNA, 729 bp, Artificial Sequence
  derived and/or modified sequence
atgagcaacccccggagcctggaggaggagaagtacgacatgagcggggcaaggttagccctcattttgtgcgtgaccaaggcacgtgagggaagcgaagaggatctggacgccttagagcacatgttcaggcagttaaggttcgagagtactatgaaaagagatcccacagcagagcagttccaagaggaactggagaagtttcagcaggctattgattcacgggaggaccccgtgtcctgtgcctttgttgttctgatggctcatgggcgagaagggtttctgaaaggcgaggatggagagatggtgaagctcgaaaacctatttgaagccctgaacaataagaattgtcaggccctgagagctaagcccaaagtctacattattcaggcatgcagaggagaacagagagatcccggagaaacagtgggcggcgacgagatcgtgatggtgattaaagactcccctcagaccatccctacatataccgacgcactgcacgtgtactccaccgtggagggatacattgcctacagacacgaccaaaagggcagctgcttcatccagaccctggtcgatgtgtttactaaacgcaagggacacattctggagctcctgacggaagtgacacgtaggatggctgaggcagagctggtgcaagaggggaaagctcgtaagactaaccctgagatccagagtaccttgcgcaagaggctgtacctccaatag

SEQ ID NO: 172622 - DNA, 729 bp, Artificial Sequence
  derived and/or modified sequence
atgagcaatccacggtcccttgaggaggaaaagtatgacatgtccggcgcaaggctggccttgattctgtgtgtcaccaaggccagggagggaagcgaagaggacctcgacgccttagagcatatgttccgccagctgagatttgagagtacaatgaagcgagacccgactgcagaacagtttcaggaagaactcgagaagttccaacaagctattgactcaagggaggacccagtctcgtgtgcctttgtggttttaatggcacatggacgggaggggttcctcaagggggaggacggcgagatggtaaagctcgaaaatctgtttgaagccttaaataacaaaaactgccaagcattgagagcaaaacccaaagtctacataattcaggcttgtagaggcgaacagagagatcccggtgagacagtgggtggtgatgagatcgtaatggtgattaaggattcaccacagaccatcccaacctacactgatgccctccacgtttacagcacggtcgaaggctacattgcatacaggcacgatcagaagggttcctgcttcatccagacccttgtagatgtgttcaccaagcgtaaaggccatatcttggagctgctgacagaagtcactcgccgaatggctgaggccgagttggtccaggaagggaaagctaggaagacaaacccggagattcagtcgaccctgagaaaacgactatatctgcaatag

SEQ ID NO: 172623 - DNA, 729 bp, Artificial Sequence
  derived and/or modified sequence
atgtcaaatcctcgatctctggaagaggagaagtatgacatgagcggcgctagactggcactaatcctgtgtgttactaaagcaagggaggggagcgaggaggaccttgacgctctagagcacatgttccggcagctgaggtttgaatcgaccatgaaacgcgatccgactgccgagcagttccaagaggaactcgagaagttccagcaggcgattgatagtagggaggacccagtgagttgtgcctttgtggtgttgatggcacacggacgggaaggattccttaaaggagaagacggagagatggttaaactggaaaacctgtttgaggccctgaacaacaagaattgtcaagccttgcgagccaagcccaaggtgtacataatacaggcctgccgcggggaacagcgggatcctggcgaaacggtcgggggggatgaaatcgtgatggtgattaaagattccccgcagactatcccaacctacaccgatgcactgcatgtttactcaacagttgagggatatattgcctaccgtcacgaccagaagggatcttgtttcattcaaaccctggtggacgttttcacaaaaagaaaaggccatattctggagttgctaaccgaagtgacgcgtagaatggcagaggcagagcttgtgcaagaggggaaggcacggaaaacaaatccagagatccagagcacactgcgaaagaggctttatctccaatag

SEQ ID NO: 172624 - DNA, 729 bp, Artificial Sequence
  derived and/or modified sequence
atgagcaacccccggagcctggaggaggagaagtacgacatgagcggcgcgcggttagcccttatcctctgtgtgaccaaggccagagagggctccgaggaggatctcgacgcacttgaacacatgttcaggcaattaaggtttgagtccaccatgaagcgtgacccaacagcagagcagttccaggaggagttagagaaattccagcaggccattgattcacgagaggatcccgtgtcctgcgcctttgtggtgctcatggcccatggaagggaaggtttcctgaagggcgaagatggggagatggtgaagctcgagaatctgttcgaggccctcaataataagaactgtcaggcacttcgggcaaaaccaaaagtttatattattcaggcctgccggggcgagcagagagaccctggtgaaactgttggtggcgatgaaatcgttatggtcatcaaggattctccgcagaccatccctacctacactgatgctctgcacgtgtacagcacagttgaaggttacatcgcttacaggcatgatcagaagggctcttgctttatccagacacttgtggatgtctttacaaagagaaaaggccacatactcgaactcctgactgaggtcacgcggaggatggcagaggctgagctcgtgcaagagggcaaggctagaaagactaaccccgaaatacagagcacactcagaaaacggctgtacctccagtag

SEQ ID NO: 172625 - DNA, 729 bp, Artificial Sequence
  derived and/or modified sequence
atgtctaatccacggtctctcgaggaggaaaaatatgacatgagcggtgctcgtcttgctctaatcctctgcgtgacaaaggctagggagggatcagaagaagacctggacgcgctagagcatatgttccgccaactacgcttcgagtcaaccatgaagcgcgatcccacagccgagcaatttcaagaggaactcgagaagttccagcaggccatcgattcccgtgaagatcctgtgtcttgtgctttcgtggtgttaatggcacacgggagagaggggtttttgaagggagaggacggcgagatggtcaagttagaaaacctgttcgaggcgctcaataacaaaaattgtcaagctctccgggctaagccgaaggtgtatattattcaggcctgccggggtgagcagagagaccccggagagaccgtgggcggtgacgagatcgtaatggtgatcaaggactctccacagaccattcccacctacaccgatgctttacatgtctatagtactgtggaagggtatatagcctaccgccatgatcagaaaggctcttgctttatacagacactggtggacgtgtttacgaagaggaaagggcatatcctggagctgctgacagaagtgacaagacgcatggccgaggctgagttagtgcaggagggaaaggcacgcaaaacaaatccagagatacaaagcacactgcggaagaggctctacctccagtag

SEQ ID NO: 172626 - DNA, 777 bp, Artificial Sequence
  derived and/or modified sequence
aggatcagacaagggtgctgagagccgggactcacaaccaaaggagaaatgagcaatccgcggtctttggaagaggagaaatatgatatgtcaggtgcccgcctggccctaatactgtgtgtcaccaaagcccgggaaggttccgaagaagacctggatgctctggaacacatgtttcggcagctgagattcgaaagcaccatgaaaagagaccccactgccgagcaattccaggaagagctggaaaaattccagcaggccatcgattcccgggaagatcccgtcagttgtgccttcgtggtactcatggctcacgggagggaaggcttcctcaagggagaagatggggagatggtcaagctggagaatctcttcgaggccctgaacaacaagaactgccaggccctgcgagctaagcccaaggtgtacatcatacaggcctgtcgaggagaacaaagggaccccggtgaaacagtaggtggagatgagattgtgatggtcatcaaagacagcccacaaaccatcccaacatacacagatgccttgcacgtttattccacggtagagggatacatcgcctaccgacatgatcagaaaggctcatgctttatccagaccctggtggatgtgttcacgaagaggaaaggacatatcttggaacttctgacagaggtgacccggcggatggcagaagcagagctggttcaagaaggaaaagcaaggaaaacgaaccctgaaatccaaagcaccctccggaaacggctgtatctgcagtag

SEQ ID NO: 172627 - DNA, 941 bp, Artificial Sequence
  derived and/or modified sequence
atagaccaggcttctcaggagaaaccccgggagattccacactgtcagccccttctccaagatcagtacgtgggcctgactcctcctcggtgcccagctcagtattggcaactaggagagtagtgagattgaacttggccttgaggaacagctgcctctagagttggatcagacaagggtgctgagagccgggactcacaaccaaaggagaaatgagcaatccgcggtctttggaagaggagaaatatgatatgtcaggtgcccgcctggccctaatactgtgtgtcaccaaagcccgggaaggttccgaagaagacctggatgctctggaacacatgtttcggcagctgagattcgaaagcaccatgaaaagagaccccactgccgagcaattccaggaagagctggaaaaattccagcaggccatcgattcccgggaagatcccgtcagttgtgccttcgtggtactcatggctcacgggagggaaggcttcctcaagggagaagatggggagatggtcaagctggagaatctcttcgaggccctgaacaacaagaactgccaggccctgcgagctaagcccaaggtgtacatcatacaggcctgtcgaggagaacaaagggaccccggtgaaacagtaggtggagatgagattgtgatggtcatcaaagacagcccacaaaccatcccaacatacacagatgccttgcacgtttattccacggtagagggatacatcgcctaccgacatgatcagaaaggctcatgctttatccagaccctggtggatgtgttcacgaagaggaaaggacatatcttggaacttctgacagaggtgacccggcggatggcagaagcagagctggttcaagaaggaaaagcaaggaaaacgaaccctgaaatccaaagcaccctccggaaacggctgtatctgcagtag

SEQ ID NO: 172628 - DNA, 753 bp, Artificial Sequence
  derived and/or modified sequence
gccctgctgctggccgtgatccagggcagacccggcgcccagcacgacgtggaggccctgggcggcctgtgctgggccctgggcttcgagaccaccgtgagaaccgaccccaccgcccaggccttccaggaggagctggcccagttcagagagcagctggacacctgcagaggccccgtgagctgcgccctggtggccctgatggcccacggcggccccagaggccagctgctgggcgccgacggccaggaggtgcagcccgaggccctgatgcaggagctgagcagatgccaggtgctgcagggcagacccaagatcttcctgctgcaggcctgcagaggcggcaacagagacgccggcgtgggccccaccgccctgccctggtactggagctggctgagagccccccccagcgtgcccagccacgccgacgtgctgcagatctacgccgaggcccagggcagcagctgcagaggcaccccccccggcagcagcgaccaggccgacatcctgaccgtgtacagcgccgccgagggctacgtggcctacagagacgacaagggcagcgacttcatccagaccctggtggaggtgctgagagccaaccccggcagagacctgctggagctgctgaccgaggtgaacagaagagtgtgcgagcaggaggtgctgggccccgactgcgacgagctgagaaaggcctgcctggagatcagaagcagcctgagaagaagactgtgcctgcaggcctag

SEQ ID NO: 172629 - DNA, 753 bp, Artificial Sequence
  derived and/or modified sequence
gcgctcttactagccgtgatccagggcagacccggcgctcagcacgatgtcgaagcgttaggcgggctctgctgggccttgggttttgaaaccactgtacggactgatccaacagcccaagcatttcaagaggagctggcacaatttcgggagcagctggacacctgtcggggccctgtgtcctgcgccctcgttgctcttatggctcacggtggacctaggggtcagttgctcggggctgatgggcaggaagtgcagccggaagccctgatgcaggaattatctagatgtcaggtgctacaggggaggccgaaaatcttcttgctgcaggcctgtcgagggggcaatcgcgatgctggggtgggccccactgccttgccatggtattggtcgtggttaagagcccccccaagcgtgccctcccacgccgatgtgctgcagatctacgccgaagcccaggggagctcatgcagaggcaccccccccggttcaagcgaccaggctgacatactgactgtctattccgccgccgaggggtacgttgcctatcgagacgacaaggggagcgatttcattcagacactggtggaagttctgcgcgccaacccgggtagagatcttctggaattactgaccgaggtgaacaggcgggtttgcgagcaggaggtgcttgggccagactgcgacgagctccgcaaggcttgcctcgaaatcaggtccagtttgcgcaggcgactgtgtctccaagcctag

SEQ ID NO: 172630 - DNA, 753 bp, Artificial Sequence
  derived and/or modified sequence
gccctgctgctggccgtcatccagggccggcctggggcccagcatgatgtggaggccctgggcggcctgtgctgggccctgggctttgagaccaccgtgaggacagaccccacagcccaggccttccaggaggagctggcccagttccgggagcagctggacacctgccggggccctgtgtcctgtgccctggtggccctgatggcccacggcggcccccggggccagctgctgggcgcagatggccaggaggtgcagcctgaggccctgatgcaggagctgagccgctgccaggtgctgcagggccggcccaagatcttcctgctgcaggcctgccggggcggcaacagagatgctggggtgggccccacagccctgccctggtactggagctggctgcgggccccacccagcgtgcccagccatgctgatgtgctgcagatctatgcagaggcccagggcagcagctgccggggcaccccacctggcagcagtgaccaggccgacatcctgactgtgtacagcgctgctgagggctacgtggcctacagagatgacaagggcagtgacttcatccagaccctggtggaggtgctgcgggccaaccctggccgggacctgctggagctgctgacagaggtgaacagaagagtgtgtgagcaggaggtgctgggccctgactgtgatgagctgaggaaggcctgcctggagatccgcagcagcctgcggcggcggctgtgcctgcaggcctag

SEQ ID NO: 172631 - DNA, 753 bp, Artificial Sequence
  derived and/or modified sequence
gccctgctgctggccgtgatccagggccggcccggcgcccagcacgatgtcgaagcactgggcggtctgtgttgggccttggggttcgagaccacagtgaggacagaccccaccgcccaagctttccaagaagaactcgcccagttccgggagcagttggacacttgtagaggcccagtctcttgcgccctggttgccctgatggcgcatggcggacctcggggccagctactcggtgcggacggacaggaagttcagccagaggctcttatgcaagagctgtctcgttgccaagtgctgcagggccgtccaaagatctttctcctgcaggcatgccgcggtggcaatcgcgatgccggcgtgggccctacagcactgccttggtattggagttggctgagagctccccctagcgtgccgtcccacgccgacgtgctgcaaatctatgcagaggcccaggggagttcttgcaggggcactccccctggcagcagcgatcaagccgatattctcactgtctattccgctgccgaaggctatgtcgcttatcgggacgacaaagggagcgatttcatccagaccctcgtcgaagttcttcgggcgaatccagggagagacctgcttgaattgctgacggaggtgaatcggagggtttgtgaacaggaagtactcggacccgactgcgacgaactacgcaaggcttgcctggagatcaggtcttccttgaggcgacggctttgtctccaggcatag

SEQ ID NO: 172632 - DNA, 753 bp, Artificial Sequence
  derived and/or modified sequence
gcattactgcttgctgtgatacaaggcagaccaggcgctcagcatgatgtcgaggcgctcggcggactgtgctgggctctgggtttcgagacaactgttagaaccgatccgacggcccaagctttccaagaggaactggcacagttccgcgagcagttggacacatgccggggtccagttagttgcgctctggtcgcgctgatggcccacgggggacctcgcggtcaactgcttggagctgatgggcaagaggtgcaacccgaggctctgatgcaggagctatctcggtgccaagttttgcagggtagacctaaaatttttcttctccaagcctgtcggggaggaaaccgggacgccggtgtcgggcctaccgccctcccatggtactggtcatggctaagagccccaccatcagtcccttctcacgccgacgtcctgcaaatctacgctgaagcgcagggatcatcctgccggggtactcccccaggctcctcagatcaggccgatattttaactgtctattctgcagctgaggggtatgtggcatacagagacgacaaaggctccgatttcatacagacccttgtcgaggttttgcgagcaaatcctggaagggaccttctggaactgctcactgaggttaacagacgcgtgtgcgaacaggaagtgctcgggccagactgcgacgagctgcggaaggcctgcttggagataagaagcagtttaagacggcgtctttgtctgcaggcttag

SEQ ID NO: 172633 - DNA, 1433 bp, Artificial Sequence
  derived and/or modified sequence
ggccgctgtagtcactgccctggaggacgtgttccaggccctgggctttgagagctgcgagaggagggaggtcccggtccagggcttcctcgaggaactggcttggttccaggagcagctggatgcccacgggcgccctgtggggtgtgccttagtggccttgatgcccccagagggcagctgaggcagccacagcagctggtccgggagctgagcggctgccgggccctgcggggctgccccaaagtcttcctgctgctctcaagtggtcctgggtcctccctggagcccggagccttccttgctggcctgagagagctgtgtggccgctctcctcactggtccctggtgcagctgctgacgaagctcttccgcagggtggctgaagagtccgcagggggcacctgctgccccgtccttcggagctccttgaggggggcactgtgcctgggaggcgtggagccctggaggcctgagccggcccccggtcccagcacacagtatgacctgtccaaggccagggctgccctcctcctggctgtgatccaaggccggcctggggcccagcatgacgtggaggcgctggggggcctgtgctgggccctgggctttgagaccaccgtgagaacggaccctacagcccaggctttccaggaggagctggcccagttccgggagcaactggacacctgcaggggccctgtgagctgtgcccttgtggccctgatggcccatgggggaccacggggtcagctgctgggggctgacgggcaagaggtgcagcccgaggcactcatgcaggagctgagccgctgccaggtgctgcagggccgccccaagatcttcctgttgcaggcctgccgtgggggaaacagggatgctggtgtggggcccacagctctcccctggtactggagctggctgcgggcacctccatctgtcccctcccatgcagatgtcctgcagatctacgctgaggcccaaggcagctcctgcaggggcacccctccagggagctctgaccaagcagacatcctgacggtctactcagccgcagagggctatgtggcctatcgcgatgacaagggctcagactttatccagacactggtggaggtcctcagagccaaccccgggagagaccttctggagctgctgactgaggtcaacaggcgggtgtgcgagcaggaggtgctgggccccgactgcgatgaactccgcaaggcctgcctggagatccgcagctcgctccggcgccggctctgcctccaggcctgagggtgcggcggccacgggggcgctgctgagacggtggccagatcccagcgccattcttgcctccatccaccccccatccccccggtttcctcatctgagagcgaggcgtggcagcgtgggggtggccgtgcaataaatatctgccgtgaacagtg

SEQ ID NO: 172634 - protein, 431 aa, Artificial Sequence
  derived and/or modified sequence
MFHSPRRLCSALLQRDAPGLRRLPAPGLRRPLSPPAAVPRPASPRLLAAASAASGAARSCSRTVCSMGTGTSRLYSALAKTLNSSAASQHPEYLVSPDPEHLEPIDPKELLEECRAVLHTRPPRFQRDFVDLRTDCPSTHPPIRVMQWNILAQALGEGKDNFVQCPVEALKWEERKCLILEEILAYQPDILCLQEVDHYFDTFQPLLSRLGYQGTFFPKPWSPCLDVEHNNGPDGCALFFLQNRFKLVNSANIRLTAMTLKTNQVAIAQTLECKESGRQFCIAVTHLKARTGWERFRSAQGCDLLQNLQNITQGAKIPLIVCGDFNAEPTEEVYKHFASSSLNLNSAYKLLSADGQSEPPYTTWKIRTSGECRHTLDYIWYSKHALNVRSALDLLTEEQIGPNRLPSFNYPSDHLSLVCDFSFTEESDGLS

SEQ ID NO: 172635 - DNA, 1296 bp, Artificial Sequence
  derived and/or modified sequence
atgtttcattccccgcgaaggctgtgttctgccctcttgcagcgggacgctcctggactgaggcgcctgcccgcacccgggcttcgccgtcctctttcccctccagccgccgtgcctcgccccgcctcacctagactcctggctgcagccagcgctgcctctggcgctgccagatcatgttcaagaaccgtgtgctctatgggcactggcaccagccgcctgtacagcgcgctcgccaagactctgaacagcagcgctgcctcacaacatcccgagtacctcgtgtcccccgaccctgagcatttggagccaattgaccccaaggagcttctcgaagagtgtcgcgccgtgctgcacacccgccctcccaggttccaacgcgacttcgtggacctgcgcactgactgcccatcaactcacccccctatccgggtcatgcagtggaacatccttgctcaggccctcggcgagggaaaagacaactttgtccaatgccccgtagaggccctgaagtgggaggagcggaagtgcctgatactggaggagatcctggcctaccagcctgatatcctctgcttacaggaggtagaccattactttgatacattccaaccgctactcagtcgcctcgggtaccaagggacctttttccccaaaccatggagcccttgccttgatgttgaacataacaatggccccgatgggtgtgccttgttcttcctccagaataggttcaaactggtcaacagcgctaatatcaggctcaccgcaatgaccctgaagaccaatcaggtcgccattgcccaaacactggagtgtaaagaatcgggtagacaattttgcatcgcggtcacccatttgaaggccaggactggctgggagcggttccgttcggcccagggttgcgatctgctacagaatctccagaacattacacagggtgctaagattcccctgattgtatgtggcgactttaacgcggagccgaccgaggaagtgtacaagcattttgcctcctcgagtctgaacctgaactccgcatacaaactgctctctgccgacggccagagcgagcctccgtacactacttggaaaatccgaactagcggggagtgtcgccacactctggattacatatggtatagcaagcatgcattaaacgtgagatcggcccttgacttgttgacagaggaacaaatcggtcccaatcgactgccatcctttaattatccgtccgaccacctctcgcttgtatgtgacttttccttcacagaggagagtgatggactatcctag

SEQ ID NO: 172636 - DNA, 1296 bp, Artificial Sequence
  derived and/or modified sequence
atgttccacagcccccggcggctgtgcagcgccctgctgcagagagatgcccctggcctgcggcggctgcctgcccctggcctgcggcggcccctgagccccccagctgctgtgcccaggcctgccagcccccggctgctggccgccgccagcgctgccagcggggccgcccggagctgcagcaggacagtgtgcagcatgggcaccggcaccagccggctgtacagcgccctggccaagaccctgaacagcagcgctgccagccagcaccctgagtacctggtgtccccagaccctgagcacctggagcccatcgaccccaaggagctgctggaggagtgcagagctgtgctgcacacccggcccccacgcttccagagggactttgtggacctgaggacagactgccccagcacccacccccccatccgggtgatgcagtggaacatcctggcccaggccctgggggagggcaaggacaactttgtgcagtgccctgtggaggccctgaagtgggaggagaggaagtgcctgatcctggaggagatcctggcctaccagcctgacatcctgtgcctgcaggaggtggaccactactttgacaccttccagcccctgctgagccggctgggctaccagggcaccttcttccccaagccctggagcccctgcctggatgtggagcacaacaatggaccagatggctgtgccctcttcttcctgcagaaccgcttcaagctggtgaacagcgccaacatccggctgacagccatgaccctgaagaccaaccaggtggccatcgcccagaccctggagtgcaaggagagcggccggcagttctgcatcgctgtgacccacctgaaggccaggacaggctgggagcgcttccgcagcgcccagggctgtgacctgctgcagaacctgcagaacatcacccagggcgccaagatccccctcatcgtgtgtggggacttcaatgctgagcccacagaggaggtgtacaagcactttgccagcagcagcctgaacctgaacagcgcctacaagctgctgtctgcagatggccagagcgagcccccctacaccacctggaagatccgcaccagcggagaatgtcgccacaccctggactacatctggtacagcaagcacgccctgaatgtgcgcagcgccctggacctgctgacagaggagcagatcggccccaaccggctgcccagcttcaactaccccagcgaccacctgagcctggtgtgtgacttctccttcacagaggagagtgatggcctgtcctag

SEQ ID NO: 172637 - DNA, 1296 bp, Artificial Sequence
  derived and/or modified sequence
atgttccacagcccccggcggctgtgcagcgccctgctgcagcgggacgcacctggcttgcgccgactgccagcccctggcctccgccgcccattgtctccaccagccgcagtccccaggcccgcttccccgcggctgttagccgccgcctctgctgcctcaggagcagccagaagttgctctcgcacagtctgcagtatggggaccggtacttccaggctctactccgcattggcaaaaactttgaactcatccgcagcctcccaacatcctgagtatctagttagcccagatccagaacatttggagccaattgatcccaaagagctgctggaagagtgcagggctgttctccatactagaccaccaaggtttcagagggacttcgtggacctgagaacagactgtccaagtactcacccccccattagggtgatgcagtggaatatactggcccaggcccttggcgagggtaaagataactttgtgcagtgtcccgtggaggctcttaagtgggaggagcgcaagtgtctcatcctggaggaaattctggcatatcaaccagatattctctgcttgcaagaggtggaccactactttgacaccttccagcccctgttgtcacgcctgggctatcagggcacattttttccgaagccatggtctccctgcttggatgtcgagcataacaacggaccagacggatgtgcgctgttcttcctccagaaccggtttaagctcgtcaattcggccaatatcagactgacggcaatgactctgaagaccaatcaggtggccatcgctcagacacttgagtgcaaggagtctggacgccagttctgcatcgcagtgacacacctgaaggctcgcaccggctgggaaagattccggagcgcacaaggctgtgacctccttcagaacctgcagaacatcactcagggcgctaaaattcccctgattgtgtgcggagacttcaatgcggagccaactgaggaggtgtataagcacttcgcatcaagctccttaaacctcaatagcgcctacaagctccttagcgctgacggacagagcgagccaccctataccacatggaagatccggacatcgggggaatgccggcacactctcgactatatctggtacagcaagcacgccctgaatgtgcgatctgctctcgatctgcttacggaggaacagatcggccctaaccgtcttccgagctttaactacccctcagaccacctttctctggtgtgcgatttttcctttacagaggagtccgacggactgagctag

SEQ ID NO: 172638 - DNA, 1296 bp, Artificial Sequence
  derived and/or modified sequence
atgttccattctccacggcgtctctgttctgcactgctgcagcgagacgcacccggacttagacgacttcctgctcctggtctgcggcgtccacttagtcctcctgccgcagtcccaaggcccgctagcccaaggctgttggcagccgcaagcgccgcttctggggctgcgagaagttgttctcgtaccgtttgctccatgggtaccggcacctcacggctgtacagcgcactcgccaagaccttgaacagcagcgcggcaagccagcaccctgagtacctggtctctcccgatcctgaacacctggagcccatcgacccgaaagagctgctggaggagtgccgggctgtactccacacccggccaccgaggtttcaacgagactttgttgaccttaggaccgattgtccctctacccatcctccaataagggtgatgcaatggaacatcctggcacaggccttgggggagggtaaggacaattttgtgcaatgtcccgtggaagccctgaaatgggaggagaggaagtgcttaatcttggaagagatcctggcttaccaaccagacattctgtgcctacaggaagtggatcactattttgacacttttcagcccctgctgagtcgactgggctatcagggcaccttctttccgaagccctggtcaccctgcctggatgtcgaacacaataacggcccagatggctgtgccctgttttttctacagaatcggttcaaattggtgaacagcgccaacatcagactcacagccatgacacttaaaaccaatcaggtggctatcgctcagaccttagaatgtaaggaaagcggtaggcagttttgcatagcagtgacccatctgaaggcacgcactggttgggaacgttttaggtccgcccagggatgcgaccttctacagaacctgcagaatatcacacaaggtgcaaaaatccctttgatcgtatgcggggactttaacgccgagcctactgaggaggtatacaaacatttcgccagttctagcctcaatttgaatagcgcctataagctgctttcggcagacggacaaagcgaacccccttacaccacgtggaagattcgcaccagcggtgagtgcaggcatacactggattatatttggtacagcaagcacgctctgaatgtgcggtcagctctggatcttctaactgaggagcagataggcccaaaccgactgcccagtttcaactatccctcagatcacctgtctctggtgtgcgacttctcatttacggaggagtcagacggtctgagctag

SEQ ID NO: 172639 - DNA, 1767 bp, Artificial Sequence
  derived and/or modified sequence
ccgacgcagcggtgttgcacctccctctccggctctgctgcccgggatttccccagaacctgcgccgcgcgagaaggagcctgggagcatccgcccacactgcccggacagtcggctcgactcggtgccctcggccccagccgggctccgctcctcgggcgcgcgaggggccgtggtggcggcggcgcccggcatgtttcatagtccgcggcggctctgctcggccctgctgcagagggacgcgcccggcctgcgccgcctgcccgccccagggctgcgccgcccgttgtccccgccggctgctgttcccaggcccgcatccccccggctgctggcggcggcctcggcggcctcgggcgccgcgaggtcgtgttcccgaacagtgtgttccatgggaaccggtacaagcagactctatagtgctctcgccaagacactgaacagcagcgctgcctcccagcacccagagtatttggtgtcacctgacccagagcatctggagcccattgatcctaaagagcttcttgaggaatgcagggccgtcctgcacacccgacctccccggttccagagggattttgtggatctgaggacagattgccctagtacccacccacctatcagggttatgcaatggaacatcctcgcccaagctcttggagaaggcaaagacaactttgtacagtgccctgttgaagcactcaaatgggaagaaaggaaatgtctcatcctggaagaaatcctggcctaccagcctgatatattgtgcctccaagaggtggaccactattttgacaccttccagccactcctcagtagactaggctatcaaggcacgtttttccccaaaccctggtcaccttgtctagatgtagaacacaacaatggaccagatggttgtgccttattttttcttcaaaaccgattcaagctagtcaacagtgccaatattaggctgacagccatgacattgaaaaccaaccaggtggccattgcacagaccctggagtgcaaggagtcaggccgacagttctgcatcgctgttacccatctaaaagcacgcactggctgggagcggtttcgatcagctcaaggctgtgacctccttcagaacctgcaaaacatcacccaaggagccaagattccccttattgtgtgtggggacttcaatgcagagccaacagaagaggtctacaaacactttgcttcctccagcctcaacctgaacagcgcctacaagctgctgagtgctgatgggcagtcagaacccccatacactacctggaagatccggacctcaggggagtgcaggcacaccctggattacatctggtattctaaacatgctctaaatgtaaggtcagctctcgatctgctcactgaagaacagattggacccaacaggttaccttccttcaattatccttcagaccacctgtctctagtgtgtgacttcagctttactgaggaatctgatggactttcataaatacttgcttttgtctttttaatcacaggagtctatttttttttttttttttttttttttgagacagagtctcgctctgttgcctaggctggagtacagtggcctgatctcggctcactgcaagatccgcctcccgggttcatggcattctcctgcctcagcctccagagcaactgggacaacaggcgcccgtcaccacgcccagctaattttttgtatttttagtagagacggggtttcaccgtgttagccaggatggtctcgatctcctgaccttg

SEQ ID NO: 172640 - DNA, 1296 bp, Artificial Sequence
  derived and/or modified sequence
atgttccacagccccagaagactgtgcagcgccctgctgcagagagacgcccccggcctgagaagactgcccgcccccggcctgagaagacccctgagcccccccgccgccgtgcccagacccgccagccccagactgctggccgccgccagcgccgccagcggcgccgccagaagctgcagcagaaccgtgtgcagcatgggcaccggcaccagcagactgtacagcgccctggccaagaccctgaacagcagcgccgccagccagcaccccgagtacctggtgagccccgaccccgagcacctggagcccatcgaccccaaggagctgctggaggagtgcagagccgtgctgcacaccagaccccccagattccagagagacttcgtggacctgagaaccgactgccccagcacccacccccccatcagagtgatgcagtggaacatcctggcccaggccctgggcgagggcaaggacaacttcgtgcagtgccccgtggaggccctgaagtgggaggagagaaagtgcctgatcctggaggagatcctggcctaccagcccgacatcctgtgcctgcaggaggtggaccactacttcgacaccttccagcccctgctgagcagactgggctaccagggcaccttcttccccaagccctggagcccctgcctggacgtggagcacaacaacggccccgacggctgcgccctgttcttcctgcagaacagattcaagctggtgaacagcgccaacatcagactgaccgccatgaccctgaagaccaaccaggtggccatcgcccagaccctggagtgcaaggagagcggcagacagttctgcatcgccgtgacccacctgaaggccagaaccggctgggagagattcagaagcgcccagggctgcgacctgctgcagaacctgcagaacatcacccagggcgccaagatccccctgatcgtgtgcggcgacttcaacgccgagcccaccgaggaggtgtacaagcacttcgccagcagcagcctgaacctgaacagcgcctacaagctgctgagcgccgacggccagagcgagcccccctacaccacctggaagatcagaaccagcggcgagtgcagacacaccctggactacatctggtacagcaagcacgccctgaacgtgagaagcgccctggacctgctgaccgaggagcagatcggccccaacagactgcccagcttcaactaccccagcgaccacctgagcctggtgtgcgacttcagcttcaccgaggagagcgacggcctgagctag

SEQ ID NO: 172641 - protein, 450 aa, Artificial Sequence
  derived and/or modified sequence
MDQYCILGRIGEGAHGIVFKAKHVETGEIVALKKVALRRLEDGFPNQALREIKALQEMEDNQYVVQLKAVFPHGGGFVLAFEFMLSDLAEVVRHAQRPLAQAQVKSYLQMLLKGVAFCHANNIVHRDLKPANLLISASGQLKIADFGLARVFSPDGSRLYTHQVATRSVGCIMGELLNGSPLFPGKNDIEQLCYVLRILGTPNPQVWPELTELPDYNKISFKEQVPMPLEEVLPDVSPQALDLLGQFLLYPPHQRIAASKALLHQYFFTAPLPAHPSELPIPQRLGGPAPKAHPGPPHIHDFHVDRPLEVAVEPRADSALHPGGVRSWPWSRLPAPQDHSVHLFLCHLPGFTLQGLPMATVGPHHTLPLSPCEGWSRGRGHVPSQEYENIQSSRGDSWPVLGEPYLLCATDVPIRTVSSAASQGLHMQNDDACLGAAPECCLLVKEKCRE

SEQ ID NO: 172642 - protein, 325 aa, Artificial Sequence
  derived and/or modified sequence
MDQYCILGRIGEGAHGIVFKAKHVETGEIVALKKVALRRLEDGFPNQALREIKALQEMEDNQYVVQLKAVFPHGGGFVLAFEFMLSDLAEVVRHAQRPLAQAQVKSYLQMLLKGVAFCHANNIVHRDLKPANLLISASGQLKIADFGLARVFSPDGSRLYTHQVATRSVGCIMGELLNGSPLFPGKNDIEQLCYVLRILGTPNPQVWPELTELPDYNKISFKEQVPMPLEEVLPDVSPQALDLLGQFLLYPPHQRIAASKALLHQYFFTAPLPAHPSELPIPQRLGGPAPKAHPGPPHIHDFHVDRPLEESLLNPELIRPFILEG

SEQ ID NO: 172643 - DNA, 1687 bp, Artificial Sequence
  derived and/or modified sequence
gggggcgggggcagataggaggtgcctgctgtcatcgttccgtgggccctgctgcgggcacgctctcggcgcatgcgttttttatgcgggattaagcttgctgctgcgtgacagcggagggctaggaaaaggcgcagtggggcccggagctgtcacccctgactcgacgcagcttccgttctcctggtgacgtcgcctacaggaaccgccccagtggtcagctgccgcgctgttgctaggcaacagcgtgcgagctcagatcagcgtggggtggaggagaagtggagtttggaagttcaggggcacaggggcacaggcccacgactgcagcgggatggaccagtactgcatcctgggccgcatcggggagggcgcccacggcatcgtcttcaaggccaagcacgtggagactggcgagatagttgccctcaagaaggtggccctaaggcggttggaggacggcttccctaaccaggccctgcgggagattaaggctctgcaggagatggaggacaatcagtatgtggtacaactgaaggctgtgttcccacacggtggaggctttgtgctggcctttgagttcatgctgtcggatctggccgaggtggtgcgccatgcccagaggccactagcccaggcacaggtcaagagctacctgcagatgctgctcaagggtgtcgccttctgccatgccaacaacattgtacatcgggacctgaaacctgccaacctgctcatcagcgcctcaggccagctcaagatagcggactttggcctggctcgagtcttttccccagacggcagccgcctctacacacaccaggtggccaccaggtctgtgggctgcatcatgggggagctgttgaatgggtccccccttttcccgggcaagaacgatattgaacagctttgctatgtgcttcgcatcttgggcaccccaaaccctcaagtctggccggagctcactgagctgccggactacaacaagatctcctttaaggagcaggtgcccatgcccctggaggaggtgctgcctgacgtctctccccaggcattggatctgctgggtcaattccttctctaccctcctcaccagcgcatcgcagcttccaaggctctcctccatcagtacttcttcacagctcccctgcctgcccatccatctgagctgccgattcctcagcgtctagggggacctgcccccaaggcccatccagggcccccccacatccatgacttccacgtggaccggcctcttgaggtcgctgttgaacccagagctgattcggcccttcatcctggaggggtgagaagttggccctggtcccgtctgcctgctcctcaggaccactcagtccacctgttcctctgccacctgcctggcttcaccctccaaggcctccccatggccacagtgggcccacaccacaccctgccccttagcccttgcgagggttggtctcgaggcagaggtcatgttcccagccaagagtatgagaacatccagtcgagcagaggagattcatggcctgtgctcggtgagccttaccttctgtgtgctactgacgtacccatcaggacagtgagctctgctgccagtcaaggcctgcatatgcagaatgacgatgcctgccttggtgctgctcccgagtgctgcctcctggtcaaggagaagtgcagagagtaa

SEQ ID NO: 172644 - DNA, 2301 bp, Artificial Sequence
  derived and/or modified sequence
gctgtcatcgttccgtgggccctgctgcgggcacgctctcggcgcatgcgttttttatgcgggattaagcttgctgctgcgtgacagcggagggctaggaaaaggcgcagtggggcccggagctgtcacccctgactcgacgcagcttccgttctcctggtgacgtcgcctacaggaaccgccccagtggtcagctgccgcgctgttgctaggcaacagcgtgcgagctcagatcagcgtggggtggaggagaagtggagtttggaagttcaggggcacaggggcacaggcccacgactgcagcgggatggaccagtactgcatcctgggccgcatcggggagggcgcccacggcatcgtcttcaaggccaagcacgtggagactggcgagatagttgccctcaagaaggtggccctaaggcggttggaggacggcttccctaaccaggccctgcgggagattaaggctctgcaggagatggaggacaatcagtatgtggtacaactgaaggctgtgttcccacacggtggaggctttgtgctggcctttgagttcatgctgtcggatctggccgaggtggtgcgccatgcccagaggccactagcccaggcacaggtcaagagctacctgcagatgctgctcaagggtgtcgccttctgccatgccaacaacattgtacatcgggacctgaaacctgccaacctgctcatcagcgcctcaggccagctcaagatagcggactttggcctggctcgagtcttttccccagacggcagccgcctctacacacaccaggtggccaccaggtctgtgggctgcatcatgggggagctgttgaatgggtccccccttttcccgggcaagaacgatattgaacagctttgctatgtgcttcgcatcttgggcaccccaaaccctcaagtctggccggagctcactgagctgccggactacaacaagatctcctttaaggagcaggtgcccatgcccctggaggaggtgctgcctgacgtctctccccaggcattggatctgctgggtcaattccttctctaccctcctcaccagcgcatcgcagcttccaaggctctcctccatcagtacttcttcacagctcccctgcctgcccatccatctgagctgccgattcctcagcgtctagggggacctgcccccaaggcccatccagggcccccccacatccatgacttccacgtggaccggcctcttgaggagtcgctgttgaacccagagctgattcggcccttcatcctggaggggtgagaagttggccctggtcccgtctgcctgctcctcaggaccactcagtccacctgttcctctgccacctgcctggcttcaccctccaaggcctccccatggccacagtgggcccacaccacaccctgccccttagcccttgcgagggttggtctcgaggcagaggtcatgttcccagccaagagtatgagaacatccagtcgagcagaggagattcatggcctgtgctcggtgagccttaccttctgtgtgctactgacgtacccatcaggacagtgagctctgctgccagtcaaggcctgcatatgcagaatgacgatgcctgccttggtgctgcttccccgagtgctgcctcctggtcaaggagaagtgcagagagtaaggtgtccttatgttggaaactcaagtggaaggaagatttggtttggttttattctcagagccattaaacactagttcagtatgtgagatatagattctaaaaacctcaggtggctctgccttatgtctgttcctccttcatttctctcaagggaaatggctaaggtggcattgtctcatggctctcgtttttggggtcatggggagggtagcaccaggcatagccacttttgccctgagggactcctgtgtacttcacatcactgagcactcatttagaagtgagggagacagaagtctaggcccagggatggctccagttggggatccagcaggagaccctctgcacatgaggctggtttaccaacatctactccctcaggatgagcgtgagccagaagcagctgtgtatttaaggaaacaagcgttcctggaattaatttataaatttaataaatcccaatataatcccagctagtgctttttccttattataatttgataaggtgattataaaagatacatggaaggaagtggaaccagatgcagaagaggaaatgatggaaggacttacggtatcagataccaatatttaaaagtttgtataataataaagagtatgattgtggttcaaggat

SEQ ID NO: 172645 - DNA, 1353 bp, Artificial Sequence
  derived and/or modified sequence
atggaccagtactgcatcctgggcagaatcggcgagggcgcccacggcatcgtgttcaaggccaagcacgtggagaccggcgagatcgtggccctgaagaaggtggccctgagaagactggaggacggcttccccaaccaggccctgagagagatcaaggccctgcaggagatggaggacaaccagtacgtggtgcagctgaaggccgtgttcccccacggcggcggcttcgtgctggccttcgagttcatgctgagcgacctggccgaggtggtgagacacgcccagagacccctggcccaggcccaggtgaagagctacctgcagatgctgctgaagggcgtggccttctgccacgccaacaacatcgtgcacagagacctgaagcccgccaacctgctgatcagcgccagcggccagctgaagatcgccgacttcggcctggccagagtgttcagccccgacggcagcagactgtacacccaccaggtggccaccagaagcgtgggctgcatcatgggcgagctgctgaacggcagccccctgttccccggcaagaacgacatcgagcagctgtgctacgtgctgagaatcctgggcacccccaacccccaggtgtggcccgagctgaccgagctgcccgactacaacaagatcagcttcaaggagcaggtgcccatgcccctggaggaggtgctgcccgacgtgagcccccaggccctggacctgctgggccagttcctgctgtaccccccccaccagagaatcgccgccagcaaggccctgctgcaccagtacttcttcaccgcccccctgcccgcccaccccagcgagctgcccatcccccagagactgggcggccccgcccccaaggcccaccccggccccccccacatccacgacttccacgtggacagacccctggaggtggccgtggagcccagagccgacagcgccctgcaccccggcggcgtgagaagctggccctggagcagactgcccgccccccaggaccacagcgtgcacctgttcctgtgccacctgcccggcttcaccctgcagggcctgcccatggccaccgtgggcccccaccacaccctgcccctgagcccctgcgagggctggagcagaggcagaggccacgtgcccagccaggagtacgagaacatccagagcagcagaggcgacagctggcccgtgctgggcgagccctacctgctgtgcgccaccgacgtgcccatcagaaccgtgagcagcgccgccagccagggcctgcacatgcagaacgacgacgcctgcctgggcgccgcccccgagtgctgcctgctggtgaaggagaagtgcagagagtag

SEQ ID NO: 172646 - DNA, 978 bp, Artificial Sequence
  derived and/or modified sequence
atggaccagtactgcatcctgggcagaatcggcgagggcgcccacggcatcgtgttcaaggccaagcacgtggagaccggcgagatcgtggccctgaagaaggtggccctgagaagactggaggacggcttccccaaccaggccctgagagagatcaaggccctgcaggagatggaggacaaccagtacgtggtgcagctgaaggccgtgttcccccacggcggcggcttcgtgctggccttcgagttcatgctgagcgacctggccgaggtggtgagacacgcccagagacccctggcccaggcccaggtgaagagctacctgcagatgctgctgaagggcgtggccttctgccacgccaacaacatcgtgcacagagacctgaagcccgccaacctgctgatcagcgccagcggccagctgaagatcgccgacttcggcctggccagagtgttcagccccgacggcagcagactgtacacccaccaggtggccaccagaagcgtgggctgcatcatgggcgagctgctgaacggcagccccctgttccccggcaagaacgacatcgagcagctgtgctacgtgctgagaatcctgggcacccccaacccccaggtgtggcccgagctgaccgagctgcccgactacaacaagatcagcttcaaggagcaggtgcccatgcccctggaggaggtgctgcccgacgtgagcccccaggccctggacctgctgggccagttcctgctgtaccccccccaccagagaatcgccgccagcaaggccctgctgcaccagtacttcttcaccgcccccctgcccgcccaccccagcgagctgcccatcccccagagactgggcggccccgcccccaaggcccaccccggccccccccacatccacgacttccacgtggacagacccctggaggagagcctgctgaaccccgagctgatcagacccttcatcctggagggctag

SEQ ID NO: 172647 - DNA, 1353 bp, Artificial Sequence
  derived and/or modified sequence
atggaccagtattgtatattaggaagaatcggcgagggtgcccacgggattgttttcaaggctaaacacgtcgagactggggagattgttgcattgaagaaagttgccttgcggaggctggaggatggtttcccgaatcaggcacttcgggagattaaggcgctgcaggagatggaggacaaccagtacgtcgtgcagttgaaagctgtgtttcctcacgggggtggctttgtcttggcttttgagttcatgctgtctgatttggcagaagtagtgcgtcacgcccaacgacctttggctcaggctcaagtgaagagctatctccagatgctcttgaagggggtcgccttttgccacgctaacaacatcgtacatcgagatcttaagcctgctaatttactgattagcgcatctggtcagcttaagatcgctgatttcgggttggcaagagtgtttagccccgatgggtctaggttgtacacccaccaggtggctacaaggtctgtgggctgcatcatgggcgagctactcaatggcagccccttgtttccgggaaaaaatgatattgagcagctctgctatgtccttaggattcttggaacgccgaacccgcaggtgtggccagagctgaccgaacttcctgactataacaaaatcagcttcaaggagcaggtgcctatgccactcgaggaagtcctacccgacgtgtctccacaggcactggatcttctgggccagttcctactctatccacctcaccagcgcattgctgcctccaaagccctcctgcaccagtacttcttcacagcacctctgcccgctcaccccagcgagctcccaatcccccagcgtctcggtggacctgcccccaaggcacaccctgggcccccccacatccacgacttccatgtagataggcccttggaggtcgccgtggaacctcgggcagactctgcacttcaccctggcggcgtgcgatcctggccctggagtagactgcctgcaccacaagatcatagtgtgcatctatttctttgccatctccctggctttacactgcagggccttcccatggcaacagttgggccacatcataccctacccctgagtccctgcgaggggtggtcccggggccgcggacacgttccgtctcaggagtacgaaaatattcaatcatcaagaggcgattcctggcctgtgctgggagaaccctacctgctgtgtgccacagatgtgccgataaggaccgtgagcagcgcagcctctcaagggctccatatgcagaacgatgacgcctgcctcggcgccgcccctgagtgttgcctcctggtgaaggagaaatgcagagaatag

SEQ ID NO: 172648 - DNA, 978 bp, Artificial Sequence
  derived and/or modified sequence
atggatcagtattgcatcctaggaaggatcggtgaaggagcgcatgggatcgtgtttaaggccaaacacgtggaaacaggagaaattgtggctctaaaaaaagtcgctttacggagattggaggacggtttcccgaaccaagccctgcgagaaatcaaagctctgcaggaaatggaagacaaccaatacgtcgtgcagcttaaagcagtcttcccacacggggggggatttgtgcttgcctttgaattcatgctgagcgatctcgccgaggtcgtccgccatgcccagagaccattggcacaggcccaggtgaagtcatatctccagatgctgttgaagggcgtagccttttgccatgcaaataatatcgtgcatcgggatttgaagcctgcaaacttgctgatcagcgcatctgggcaacttaagattgctgattttggccttgcccgagtgttttcacccgacgggtccagactgtatacacatcaggtcgcaacgcgaagcgttgggtgcattatgggcgaactgctgaacggctccccactctttcccgggaagaatgatattgaacaactgtgctatgtgctgcgaattctgggaactcctaacccccaggtctggccggaactgacagaactgccagactataataaaatctcatttaaggagcaggtgcctatgccccttgaagaagtgctgcctgacgtgtcaccacaggcactggacctcctgggtcaatttctgttatatccacctcaccaacggatagccgccagcaaggctctgctgcaccagtacttctttacggcccctctcccagcacacccctctgaactccccatcccccagagacttggcggacccgcgcctaaagctcaccctgggcccccacacattcacgatttccatgtggaccggcctttggaggagtcacttcttaacccagaattgattaggccatttatcctcgagggatag

SEQ ID NO: 172649 - DNA, 1353 bp, Artificial Sequence
  derived and/or modified sequence
atggaccagtactgcatcctgggccgcatcggggagggcgcccatggaattgtgttcaaggccaagcacgtggagaccggggagatcgtggccctgaagaaggtggccctgcggcggctggaggatggcttccccaaccaggccctgcgggagatcaaggccctgcaggagatggaggacaaccagtatgtggtgcagctgaaggctgtgttcccccatggaggcggctttgtgctggcctttgagttcatgctgagtgacctggccgaggtggtgagacatgcccagaggcccctggcccaggcccaggtgaagagctacctgcagatgctgctgaagggcgtggccttctgccacgccaacaacatcgtgcaccgggacctgaagccagccaacctgctgatcagcgccagcggccagctgaagattgctgactttggcctggcccgggtcttctccccagatggcagccggctgtacacccaccaggtggccaccaggtctgtgggctgcatcatgggagagctgctgaatggcagccccctcttccctgggaagaatgacatcgagcagctgtgctacgtgctgcgcatcctgggcacccccaacccccaggtgtggccagagctgacagagctgcctgactacaacaagatctccttcaaggagcaggtgcccatgcccctggaggaggtgctgcctgatgtgagcccccaggccctggacctgctgggccagttcctgctgtacccaccccaccagagaattgctgccagcaaggccctgctgcaccagtacttcttcaccgcccccctgcctgcccaccccagcgagctgcccatcccccagaggctgggcggccctgcccccaaggcccaccctggccccccccacatccatgacttccacgtggaccggcccctggaggtggccgtggagcccagggctgacagcgccctgcaccctgggggcgtgcgctcctggccctggagccggctgcctgccccccaggaccacagcgtgcacctgttcctgtgccacctgcccggcttcaccctgcagggcctgcccatggccaccgtgggcccccaccacaccctgcccctgagcccctgtgagggctggagccggggccggggccacgtgcccagccaggagtatgagaacatccagagcagcagaggagacagctggcctgtgctgggggagccctacctgctgtgtgccacagatgtgcccatcagaacagtgtcctctgctgccagccagggcctgcacatgcagaatgatgatgcctgcctgggcgccgcccctgagtgctgcctgctggtgaaggagaagtgccgggagtag

SEQ ID NO: 172650 - DNA, 978 bp, Artificial Sequence
  derived and/or modified sequence
atggaccagtactgcatcctgggccgcatcggggagggcgcccatggaattgtgttcaaggccaagcacgtggagaccggggagatcgtggccctgaagaaggtggccctgcggcggctggaggatggcttccccaaccaggccctgcgggagatcaaggccctgcaggagatggaggacaaccagtatgtggtgcagctgaaggctgtgttcccccatggaggcggctttgtgctggcctttgagttcatgctgagtgacctggccgaggtggtgagacatgcccagaggcccctggcccaggcccaggtgaagagctacctgcagatgctgctgaagggcgtggccttctgccacgccaacaacatcgtgcaccgggacctgaagccagccaacctgctgatcagcgccagcggccagctgaagattgctgactttggcctggcccgggtcttctccccagatggcagccggctgtacacccaccaggtggccaccaggtctgtgggctgcatcatgggagagctgctgaatggcagccccctcttccctgggaagaatgacatcgagcagctgtgctacgtgctgcgcatcctgggcacccccaacccccaggtgtggccagagctgacagagctgcctgactacaacaagatctccttcaaggagcaggtgcccatgcccctggaggaggtgctgcctgatgtgagcccccaggccctggacctgctgggccagttcctgctgtacccaccccaccagagaattgctgccagcaaggccctgctgcaccagtacttcttcaccgcccccctgcctgcccaccccagcgagctgcccatcccccagaggctgggcggccctgcccccaaggcccaccctggccccccccacatccatgacttccacgtggaccggcccctggaggagagcctgctgaaccctgagctgatccggcccttcatcctggagggctag

SEQ ID NO: 172651 - DNA, 1353 bp, Artificial Sequence
  derived and/or modified sequence
atggaccagtactgcatcctgggccggatcggcgagggcgcccacggaattgttttcaaagccaagcacgtggagaccggcgagattgtggcgctgaaaaaggtagccctacggcggctggaggacggatttcccaatcaggctctccgagaaatcaaggctctccaggagatggaagataatcagtacgtcgtacagcttaaggccgtatttccgcacggaggaggctttgtgttggcattcgagtttatgcttagtgaccttgctgaggtggtacggcacgcccagcggccattggcacaggcccaagtcaagtcttacctacaaatgttgttgaagggcgtggccttttgtcacgccaataatatcgttcacagagatctcaagcctgctaatctcctgatcagcgcatcaggacagctcaaaattgccgactttggactcgccagggtgttctctcccgatggctcccgcctctatacacaccaagttgccactcgctcagtcggttgcataatgggagagcttctgaatgggtctccactatttccaggaaagaacgacattgagcagctctgctacgtcctgagaattttgggcacgccgaacccccaagtatggcccgaactgaccgaactgcccgattacaataagatctcatttaaagaacaggttccaatgcccctcgaggaggtccttcccgacgtttcacctcaggcactcgacctcctggggcaatttctcttgtacccgccccatcagcgcattgctgcaagcaaagcactcctgcaccagtatttttttaccgcgcctctgcccgcccatcctagcgagcttccaatcccccagcgcttggggggccctgcccccaaagctcatcctggccccccacacatccacgactttcatgtggaccggcccctggaggtggccgtggagccacgggcagactcagctctgcatcctggtggggtgcgctcctggccctggtccaggctgccggccccccaggaccactctgttcacttgttcctgtgccacctgcctgggttcaccctccagggactaccaatggcaactgtaggaccgcaccataccttacctctgagtccttgtgagggctggtctcgaggcaggggccacgtgccaagccaggaatatgagaacatacagtcatcaagaggcgattcatggcccgtactcggagagccatatctcctctgtgcaaccgacgtgccaatcagaacagtgtctagcgctgcatcacagggactgcacatgcaaaatgatgatgcttgccttggtgccgctcctgagtgttgtctgttggtgaaggagaagtgccgggaatag

SEQ ID NO: 172652 - DNA, 978 bp, Artificial Sequence
  derived and/or modified sequence
atggaccagtactgcatcctgggccggatcggcgagggcgcccacgggattgtatttaaagccaaacacgtggaaaccggtgagatagtggctctgaagaaggttgccctgagaagacttgaggatggcttccctaaccaggccctcagggaaattaaagctctacaggagatggaggacaatcagtacgttgtgcaattgaaagctgttttcccacatggcggaggatttgtcttggccttcgagtttatgctgtccgacctggccgaagtggttcgccacgctcaacgccctctggcccaggcccaagtgaaaagctacctgcagatgctgctcaagggcgtggccttctgccacgcgaacaacatagtgcatagagacttgaaacctgctaatttattgatcagtgctagcggccagttaaagattgcagatttcggactcgccagagtatttagcccagacgggtccagactctacacccaccaggtcgccacaagatcggtgggttgcattatgggcgaactccttaatgggagccccctttttcctggaaaaaacgatatcgagcagctttgctacgtgttgaggattctgggcacccccaacccgcaagtttggccagagctaaccgagctgcctgactataacaaaatttcttttaaggagcaagtgcctatgccattggaggaggtgctccccgacgtgtcccctcaagcattggatctgcttggtcagttcctcctgtaccctcctcatcagaggattgcagcctccaaggcactactgcaccaatacttctttacagcccctctgccagcccacccgagcgagctgcctattccccaacggctgggtggaccagcccctaaggctcacccgggccctccccatatccacgactttcatgtggatcggcccctggaagagagcctgctgaaccccgagctcatccggccctttattctagagggctag

SEQ ID NO: 172653 - DNA, 1353 bp, Artificial Sequence
  derived and/or modified sequence
atggatcaatattgcatactgggcagaatcggggagggggcacatgggattgtcttcaaagcaaaacatgtcgaaactggggaaatagtggcactgaagaaagttgcccttagacgactcgaagatggcttccccaatcaggctctgcgggagatcaaagccctgcaggagatggaggataaccagtacgtggttcagctgaaagcagtgttcccgcacggcggtgggttcgtgctggcgtttgaatttatgctgtcggacctagccgaagtcgtacgccacgctcagcggccattggcccaagcacaagtcaaatcttacctccagatgctgcttaaaggggtcgccttctgtcacgcaaataatatcgtgcatagggatcttaaacctgcaaatctgctgatctccgcttcaggccagctgaagatcgcggacttcggactggcccgtgttttcagccctgacggcagcaggttatatacgcaccaggttgctacccggtctgtcggctgcatcatgggggagctgctgaatggaagtcccttattcccagggaaaaacgacatagaacagctgtgctacgtcctgcgaattcttggaacccctaatcctcaagtctggcccgaactgaccgaactgccagattataacaagatttccttcaaggagcaggtccctatgcctctggaggaagtgctccctgatgtgtctccacaagcactggatctgctgggacaattccttctgtaccctccccatcagcgtatcgcagcttctaaggcactgttgcatcagtacttttttaccgcccctttacctgcgcatccgtccgagctcccaatcccccaacgattgggaggtccagcccctaaggcccatccaggccctccacacatccatgatttccatgtggacaggcctttagaggtagccgtcgaaccaagggccgactccgccctgcacccaggaggtgttcggtcatggccatggtctaggctacccgctcctcaggatcactctgttcacctgttcttgtgccacctgccaggttttaccctgcagggcttgcctatggccaccgttgggccacaccatactcttcccctgtcaccttgtgagggatggtcccgcggtcgcggacacgtgccttcccaagaatatgagaacattcaaagtagcaggggcgattcctggccggtgctgggagaaccgtacctgctctgcgccacagacgttccgatccggacggttagctcagcagccagccagggcttgcacatgcaaaatgacgatgcctgcttaggtgctgctccggagtgttgtctattggttaaagaaaagtgtagggagtag

SEQ ID NO: 172654 - DNA, 978 bp, Artificial Sequence
  derived and/or modified sequence
atggaccagtattgcatactcggcaggataggagaaggcgcacatggcatcgtttttaaagctaaacacgttgagacgggtgaaatcgttgctctgaaaaaggtggcccttaggcgcctggaggacggttttcctaatcaagcactgcgcgagattaaggcactgcaggagatggaagacaaccagtatgtcgtgcagttgaaggctgtttttccccacggaggagggttcgtgctggctttcgagtttatgctgtccgatttggccgaagtggtccgacacgcgcagaggccccttgctcaggcccaagtgaagtcatatttgcagatgctcttgaagggagtggccttctgccacgcaaacaatatcgtccacagggacttaaagcccgcaaacctgttaatctcagctagtggccagttaaagattgcagacttcggtctggctagggttttttccccggacggcagtcgcctctatactcaccaggtagccacccggagcgttgggtgcattatgggtgaattactgaacgggagccccctctttcctggaaagaacgacatagaacaactctgctacgtcctgcgtatcctcgggaccccaaaccctcaagtctggccagaactgactgagctccccgattataataaaataagctttaaagagcaagtgccgatgccactcgaagaagtgctccctgacgtgagccctcaggccctggatctgttggggcagtttctgttgtaccctccacaccagagaatcgctgcttccaaggcgttgctgcatcagtacttctttacagctccgctgccagcccacccgtcagagttaccgatccctcagcgcctggggggtcctgcacctaaggcccatcctggaccgccacacattcatgactttcacgttgatagacccctcgaggagagtttgttgaaccctgagttaataaggcctttcattctggaagggtag

SEQ ID NO: 172655 - protein, 639 aa, Artificial Sequence
  derived and/or modified sequence
MVDYIVEYDYDAVHDDELTIRVGEIIRNVKKLQEEGWLEGELNGRRGMFPDNFVKEIKRETEFKDDSLPIKRERHGNVASLVQRISTYGLPAGGIQPHPQTKNIKKKTKKRQCKVLFEYIPQNEDELELKVGDIIDINEEVEEGWWSGTLNNKLGLFPSNFVKELEVTDDGETHEAQDDSETVLAGPTSPIPSLGNVSETASGSVTQPKKIRGIGFGDIFKEGSVKLRTRTSSSETEEKKPEKPLILQSLGPKTQSVEITKTDTEGKIKAKEYCRTLFAYEGTNEDELTFKEGEIIHLISKETGEAGWWRGELNGKEGVFPDNFAVQINELDKDFPKPKKPPPPAKAPAPKPELIAAEKKYFSLKPEEKDEKSTLEQKPSKPAAPQVPPKKPTPPTKASNLLRSSGTVYPKRPEKPVPPPPPIAKINGEVSSISSKFETEPVSKLKLDSEQLPLRPKSVDFDSLTVRTSKETDVVNFDDIASSENLLHLTANRPKMPGRRLPGRFNGGHSPTHSPEKILKLPKEEDSANLKPSELKKDTCYSPKPSVYLSTPSSASKANTTAFLTPLEIKAKVETDDVKKNSLDELRAQIIELLCIVEALKKDHGKELEKLRKDLEEEKTMRSNLEMEIEKLKKAVLSS

SEQ ID NO: 172656 - DNA, 1920 bp, Artificial Sequence
  derived and/or modified sequence
atggtcgactacattgtggagtatgattatgacgccgtccacgacgatgaactgacaataagagtgggcgagatcattaggaacgtaaagaagcttcaggaagagggctggctcgagggggagctgaatggccgtcggggaatgttccctgacaactttgtcaaggaaattaagcgggaaacagagttcaaggacgacagcctacctatcaaacgcgagcggcacgggaatgtggcaagcctagtccagcgtatctccacatatggtctgcccgccggcgggatccaaccgcacccgcagacaaagaacatcaagaaaaagacgaaaaaaaggcagtgtaaggtactattcgaatacattcctcaaaatgaggacgagctcgagctgaaggtgggcgacattatcgatattaatgaggaggtagaagagggttggtggagcggtacgctcaataacaaacttgggctgtttccttctaacttcgtcaaggagctggaggtcactgacgatggcgaaacccatgaagcccaggatgacagtgaaacagtgctcgccggaccaacctcgcccattccatcactgggcaatgtgagcgagactgcatcaggttctgtgacgcaacccaagaagatccgtggaattggatttggcgatattttcaaggagggtagcgtgaaacttcggacccggaccagcagtagcgagaccgaagagaagaagcctgagaagccactcattttgcagtccctcggtcccaagacccagtctgttgaaatcacaaaaacagataccgaggggaaaattaaggcgaaggagtactgccgcaccttgttcgcctatgaggggaccaacgaggacgagttaactttcaaagagggcgaaatcattcacttgatatccaaagagactggtgaagcaggctggtggaggggtgagttgaacggcaaggagggcgtttttcctgataactttgcagtgcagataaacgaactggataaggacttccccaaaccaaagaaaccgccccccccagccaaggcccccgctcctaagcccgagctgatcgctgccgagaagaagtatttcagccttaaacccgaagaaaaggacgagaaatccacactggagcagaagccttcgaagccggccgccccgcaggtgcctcctaagaaacctactcctccgactaaggcttctaatctgcttcgtagttccggcacagtgtaccccaagaggcccgaaaagccagtacctcctccgccccctattgcaaaaattaacggggaggtgtcttctatatcttccaaattcgaaaccgagcccgtttctaaattaaaactcgactcagaacagctgccgctgaggcccaaatccgttgacttcgatagcctgaccgtgagaacctcaaaagagaccgacgtggttaattttgacgacatagctagtagtgaaaatctgctccatctgactgcgaaccgacccaagatgcctggcagacgactgcccggccgatttaacggcggtcattcacctacacacagccccgaaaagatcctcaaattaccaaaggaagaggattccgcaaaccttaaaccgagtgaactcaaaaaagacacttgctacagtcccaagccatccgtgtatttgtcaaccccgtcttcagctagtaaggccaacaccaccgcctttctgacacctctggagatcaaagcaaaagttgaaactgacgacgtgaagaagaacagcctcgatgaactgcgtgctcagatcattgagctcctttgcatagtggaagctctgaaaaaggaccacggaaaagagttggagaaactgcggaaggatttggaagaggagaagactatgcggagcaatctcgagatggaaattgagaaactgaaaaaggcggtcctgagttcatag

SEQ ID NO: 172657 - DNA, 1920 bp, Artificial Sequence
  derived and/or modified sequence
atggtggactacatcgtggagtatgactatgatgctgtgcatgatgatgagctgaccatccgggtgggggagatcatcagaaatgtgaagaagctgcaggaggagggctggctggagggggagctgaatggaagaagaggcatgtttcctgacaactttgtgaaggagatcaagcgggagacagagttcaaggatgacagcctgcccatcaagcgggagagacatggaaatgtggccagcctggtgcagaggatcagcacctacggcctgcctgctgggggcatccagccccacccccagaccaagaacatcaagaagaagaccaagaagaggcagtgcaaggtgctgtttgagtacatcccccagaatgaagatgagctggagctgaaggtgggggacatcatcgacatcaatgaggaggtggaggagggctggtggagcggcaccctgaacaacaagctgggcctcttccccagcaactttgtgaaggagctggaggtgacagatgatggagagacccatgaggcccaggatgacagcgagaccgtgctggccggccccaccagccccatccccagcctgggcaatgtgtctgaaacagccagcggctctgtgacccagcccaagaagatccggggcatcggctttggagacatcttcaaggagggctctgtgaagctgcggaccaggaccagcagcagcgagacagaggagaagaagccagagaagcccctcatcctgcagagcctgggccccaagacccagagcgtggagatcaccaagacagacacagagggcaagatcaaggccaaggagtactgcaggaccctgtttgcctatgagggcaccaatgaagatgagctgaccttcaaggagggggagatcatccacctgatcagcaaggagactggagaggccggctggtggagaggagagctgaatggcaaggagggcgtcttcccagacaactttgctgtgcagatcaatgagctggacaaggacttccccaagcccaagaagcccccacctccagccaaggccccagcccccaagccagagctgattgctgctgagaagaagtacttcagcctgaagccagaggagaaggatgagaagagcaccctggagcagaagcccagcaagccagctgccccccaggtgccccccaagaagcccaccccacccaccaaggccagcaacctgctgcggagcagcggcaccgtgtaccccaagaggcctgagaagcctgtgcccccacctccacccatcgccaagatcaatggagaggtgagcagcatcagcagcaagtttgaaacagagcctgtgtccaagctgaagctggacagcgagcagctgcccctgcggcccaagtctgtggactttgacagcctgactgtgaggaccagcaaggagacagatgtggtgaactttgatgacatcgccagcagcgagaacctgctgcacctgacagccaaccggcccaagatgcctggaagaaggctgcccggccgcttcaacggcggccacagccccacccacagccctgagaagatcctgaagctgcccaaggaggaggacagcgccaacctgaagcccagcgagctgaagaaggacacctgctacagccccaagcccagcgtgtacctgagcacccccagcagcgccagcaaggccaacaccacagccttcctgacccccctggagatcaaggccaaggtggagacagatgatgtgaagaagaacagcctggatgagctgcgggcccagatcatcgagctgctgtgcatcgtggaggccctgaagaaggaccacggcaaggagctggagaagctgaggaaggacctggaggaggagaagaccatgaggagcaacctggagatggagattgagaagctgaagaaggctgtgctgagcagctag

SEQ ID NO: 172658 - DNA, 1920 bp, Artificial Sequence
  derived and/or modified sequence
atggtggactacatcgtggagtacgactacgacgccgtgcacgacgacgaactgaccattcgtgttggggagatcattcgcaacgtgaaaaaactgcaagaggagggctggctggagggtgagttaaacggtcgtagagggatgttcccagataattttgtcaaggagatcaagagggaaactgaattcaaagacgactcgctgccaattaaacgggagaggcacggcaacgtagctagcctcgtacagcgaatttccacctacgggctcccggccggtggcatacagccccatcctcagacgaagaatatcaaaaaaaaaactaagaagcggcagtgcaaggtgttattcgagtatattccccaaaatgaggatgaactggagctcaaggtgggggacattatcgatatcaatgaggaagtcgaggagggctggtggtcaggtacattgaacaacaaactgggcctctttccctcaaactttgtgaaggaactagaagtgaccgacgacggcgaaacacatgaagctcaggatgattctgaaaccgtgttggccgggccaacatctccgattccaagcctgggcaacgtgagcgaaaccgccagcggctcagtgacacagccaaagaagatccgtgggatcgggtttggtgatatttttaaggagggctctgtgaaactgaggacccggacttcctcatcagagactgaagagaagaagccagaaaagcccctcattctccaaagtctcggcccaaagactcagagtgtagagattactaaaacggatacggaaggaaagatcaaggcaaaagaatattgtaggacactttttgcatatgagggcacaaacgaagatgaactcactttcaaagaaggggagatcattcacttaatttccaaggagacaggcgaagcaggctggtggcggggcgagctgaacggtaaagaaggggtctttcccgacaactttgctgtccaaattaatgagctggataaagacttccccaaacccaagaagccaccccccccagcgaaagctccagctccaaaacccgagctgattgccgctgagaagaagtacttctcactgaagcctgaagagaaggatgaaaagagtaccctggagcagaaacccagcaagcccgcagcccctcaggtaccacctaagaagcccacaccccccaccaaagcaagtaatctcctgcggtccagcggcacagtgtacccaaagaggcccgagaagcccgtgccaccaccacctccgatagctaaaattaatggtgaggtttcttcaatttcttccaaatttgagaccgaacctgtgagcaagctgaagcttgattcagagcagctgccactgaggcccaagtccgtggacttcgacagtcttacggtgaggacatcaaaagaaacagacgtcgttaactttgatgacatcgccagctcagaaaaccttcttcacctgaccgctaaccggcctaagatgccagggcggcgcttgcccgggaggttcaatggcggtcatagccctacccactcacctgaaaaaatcctgaagctccccaaagaagaggactctgctaatctgaaaccgtcggaactcaagaaagatacttgctactctcccaagccctccgtgtacttaagcacccctagcagcgcaagtaaggccaacaccacagcctttctgacacctctggagatcaaggccaaggtggaaaccgacgatgtgaagaagaacagcctggatgaactccgggcacagattatagagctcctgtgcattgtcgaggcgctgaaaaaagatcacggcaaagagcttgagaaactgaggaaggacctggaagaagaaaagacaatgcgatccaatctagagatggagatcgaaaagctaaagaaagctgtgctgagttcatag

SEQ ID NO: 172659 - DNA, 1920 bp, Artificial Sequence
  derived and/or modified sequence
atggtcgattatatcgtggagtatgactatgacgcagtccatgatgatgagttaacaattcgcgtgggcgaaatcattcgaaatgtgaagaaactacaggaagaaggttggttggagggagagctcaatgggcgtcgagggatgttcccggataattttgtcaaggagatcaagcgcgagaccgaattcaaggacgatagcctaccaattaaaagagaacggcatggaaatgttgccagtctcgtacagagaatttcaacatacggactaccagctggcggaattcaaccgcatcctcagacaaagaacattaaaaagaaaacaaaaaagcgccagtgtaaggtgctcttcgaatacataccccaaaatgaagatgaactggaactgaaagttggggacatcattgacataaatgaggaggttgaagagggctggtggtcgggcacgctgaataataagttgggattatttccgtctaacttcgtgaaagaactcgaggtgacggatgatggcgaaacgcatgaggctcaggacgattctgaaacagtcctagcaggacctacctcccctatcccttcattaggcaacgtctccgagacagcttccggcagcgtcacccaacccaagaagatccgtgggatcgggttcggggatatttttaaggaggggtcagtgaaactgcggaccaggacctcttctagcgagaccgaagagaagaagccggaaaagccgctgattttgcagagcctcggacccaagactcaaagtgtagagatcactaaaactgacacagaaggcaagattaaggccaaggaatattgtagaaccttattcgcatatgagggcacaaacgaggatgaactgactttcaaggaaggggagattatccatctcatttcaaaagaaacaggggaagctgggtggtggaggggagaactgaacggcaaggagggcgttttcccagacaactttgcggtccagatcaatgaacttgacaaagactttcccaagccgaaaaagccaccaccacctgccaaggcaccagcacctaaacccgaattaatcgccgctgaaaagaagtacttcagtctaaagcccgaggagaaggacgaaaagagcacattggagcagaaaccctcgaagccagccgctccacaggtcccgccaaagaagccaaccccacctactaaggcctccaacctgctccgctcaagtggtaccgtgtatcctaaacggccagaaaagcctgtcccaccgcctccccctatcgccaaaatcaatggagaagtgagctctatttcatcaaagttcgagaccgagcctgtgtccaagctgaagctagattccgagcaactgcctttgaggcccaaatctgtggacttcgactctctgacagtccggacctccaaagaaactgacgtagtaaacttcgacgatatcgcatccagtgaaaacctactgcatttaaccgcaaatcgccctaagatgcctgggcgtagattgcccggtcggtttaatggcggtcattccccgacgcatagtccagaaaagattctgaagcttccaaaagaggaagactccgctaacttaaaaccctctgagctcaagaaagacacctgctactcccctaagcctagcgtgtacctctctactccttcaagcgcctccaaagcgaacacaaccgcatttttaacaccgctcgagataaaagccaaagtcgaaaccgacgacgtcaaaaagaacagcttggacgagcttagggctcagataatcgaactactttgcatcgtggaggcactaaagaaggatcacggcaaggagctggagaaattgcgcaaggatcttgaagaagaaaagactatgcggtctaacctcgaaatggagatagaaaagttgaagaaggccgttttatcatcatag

SEQ ID NO: 172660 - DNA, 5412 bp, Artificial Sequence
  derived and/or modified sequence
ctctgtctgggtccccaccttagtctacggtgtcgccttttctaactgcgagtgctaaggaagaggcgaggggcgggctccgaggctaggcgggcgctcggggttggagccgagggtctgggcaaaccggtgggtccctccccactgcgggagcggccagggtgggaaaaccgcggtcgggcgggcggggtagggccctcccgccgccgtggctcctggggaggccaggggtgaggagctgtcgccgcctttgcctctgcctcgagggccgcgctgaagagactggtaggagagcgccgcgggcggatggaggcgactcttcgccccgcctgagctcaggaggggctagcgcggagcgcgggtcccgcctccagccgcgggagcggccgcgcgagccaccactggaggaggaggaggaggagcggacgtcggcttctccccgcgggagcccccagcatggttgactatattgtggagtatgactatgatgctgtacatgatgatgaattaactattcgagttggagaaatcatcaggaatgtgaaaaagctacaggaggaagggtggctggaaggagaactaaatgggagaagaggaatgttccctgacaatttcgttaaggaaattaaaagagagacggaattcaaggatgacagtttgcccatcaaacgggaaaggcatgggaatgtagcaagtcttgtacaacgaataagcacctatggacttccagctggaggaattcagccacatccacaaaccaaaaacattaagaagaagaccaagaagcgtcagtgtaaagttctttttgagtacattccacaaaatgaggatgaactggagctgaaagtgggagatattattgatattaatgaagaggtagaagaaggctggtggagtggaaccctgaataacaagttgggactgtttccctcaaattttgtgaaagaattagaggtaacagatgatggtgaaactcatgaagcccaggacgattcagaaactgttttggctgggcctacttcacctataccttctctgggaaatgtgagtgaaactgcatctggatcagttacacagccaaagaaaattcgaggaattggatttggagacatttttaaagaaggctctgtgaaacttcggacaagaacatccagtagtgaaacagaagagaaaaaaccagaaaagcccttaatcctacagtcactgggacccaaaactcagagtgtggagataacaaaaacagataccgaaggtaaaattaaagctaaagaatattgtagaacattatttgcctatgaaggtactaatgaagatgaacttacttttaaagagggggagataatccatttgataagtaaggagactggagaagctggctggtggaggggcgaacttaatggtaaagaaggagtatttccagacaattttgctgtccagataaatgaacttgataaagactttccaaaaccaaagaaaccaccacctcctgctaaggctccagctccaaagcctgaactgatagctgcagagaagaaatatttttctttaaagcctgaagaaaaggatgaaaaatcaacactggaacagaaaccttctaaaccagcagctccacaagtcccacccaagaaacctactccacctaccaaagccagtaatttactgagatcttctggaacagtgtacccaaagcgacctgaaaaaccagttcctccaccacctcctatagccaagattaatggggaagtttctagcatttcatcaaaatttgaaactgagccagtatcaaaactaaagctagattctgaacagctgccccttagaccaaaatcagtagactttgattcacttacagtaaggacctccaaagaaacagatgttgtaaattttgatgacatagcttcctcagaaaacttgcttcatctcactgcaaatagaccaaagatgcctggaagaaggttgccgggccgtttcaatggtggacattctccaactcacagccccgaaaaaatcttgaagttaccaaaagaagaagacagtgccaacctgaagccatctgaattaaaaaaagatacatgctactctccaaagccatctgtgtacctttcaacaccttccagtgcttctaaagcaaatacaactgctttcctgactccattagaaatcaaagctaaagtggaaacagatgatgtgaaaaaaaattccctggatgaacttagagcccagattattgaattgttgtgcattgtagaagcactgaaaaaggatcacgggaaagaactggaaaaactgcgaaaagatttggaagaagagaagacaatgagaagtaatctagagatggaaatagagaagctgaaaaaagctgtcctgtcttcttgagtggtgtggacctggtgttcataatgttccagggattcagaagcaacgctatgaacttcagctgacttgttacttaaaaattgtgaattctgttgttgtgataaatatgagcaaatgaagtgtaatatctatagaaaagtagagtgagggtgaatttatatatatattttgttttgccaatatgaagaaaaagaggccttatttcttaactgtgctgggattgcaaacactttttaaaaaattgtttgcttgaaaatactactgaatataaataagaatgtgcacagtagtttttttattgaaacttgtattatttttaaagagatctatactataaatatggtgatatatttacaagtaatctgttaagatatactatttgagagggacagattagccttttagtaactatagtcactactttttccataatgcataagggatataaactctgtgtgtgtgtgtgtgtgtgtgtgtgtgtgtgtgtgtgtgtgtatatatatatatatatttttacttttatcctcttaccgaaggttacactgttgtgcctgtttgtctgcaatgctgtttatattttgggtgatgaaataggagtttcctagctatataaaccagattactcacccatgcatatagtaagaactaatgaataatcaaaataatttcatcaacttttagaatattttatgttgcttgcactataggagtcataaaaggaacttagttaaaatatgttggattgttaaacatttggggaaatatgaactgtattttaaatttgttaggtctgaagaatctaaaactgttaatttaacccttaacttgtgcctagaaactacagcacatataaaatatgtaaacaccagcctgttgctgtacttttctgcttattttacagcctcaaatatttctcattatcttgtcacttagttcttcatgtttctccttctgacttttaataatggtaataggaaaacaaaacccaaagcttttcagaacttcagtgtgaggtttcctattttgacaagttaacttgtaaatactcaggttttacgatgtataatttacctaatagaccaaactaactcatggagatattttgaactattatttaggtacaaactttataaagaatgttagtatgtcataaaatataacattacagcttatttaaaaccaaatatagttgaacatatttaaaatacattttcacagaatggatgaattagttgtttcttcagagttacttatgaacagttgaatgctttaaaatgttctgtctgtaggtaacatctaaaacacaagtgggtttatttaaatttttaaaatttgaaattttttatttgcaaaaaattgttttatgctttattatatcgcaaatgagtgtcagatttttgagtaccaatgatcatgcttccattttttttagttttaaaccaccaaaccaatatttttcctttaaattttaatcttataatatagaaatcttatgtaaatgaaattttgtcatgtttcaaataaagagaactgaagtagaaaatagaaatgccagtaaacaacataatgtttaatttacaacttacattaggggtttgggggaatgctaattatatattgagaatatacattagaactcttcaaaatgggctcttctaatgaggtcactactgaacaaaattgttccctcttctgttaaatagaataggtttaaatgactagtcaaatgaattattttcttcttgttaaataaattaaatcttactttcttttaatgaccaaccttaggtaaaacaaaaatattgtaatcctagaaattatcctccagctttctcacctgaaaatctattgaagtgatccctggtcatcctaataatgggatgagggaagtttccagcagatttcaggctgttcttaaagtttttgttggtcattttctcaatagtacatgaaatcaagatgcttatgagcatggaaatgtatttaaagtttttgcttgtgtcctcctcagtcagaatagaaaagtaactgaaatacttttacctttctgtccttgataaaatagtaaagaaaaccaaacaaacccaggcctgatgggaaaaatgattcctttattctagcaacttactttctgttggtatgggaaatgttattaatttctattactaaagttcatatcacaaaatgatatttaataataaccttggggtaaatcatgaattttttttctacgtgtgagtataaaagacaaaagttgaacagcatggaatctcattgccaaattattagtgaatgtatagttcaggtattctttgagacacacagtatcattaatttctgaattgtatttcagtgttattttttgtttgtgaccactaagcttctgtcttaatacaaagctgttaccttctacagaatttaagtctgaagatgtaaagagagaacaggccttgtgtaacagaagatactcttttttatgctccttactgtgatcacagaaaaattaaaaatccaagtgctctctagatttgttgataaacattttatgcttgcatttaaacttgaaatgtatgagcagaatgagacaatcagttaaatcagaaatgagaagtattataatgtaaaggccttgttttgctgtagcaataaaatgaccaagtgcaatgacttgatttaataaaatcatattttaaaagttgctgctatgaatatttttggctataaaattttaccctgacttgctttcaataactgttacgtaatgcagttgatgttgtaacctaacattccaaaaaaaaaattgagagggggaatctcaaaatagtatatacttcactaacttgtttacaggtgctgtatttaaaagcatgcttctctctcaaaaagaaaaattaaaggattttattgccagtcgtgtcagtctttattggttattttttgttaactttagcatttgtgtatttcagagtatgatgaaaattatattacttcaatttccaaatacaagaataaatagtaaaccaaaaacattaaaaa

SEQ ID NO: 172661 - DNA, 1920 bp, Artificial Sequence
  derived and/or modified sequence
atggtggactacatcgtggagtacgactacgacgccgtgcacgacgacgagctgaccatcagagtgggcgagatcatcagaaacgtgaagaagctgcaggaggagggctggctggagggcgagctgaacggcagaagaggcatgttccccgacaacttcgtgaaggagatcaagagagagaccgagttcaaggacgacagcctgcccatcaagagagagagacacggcaacgtggccagcctggtgcagagaatcagcacctacggcctgcccgccggcggcatccagccccacccccagaccaagaacatcaagaagaagaccaagaagagacagtgcaaggtgctgttcgagtacatcccccagaacgaggacgagctggagctgaaggtgggcgacatcatcgacatcaacgaggaggtggaggagggctggtggagcggcaccctgaacaacaagctgggcctgttccccagcaacttcgtgaaggagctggaggtgaccgacgacggcgagacccacgaggcccaggacgacagcgagaccgtgctggccggccccaccagccccatccccagcctgggcaacgtgagcgagaccgccagcggcagcgtgacccagcccaagaagatcagaggcatcggcttcggcgacatcttcaaggagggcagcgtgaagctgagaaccagaaccagcagcagcgagaccgaggagaagaagcccgagaagcccctgatcctgcagagcctgggccccaagacccagagcgtggagatcaccaagaccgacaccgagggcaagatcaaggccaaggagtactgcagaaccctgttcgcctacgagggcaccaacgaggacgagctgaccttcaaggagggcgagatcatccacctgatcagcaaggagaccggcgaggccggctggtggagaggcgagctgaacggcaaggagggcgtgttccccgacaacttcgccgtgcagatcaacgagctggacaaggacttccccaagcccaagaagccccccccccccgccaaggcccccgcccccaagcccgagctgatcgccgccgagaagaagtacttcagcctgaagcccgaggagaaggacgagaagagcaccctggagcagaagcccagcaagcccgccgccccccaggtgccccccaagaagcccaccccccccaccaaggccagcaacctgctgagaagcagcggcaccgtgtaccccaagagacccgagaagcccgtgcccccccccccccccatcgccaagatcaacggcgaggtgagcagcatcagcagcaagttcgagaccgagcccgtgagcaagctgaagctggacagcgagcagctgcccctgagacccaagagcgtggacttcgacagcctgaccgtgagaaccagcaaggagaccgacgtggtgaacttcgacgacatcgccagcagcgagaacctgctgcacctgaccgccaacagacccaagatgcccggcagaagactgcccggcagattcaacggcggccacagccccacccacagccccgagaagatcctgaagctgcccaaggaggaggacagcgccaacctgaagcccagcgagctgaagaaggacacctgctacagccccaagcccagcgtgtacctgagcacccccagcagcgccagcaaggccaacaccaccgccttcctgacccccctggagatcaaggccaaggtggagaccgacgacgtgaagaagaacagcctggacgagctgagagcccagatcatcgagctgctgtgcatcgtggaggccctgaagaaggaccacggcaaggagctggagaagctgagaaaggacctggaggaggagaagaccatgagaagcaacctggagatggagatcgagaagctgaagaaggccgtgctgagcagctag

SEQ ID NO: 172662 - protein, 692 aa, Artificial Sequence
  derived and/or modified sequence
MFYFRGCGRWVAVSFTKQQFPLARLSSDSAAPRTPHFDVIVIGGGHAGTEAATAAARCGSRTLLLTHRVDTIGQMSCNPSFGGIGKGHLMREVDALDGLCSRICDQSGVHYKVLNRRKGPAVWGLRAQIDRKLYKQNMQKEILNTPLLTVQEGAVEDLILTEPEPEHTGKCRVSGVVLVDGSTVYAESVILTTGTFLRGMIVIGLETHPAGRLGDQPSIGLAQTLEKLGFVVGRLKTGTPPRIAKESINFSILNKHIPDNPSIPFSFTNETVWIKPEDQLPCYLTHTNPRVDEIVLKNLHLNSHVKETTRGPRYCPSIESKVLRFPNRLHQVWLEPEGMDSDLIYPQGLSMTLPAELQEKMITCIRGLEKAKVIQPGYGVQYDYLDPRQITPSLETHLVQRLFFAGQINGTTGYEEAAAQGVIAGINASLRVSRKPPFVVSRTEGYIGVLIDDLTTLGTSEPYRMFTSRVEFRLSLRPDNADSRLTLRGYKDAGCVSQQRYERACWMKSSLEEGISVLKSIEFLSSKWKKLIPEASISTSRSLPVRALDVLKYEEVDMDSLAKAVPEPLKKYTKCRELAERLKIEATYESVLFHQLQEIKGVQQDEALQLPKDLDYLTIRDVSLSHEVREKLHFSRPQTIGAASRIPGVTPAAIINLLRFVKTTQRRQSAMNESSKTDQYLCDADRLQEREL

SEQ ID NO: 172663 - DNA, 2079 bp, Artificial Sequence
  derived and/or modified sequence
atgttctacttcagaggctgcggcagatgggtggccgtgagcttcaccaagcagcagttccccctggccagactgagcagcgacagcgccgcccccagaaccccccacttcgacgtgatcgtgatcggcggcggccacgccggcaccgaggccgccaccgccgccgccagatgcggcagcagaaccctgctgctgacccacagagtggacaccatcggccagatgagctgcaaccccagcttcggcggcatcggcaagggccacctgatgagagaggtggacgccctggacggcctgtgcagcagaatctgcgaccagagcggcgtgcactacaaggtgctgaacagaagaaagggccccgccgtgtggggcctgagagcccagatcgacagaaagctgtacaagcagaacatgcagaaggagatcctgaacacccccctgctgaccgtgcaggagggcgccgtggaggacctgatcctgaccgagcccgagcccgagcacaccggcaagtgcagagtgagcggcgtggtgctggtggacggcagcaccgtgtacgccgagagcgtgatcctgaccaccggcaccttcctgagaggcatgatcgtgatcggcctggagacccaccccgccggcagactgggcgaccagcccagcatcggcctggcccagaccctggagaagctgggcttcgtggtgggcagactgaagaccggcaccccccccagaatcgccaaggagagcatcaacttcagcatcctgaacaagcacatccccgacaaccccagcatccccttcagcttcaccaacgagaccgtgtggatcaagcccgaggaccagctgccctgctacctgacccacaccaaccccagagtggacgagatcgtgctgaagaacctgcacctgaacagccacgtgaaggagaccaccagaggccccagatactgccccagcatcgagagcaaggtgctgagattccccaacagactgcaccaggtgtggctggagcccgagggcatggacagcgacctgatctacccccagggcctgagcatgaccctgcccgccgagctgcaggagaagatgatcacctgcatcagaggcctggagaaggccaaggtgatccagcccggctacggcgtgcagtacgactacctggaccccagacagatcacccccagcctggagacccacctggtgcagagactgttcttcgccggccagatcaacggcaccaccggctacgaggaggccgccgcccagggcgtgatcgccggcatcaacgccagcctgagagtgagcagaaagccccccttcgtggtgagcagaaccgagggctacatcggcgtgctgatcgacgacctgaccaccctgggcaccagcgagccctacagaatgttcaccagcagagtggagttcagactgagcctgagacccgacaacgccgacagcagactgaccctgagaggctacaaggacgccggctgcgtgagccagcagagatacgagagagcctgctggatgaagagcagcctggaggagggcatcagcgtgctgaagagcatcgagttcctgagcagcaagtggaagaagctgatccccgaggccagcatcagcaccagcagaagcctgcccgtgagagccctggacgtgctgaagtacgaggaggtggacatggacagcctggccaaggccgtgcccgagcccctgaagaagtacaccaagtgcagagagctggccgagagactgaagatcgaggccacctacgagagcgtgctgttccaccagctgcaggagatcaagggcgtgcagcaggacgaggccctgcagctgcccaaggacctggactacctgaccatcagagacgtgagcctgagccacgaggtgagagagaagctgcacttcagcagaccccagaccatcggcgccgccagcagaatccccggcgtgacccccgccgccatcatcaacctgctgagattcgtgaagaccacccagagaagacagagcgccatgaacgagagcagcaagaccgaccagtacctgtgcgacgccgacagactgcaggagagagagctgtag

SEQ ID NO: 172664 - DNA, 2079 bp, Artificial Sequence
  derived and/or modified sequence
atgttttattttagaggctgcggcaggtgggtagctgtgagtttcacaaagcagcagttcccgttggcccggctttcaagcgattccgccgcacctaggaccccgcactttgacgttatcgtgattggagggggtcacgcaggcactgaggctgcgaccgcggcagcaaggtgtggaagccgtaccctcctcctgactcatagggtcgacaccatcggccagatgtcatgtaatcctagcttcggcggaatcggcaaaggccatcttatgcgggaggtggatgcattggatggattgtgttctagaatctgcgaccagagcggagtgcattacaaagtcttgaaccgtagaaagggccctgccgtgtggggtctgcgcgctcagatcgaccgcaaattgtacaaacagaacatgcaaaaagagatcttaaatacccccttgctgaccgtccaggagggggccgtggaggatctgatcctcacagagcccgagccagagcatacagggaagtgcagagtctcaggcgtcgtgctcgtggacggcagcacagtgtacgccgaaagcgtgattttaaccactggtacatttctgcgtgggatgattgtgattggcctagaaactcaccctgcaggacgactgggtgatcagccttcaataggactcgcacagactttggagaaactaggattcgtcgtgggcaggcttaagactgggaccccaccccgaattgccaaggagagcattaatttctccatactcaacaagcatatccctgacaacccatccattccgttttcctttacaaatgaaacagtctggattaagcctgaggaccagttgccatgctacttgacacacaccaatccccgagtggacgaaatcgtgttaaaaaatctccacctgaacagtcacgtgaaggagacgacccgtggcccgaggtactgtccaagcattgagagcaaggtactgagattcccgaatcggttgcaccaggtttggctagagcccgaggggatggattcggacctcatataccctcaaggcctctccatgactttgcccgccgagctccaggaaaaaatgatcacctgtatacggggtctggaaaaggcaaaggtgatacaacccggttacggcgtacagtatgactacctggatccaaggcagattactccctctctggagacacatctggtgcagaggctcttctttgccggtcagatcaacggcactacaggatacgaagaggccgccgcccagggtgtgattgccggcataaatgcctctctgagggtcagtcgaaaaccgccctttgtagtttcccgcaccgaagggtacatcggcgtgctgatagacgaccttactaccctgggcaccagtgagccatacaggatgttcacttctagggtggagttcagacttagcctgcggcccgacaacgccgactcaagacttactctgagggggtataaagacgcaggatgcgtaagccaacagcggtacgaaagagcttgctggatgaagagcagtctggaagagggcatctcagtgttgaagtccatcgagtttctcagttccaaatggaagaagctgatccctgaagcaagcattagcacctctcgatcattgccggtccgcgcccttgatgttctgaagtacgaagaggttgatatggacagtctggccaaagctgttcccgagccattgaaaaagtacaccaagtgtcgggagttggccgaaagactcaaaatagaggctacctatgaatcggtgcttttccaccagctgcaggaaataaaaggagtacaacaggatgaagcgctgcagctccctaaggatctagactatctaaccatccgagatgtgagcctgtctcacgaggtcagggagaaactacacttttctaggccgcagaccattggcgccgcctccaggatcccaggtgttactcccgccgctataatcaaccttctgcggttcgtgaagacaacacaaagacggcagagtgctatgaacgaatcgtcaaaaacagaccagtacctgtgtgacgcagaccgcttgcaggagcgggaactgtag

SEQ ID NO: 172665 - DNA, 2079 bp, Artificial Sequence
  derived and/or modified sequence
atgttctacttccggggctgcggccgctgggtggccgtgtccttcaccaagcagcagttccccctggcccggctgagcagtgacagcgctgcccccaggaccccccactttgatgtgattgtcatcggcggcggccatgctggaacagaagctgccacagctgctgcccgctgtggcagcaggaccctgctgctgacccaccgggtggacaccatcggccagatgagctgcaaccccagctttggaggcatcggcaagggccacctgatgagggaggtggatgccctggatggcctgtgcagccgcatctgtgaccagagcggcgtgcactacaaggtgctgaacagaaggaagggccctgctgtgtggggcctgcgggcccagattgacaggaagctgtacaagcagaacatgcagaaggagatcctgaacacccccctgctgactgtgcaggagggcgctgtggaggacctgatcctgacagagcctgagcctgagcacacaggcaagtgccgggtgtctggagtggtgctggtggatggcagcacagtgtatgcagagagcgtcatcctgaccaccggcaccttcctgcggggcatgattgtgattggcctggagacccaccctgctggccgcctgggggaccagcccagcatcggcctggcccagaccctggagaagctgggctttgtggtgggccgcctgaagacaggcaccccaccaagaattgccaaggagagcatcaacttcagcatcctgaacaagcacatcccagacaaccccagcatccccttctccttcaccaatgaaacagtgtggatcaagccagaggaccagctgccctgctacctgacccacaccaacccccgggtggatgagatcgtgctgaagaacctgcacctgaacagccacgtgaaggagaccacccggggcccccgctactgccccagcattgagagcaaggtgctgcgcttccccaaccggctgcaccaggtgtggctggagcctgagggcatggacagcgacctgatctacccccagggcctgtccatgaccctgcctgctgagctgcaggagaagatgatcacctgcatccggggcctggagaaggccaaggtgatccagcccggctacggcgtgcagtatgactacctggacccccggcagatcacccccagcctggagacccacctggtgcagaggctcttctttgctggccagatcaatggcaccaccggctatgaggaggccgccgcccagggcgtgattgctggcatcaatgccagcctgcgggtgtccaggaagcccccatttgtggtgtccaggacagagggctacatcggcgtgctgattgatgacctgaccaccctgggcaccagcgagccctacaggatgttcaccagccgggtggagttccggctgagcctgcggccagacaatgctgacagccggctgaccctgcggggctacaaggatgctggctgtgtgtcccagcagagatatgagcgggcctgctggatgaagagcagcctggaggagggcatctctgtgctgaagagcattgagttcctgagcagcaagtggaagaagctgatccctgaggccagcatcagcaccagccgcagcctgcctgtgcgggccctggatgtgctgaagtatgaggaggtggacatggacagcctggccaaggctgtgcctgagcccctgaagaagtacaccaagtgccgggagctggccgagcggctgaagattgaggccacctatgagagcgtgctcttccaccagctgcaggagatcaagggcgtgcagcaggatgaggccctgcagctgcccaaggacctggactacctgaccatcagagatgtgtccctgagccatgaggtgcgggagaagctgcacttcagccggccccagaccatcggggccgccagccgcatccctggggtgaccccagctgccatcatcaacctgctgcgctttgtgaagaccacccagaggcggcagagcgccatgaatgaaagcagcaagacagaccagtacctgtgtgatgctgaccggctgcaggagcgggagctgtag

SEQ ID NO: 172666 - DNA, 10857 bp, Artificial Sequence
  derived and/or modified sequence
taaataaataaataaataaaaataaaaaataataataataaaaaaagcccgcacgaactaggaaagaaaatacacaaccggccctccgtgcgatcacccatctccctcaccaggaaagtagctccaaaccgccaatcagcggcgacgctggacgtagacgtcctaccccgtgatattaaagcaagatggccgcgccctgcagattgtctcttgttgcgtaagtttttttgaccgtcactcgtgtcagcttcaaagtcagatagatttttctcccagcatgttctacttccgaggctgtggccgttgggtcgcggtttccttcaccaagcagcaatttccgttggcacggttgagcagtgacagcgcggcgccccggactccgcacttcgacgtgatagtcattggtggaggacatgccgggactgaggcagccaccgccgccgctcggtgcggctctcggactctgctcctcactcaccgcgtggacacgatcggtcagatgtcatgtaatccttcctttggtggcatcggaaagggacatttaatgagggaagtagatgccttggatggcctgtgttctcgcatctgtgaccagtctggtgtacattataaagtattaaaccggcgtaagggaccagctgtgtggggtctgagagctcagattgataggaaactctataaacagaacatgcagaaagaaatcttgaatacaccactgcttactgttcaggagggagctgtagaagatcttattcttacagaaccagagcctgaacacactgggaaatgccgtgtcagtggggttgttttggtggatggaagcacagtatatgcagagagtgtgattctgactactgggacatttctgagaggcatgattgtaattggattggagacgcatccagcaggacgtttaggggatcagccttctataggattggctcagacactggagaagttagggtttgtggtgggaaggttgaagactgggactccaccccgaattgccaaagagtccattaatttcagtattctaaacaagcatataccggacaatccatccataccattcagctttaccaatgagacagtatggattaagccagaagatcagctgccatgttacttgactcacaccaaccctagagtggatgagattgtccttaagaaccttcaccttaatagtcatgttaaagaaacgacaagaggacctcgatactgtccctccattgaatcaaaagttttgcgttttccaaaccgtctacatcaggtttggttggaacctgaaggaatggattctgaccttatctacccacaggggttatctatgacgctaccagctgagttacaagagaaaatgatcacatgcatcagaggcttggagaaagctaaagtgattcagccaggctacggtgttcagtatgattacttagatccccgtcagatcaccccttccttggagactcatttggttcaacgactcttctttgctggacagatcaatggcaccactggttatgaggaagctgcagctcaaggtgtgatagccggaatcaacgccagtcttcgggtcagtcgcaagcctccctttgtggttagccgaacagaaggttacataggagtcttgattgatgacctcactactctgggcaccagtgaaccataccgcatgtttaccagccgagtagagttccgtttgtcactgcgccctgataatgctgacagccggctcacactgcgagggtataaagacgctggctgtgtgtcccaacaacgatatgaaagagcttgttggatgaagtcttctttagaagaaggcatttctgtgttgaaatctattgagtttttgagctctaaatggaaaaaattaatcccagaggcttctataagtactagtagaagtctgcctgtcagagctctcgatgttctgaagtatgaggaagttgacatggattcattagccaaggctgttccagagcccttgaagaagtatactaaatgtagagagctggctgaaagactgaaaatagaagccacttatgaatcagtgttgttccatcaactacaagaaataaagggagttcagcaagatgaagctctccaactgccaaaagacctagattatttgactatcagggatgtgtctttgtcccatgaagttcgagagaaactacattttagtcgtccacagacgatcggggctgctagtcgcatacccggagtaacacctgccgccatcatcaatctgctgagatttgtgaagaccactcaacgaagacagtcggctatgaatgaatcatccaagactgatcaatacttatgtgatgcagacagacttcaagagagagagttatagctttcaattcataaaagatttttaaagagcatataaataatttgatcaatacaacagtatagataaaagaattatttagcacatgttaaaatagctttattaggttactatgggtttgccattaatttctgagtgggacagaaattataattgtgctttttcgtgtatatgaaaaaactagtcgtaaacaatttgtactctttctttaaggagctgtaatacaaataactttgtgcagtgttcatcaaagagagagacagtgaacctaaaactgaacctggaataaaactcaacatgcagatttgcctactcatagggactttgcctattaagtctaccaaattaaaagtcttatcattcagcgtgttttgagagttaataatcttttgcttggttatactaggctaggaagcaatatcaaagcccttaaattctcaagactaaagacttgagattatataaaattatccagaatcattcagctaatactattggaatatagtatgtagggtgaaagttgacagaaatctgtacttcttcaggaaatcctcactggtaattgttttgaacattaatgaaagccctataaaatagaaagattggaaatcaccattgtttcctattatccacagtgtggatggatacttatttggtgacctagttatgggagaattgagtaacgttagttattttatatcataccataaaaatattttcttaagaaattgtcatggccatcatttcttaataatgaagacaggtccatagtaactggtgagtggtgtttccctgtttttaagtcagaatgacagaaaaaacagaatagtggtagtacccctcttcctctccagtacttcaatggtatgtcttcacaggggttagagtgggataatcagctgggccttttgactcagatacctcagatacctcaaccattctaaatagactaagggatgaatacagccaaatgggccagacagccctgcttgtctctggaattccaacccagatctctggtgtcagcctagggagaagctcccgtgtcaccttcgggccaaagcaggtactcaggagagttctaagggccccaaagtcactttggctacagatgtgtatgttaagcctgattatgggtgtgaggcaaccaagtatcttgttactataattgcatatggccacttggaggtagcttagttttcttgggtttattttatctaattttagtctttccagaaagcagtaagattagtagcaagtaaaaagtatttgtagtgctggataatttaggaatgatgaatattttttaatacttgattcagtgatttcaaaaggtcgtaacttttagtcatagctactcctgggcaaaattcttcttacagagacaatattaattacaataccacattgtgtatatattttgaaaagaggctggttgcagcagctcacgcctgtaatcccagcactttgggaggctgaggcgggtggataacctgaagtcaggagttcaagaccagcctggccaacatggcaaaaccccatctccactaaaaataccaaaattagccaggcgtggtggagcaagcctgtagtcccagctactcaggaggctgaggcaggagaatcgcttgaacccaggaggcagaggttgcagtgagctgagattgtgccactgcactccagcctgggcgacagagtgagactgtttcaaaaaaaagaaaaagaaaagaaggtattttgtgtttttgtgctacccgttcagcaaaataatgaaattcattgtttctaaacttttttttctgattaaatacaagagtaaaaaaagtgaatggagtgccttttgaatagaatataacaaaaatttatcttaaagaaacgggaagtaacctggcacagtggctcacgcctgtaatcccagcactttgggaggctgaggcaggtggatcacgaggtcaggagatcgagaccatcctgcccaacatggtgaaaccccatctctactaaaaatacaaaaattagctaggtgtgttggcacgtgcctgtagtcccaactactcaggaggctgaggcaagagaatcacttgaactcaggaggcagaggttgcagtgagccaagatcatgccactgcactccagcctggcaacagagtgagactctgtctcaaaaaaaaaaaaagaaacaggaagttcaaatattttgggaggttcttgacagctacaatttggggctagtgacactatacacatataaagaaactttaaagtttcttagtaatgaaggtttgtaatgctattccattacaatagtaactgtctcactgaaaaatgtttcatggaaaatacatattttagattctatgatttgctttaggatgtgaacttctttattttttagagacagggtctcactctgttgcccaggctgtagtgcagtggtacaatcatagctcactgcagccttgatctcctgggctcaagtgatccttatgcctcagcctcccaagtggctgggactacaggcacatgccaccatgcctggctaagttttaaaaaaattttttgtaggaatgaagtctcactatgttgcccaggctggtcttgaacttctggcctcaaatgatcctcttgccttggcctcccaaagtgctcagattacaggcatgagccaccacacgtggcctgaaacctctttaaatccacaatgtttgtatgttaacttaaacaaaattacatcacttaatatgtcaaaacagcctaccctctggtgctgctatgcagaagtactacagaatatgatgccctaggaagaaatcagctaaaaatgtaaccttactcaatgtagttacttcatagaaatcccatcactgacaataatcagctgccaacgaaagctggccatacttgtgacttcctctattcaccacagaccagactgcctaccagttgaaaaagccaggtattttttcaattcaattcaacaggaacaccaaaaaataagaaatgactaagaaacactaagcatttgtaaaattactgggggaggaaggatgaagatacgaacctatgctaaattaaacgattatggccttgaaaatgaagttcctttatagccaagagcttaaattttgttactgatggttttaaaagtattttgtcattttttagtttcaacctagattggaatagccatggcttttctacttcagaaatttcaactcctagaagaatgccctgtccagaagaagtggtcaggagtatcaggaaagccaccagcagagactaggggtttattctgatctggaagagccacttaacactggaatgcacacagtgaaaattaattgttcctcttacactccctctccacaatacttctattattacacttacttcgttctaccttaatgtttttatttagagacaagatctcactctgccaccctggctggagtgcagtggcatgattacagctcactgcagcctcaacctccctggctctagctattctcccatctcagccctccaagtagctgggactacaggtgtgcaccaccatgcacggctaatttttaagtttttgtagatatggggtcttactatgttgcccaggctggtctcaaagtcctgggctcaattaatcctccctcttcagcctcctgtgtaggtgatagtacaggcatgagccaccatgtgcctggccctaccttaatgttaatatctgtctaccttaagaagatataagccttgtaaatataagcaatatcacagttgtagatactcgtgctttttaaatagattaatgaatactactaaaggcaagaaatggtattactaaaactcaagtgaataattaaatgagatcaaaatatttgtgacaggccaggcacggtggcttacgcctgtaatcccagcactttgggaggccaggcggatcacttgagctcagcagttcaagaccagcctgggcaacatggcgaaactccgtctttaccaaaaatacaaaaataagccaagcatggtggcacgtacctgttgttccagcaacttgggggctgaggcaggagaatcacttgagccggggagtttgaggctgcagtgagttgatagcatgccaccacactccagcctgggcaacagagtgagaccctgcctgaaaaaaagcccaggtgtggtggctcacatctgtaatcccagcattttgggattacaaatctgccagcgcaagcagatcacttgaggataggagtttgagaccagcctgaccaacatgttgaaaccccatctcttattaaaatacaaaaattagctgggcgtggtggcatgcgcctgtaatccgagctactcaggtggctgaggcacaagaatcgcttgaacctgggagatggaagttgcaatgagctgagatcaagccactgcactccagcctgggcaacagagcaagactgtctcaaaaaaaaaaaatttgtacagtcatgttcaaagtagcattaattcacaatagccaaaagctggaagtagcccaagtatccaccaatgaatgaaaggataaacaaaatgtggcatatacatacaatggaatattatacagccttaaaaaggaaggaaattcatatacatgctacagcatggataaaccttgaaaaagttatgctaactgaaatcagccagtcacaaaaagacaaatactgtatgattccctttataagagttacctggagcactcaaattcatagagacagtaaaatgatggttaccaggggatgggggagggagaaacaggaaactattctttagtgagtacagaatttcagtttttttgttttgtttttgtttttgtttttgagatggagcctcacactgtcacccaggctggagtgcaatggtgtgatcttggttcactgcaacctctgcctcctaggttcaaatgattcttctgcctcagtctcctgagtctgggattacaggcgcctgccatcatgcccagctaatttttgtatttttaatagagacagggtttcacaggttggccaagctagtctcgaactcctgacctcatgatccgcccacctcgacctcccaaagtgctgggattacaggggtgagccaccatgcccagtccagaatttcaagttttgcaagatgaaaagagttctggagatggttgatggtgatggttgcacaacaatttgaatattttaaatgccaatgaactgttcatttacaaatggttacgatggaatttttctttttcttttttttttcttgagacggagtctcgctctgtcactcaggctagagtgcagtggcactatctcggctcactgcaacctcctcctgctgggttaaagtgattctcttgcctcagcctcccgagcagctgagactacaggcgcgtgccaccatgctcagctaattttttctatttttagtggagacagggtttcaccatgttagccagatggtctcgatctcctgacctcgtgatccacctccctcagcctctcaaagtgctgggattacaggcatgagccaccgtgcacagccaagatggaaatttttatgttctttgtttgatatggtttggctgtgtccccacccaaatctcaacttgaactgtatctctcagaattcccacatgttgtgggagggacccacagggaggtaattgaatcacaagggccggtttttaccatgctttcttgtgatagtgaataagtctcacaagatctgatgggtttatcaggggtttccgattttgcttcttcctcattttctcttgccactcccatgtaagaagtgcctttcgcctcccgccaagattctgaggcttcctcagccatgtggaactttggggacgaaaagaggtttaattggacttaaagttccaattaaagtttcaggtatgtctttatcagcagcatgaaaatgaactaatacagtgttttatcactttttttttttttttttttttttgagatggagtttcgctcttgttgcccaggctggagtgcaatggcgcaacatcaggtcactgcaaactctgcctcccgggttcaagcgattctcttgcctcagcctcctgagtagctgggattacaggcttgtgccaccacacccggctaatttttgtatttttagtagagacagagtttcaccatgttggccaggctagtcttgaactcctgacctcaggtgatccacccaccttggcttcccaaagtgggtggatgacctctgggattacaggcgtgcgccaccgcgctcggtctatattcaccaattttaagatgcacatctttccatattttagtatctctaagttggagtatgtcttacaattaatggcatctgacagttataactggcagcatttgtgactgaaaaacatcttagatgcaatgaaatacagtgtgtgtgtttgtattgtgctgcaatataaaatgtatttcaggccaggtatggtggttcacacctgtaatcccagcactttggaaggccaaagtgggaggatcacttgagcccaggagttcaaggctgcagtgagctctgattataccactgtactccagcctaggcaacagagcaagacccagtctctaaaaaataaatgaaaatgtttcttattgtggatcacagtcaaaagtttgaaaaaacacaatctgtttgaacagcactactttctgacaggaaaaccccaacaggttaggatctgtgtattcctcagagtaagaatttttctaaaaagtttttaaaaacttaaagtcttactgatctcttcctatgctccaattttatagatataacttagccttgcgaggtgatgtaattaaagtctaacttcaagttgctgttgagcatagatctcaggtcttctgacttcacaacacctttctgccactttcagtggatttttccctcctagggaccagaggtcctctactggattaaaagtttctccatcccggcagggtgcggtggctcacgcctgtaatcccaacactttgggaggccaaggcgggcggatcacgaggtcaggaaatagagaccatcctggctaacatggtgaaaccccgtgtctactaaaaatacgaaaaattagccgggtgtggtggtgcgcgcctgtagtcccagctactcgggaggctgaggcaggagaatggcgtgaagccaggaggcggagcttgcaatgagccgagatcgcgccactgcactctagcctgggcgacaaagcgagactctgtctcaaaaaaaaaaaaaaaaaaaaaaaattctccatcccttttgaacaatctggaagtctgtttctcttaaccttcagttcccattccaatcctttgtaacctatttcaggttaagcatttatggaggtgccatgcttaattagccattatggcactcactctatttcaaaggttatcccagaatttggaggctgtaggggaattcagagtgtgaatttcacttgaacagcaccctctgcagacttaaaatattcctcctatatctgaagacaataataatttcttagaatttgctaggctaaacaactattttttagtccagtggcttgtaattaagtcatttttagtctttaattatgttggttgcttttagaattctcttttagagttggtctacatccttttaaaacatgggcaatccaaatttataacagtaaattaagatacataaaaaaaaacactggctaaatttaaaaggaaacacttctagaatatactgtattttgacacaagaccagactgtgctatgtgtatgtggtgtttcaagtaatttaagaaaactgttggaattttctgtatttccagtttcacaagaaacaacctcaaggagggcagtttaactgaaaattcagaggtattatagctctgaagaaaaatactgatgagcagttatacaaaatgagaaattgagttctaagaaatgcatccctaacttcaacataaagatagctatgagaaaacattctttgtacccaaccataaatgaataaaaatcacctcatttctcatcagatgtttactgggttgctagttatatatagaatcctgcaagaggctcaacagggaagtccaaagagtcaatcaagaaggtatgataatggctaaagatggggactgtaggtcaatgctccacgaggttcttcttttgttgcaccaatatagctgcactgttatacccatatggttacaatccaggcctcagaaaatgttgcagatgccctcaccagaaggctgagaaccagttcctcagtttgcatgcctccagacagcactagaagtcaaactcaaattgcttacatggtaacttggtttatcccaacaccaactaggatattccctcaatcacatgattgtactgaaaatataaccaagttttatttatgtttttcatttggtattagccatctggtatttaacctctgaaaaccacacaatcttctatacgcttttttcactggaataaatgaaactgcttacttttga

SEQ ID NO: 172667 - DNA, 2079 bp, Artificial Sequence
  derived and/or modified sequence
atgttctacttccggggctgcggccggtgggtggccgtgagcttcaccaaacaacagtttcccctggcgagattgtcgtcagatagtgccgcgccaaggaccccccacttcgatgtgatcgtcatcggcggaggccatgctgggacagaggccgcgactgcggcagcccggtgtggatccaggacactcctcttaactcatagggttgacacaataggacagatgagctgcaatccttctttcggtggtatcggaaaaggtcacctgatgagagaggtggacgctctggacggtctgtgtagccgcatctgcgaccagagcggtgtgcactataaggtgctgaaccgccggaaaggtccagcagtgtggggcctgagagcccagatcgacaggaaactctataagcagaacatgcagaaggagatcctgaacacccccctcctgactgtgcaggagggcgcggtggaagaccttatactgacggagcctgagcctgagcacaccggaaagtgccgtgttagtggcgttgttctggtggacggctccactgtctacgctgagtcagtcatcctaaccacaggtaccttcttgaggggcatgatcgtgatcgggctggagacacatcctgcaggaagacttggcgatcaacccagcattggcttggctcagacacttgaaaagcttggcttcgtcgtgggacgcttgaaaactgggactcccccaaggattgccaaggagtcgatcaattttagcatcctgaacaaacacatccccgacaatccatccatcccgttctctttcaccaatgaaaccgtttggatcaaacccgaagaccaactgccatgttatctgacgcatacaaatccccgtgtcgacgagatagtgctcaaaaatttacacctgaattcccacgtaaaagagacaacaagagggcccagatactgcccatccatcgaaagcaaggtcctgagatttccaaatcgactgcaccaggtgtggttggagcctgagggcatggattcagacctgatctatccacagggcttgtcgatgactctgccagctgagctgcaggagaagatgatcacgtgtattcgcggcttggaaaaggccaaggtaatccagcccggatacggcgtgcaatatgattacctcgatccacgacagatcacccccagcttagagacgcaccttgtgcaacgcctcttttttgcaggccagattaatggtacgacagggtacgaagaagctgccgctcagggagttattgccggtattaatgcttctctccgcgtctctaggaagccgccttttgtagtgtctagaactgaggggtacatcggggtattaattgatgatctgaccaccttggggacgagcgaaccgtacaggatgtttaccagtagagtagagtttcgcctgagcttgcggcccgacaacgctgacagccgattaaccctgcggggatataaagacgccggctgcgtttcgcagcagcggtacgagcgcgcttgttggatgaagagttctcttgaggaggggattagtgtgttgaaatctatagagttcctctcttcaaagtggaaaaaactgatccctgaggccagtataagtacatcaaggtccctgcctgttcgggcactggacgttctcaagtacgaagaggtggatatggattctttggcaaaagccgtgcctgagcccctcaagaaatataccaagtgtagagaactcgcggagcgcctcaaaatcgaggccacctacgaatcggttctctttcatcagcttcaggaaatcaagggggtgcagcaggatgaagcattgcaactgccaaaagacctcgactatctgacaatccgagatgtgagcctgtcgcacgaggttagagaaaagcttcacttcagtagaccccagacaataggcgcagcttctagaatccccggggtgacccccgccgccatcataaacctgctacgcttcgtcaaaaccacgcaacggagacagagtgcaatgaatgaaagctctaagaccgaccaatacctgtgcgacgcggatcggcttcaggagcgcgaattgtag

SEQ ID NO: 172668 - DNA, 2079 bp, Artificial Sequence
  derived and/or modified sequence
atgttttattttaggggatgtggtcggtgggtggcagtatcattcaccaagcagcaatttcctctggcgagactgtcctctgacagtgccgctcccaggacacctcactttgatgtgattgtgatcgggggtggtcacgcaggcaccgaggctgccactgcagccgcaaggtgcgggtctcgaacgctgcttctgacccacagagtcgacaccatagggcagatgagctgtaacccctcttttgggggaatcggcaagggccacctgatgagagaagttgacgctctggatgggctgtgctccaggatttgtgaccagagcggcgtccactacaaagtcctgaatcgcagaaagggcccagctgtatggggattgagggcccagattgaccggaagctgtacaagcagaacatgcagaaagaaattctgaacacacctctgctgacggtgcaggagggtgcagtcgaggacctcattttgacagaacccgagcccgaacacaccggtaaatgtcgagtctccggtgtggtgctcgtcgacgggtcaaccgtatacgccgagtctgtgatactgacaactggcacctttcttcggggaatgatcgttataggtctggaaacgcaccctgcgggacggttgggtgatcaaccatcaataggactagcccagacactggagaagttgggctttgtggtgggccgtctgaagactgggactcctccgaggatcgcaaaagagagcatcaacttttcgatactgaacaagcacatacctgacaacccttctatacccttcagcttcacaaacgagaccgtatggatcaaaccagaggatcagttaccctgttatctcacccatacaaacccccgagtggatgagatcgtactgaaaaacctgcatctcaacagtcacgtcaaggagactactaggggcccaagatattgtccctctatcgagagcaaggtgctgcgcttcccaaaccgtctgcatcaggtgtggctcgagccagagggtatggacagcgaccttatttatccacagggactttcaatgacgctgccggcagagctgcaggaaaagatgattacttgtattcggggtctggaaaaggcaaaggtcatccaacctggatacggcgtgcagtatgactacctggaccccagacaaataacaccgtcactggaaacccacctggttcagcgcttgttctttgccggacaaattaacggaaccactgggtacgaggaggcagccgcacagggggtaattgcgggaatcaacgcctctctgagggtctctcgcaaaccgccattcgtcgtgtcgcgcaccgagggatatatcggtgtccttattgatgatcttactaccctgggcaccagcgagccatacaggatgttcacctccagggtggaattccgtcttagcctgcgaccggataacgccgactcacgacttacactgcgtgggtacaaggatgctgggtgcgtcagccaacagcgttatgaacgtgcatgctggatgaaatcctcccttgaagagggcatcagcgtgctgaagagcattgagtttctcagctccaagtggaagaaactcattcccgaagcatctataagcacctcacgtagcctgcctgttcgcgcattagacgtattaaagtatgaagaagtggatatggattcattggcgaaggccgtacccgaacccctgaagaaatataccaagtgcagagagctcgctgagagactcaagattgaggcaacctacgagtctgtattgttccaccaacttcaggaaattaagggagtgcagcaagacgaggccctgcagctgcccaaggacctcgattacctgacaatccgcgacgtgagcctgtcccacgaggtccgcgaaaagctccatttttcccgaccccagaccattggcgctgcgtcgcggataccgggtgtcactcccgcagctataatcaacctcctccgtttcgtgaaaacgacacagaggcgacaatcagcgatgaatgaatcctcaaagacggaccaatacctgtgtgacgccgatcgcctacaagaaagagagctgtag

SEQ ID NO: 172669 - protein, 332 aa, Artificial Sequence
  derived and/or modified sequence
MALLCYNRGCGQRFDPETNSDDACTYHPGVPVFHDALKGWSCCKRRTTDFSDFLSIVGCTKGRHNSEKPPEPVKPEVKTTEKKELCELKPKFQEHIIQAPKPVEAIKRPSPDEPMTNLELKISASLKQALDKLKLSSGNEENKKEEDNDEIKIGTSCKNGGCSKTYQGLESLEEVCVYHSGVPIFHEGMKYWSCCRRKTSDFNTFLAQEGCTKGKHMWTKKDAGKKVVPCRHDWHQTGGEVTISVYAKNSLPELSRVEANSTLLNVHIVFEGEKEFDQNVKLWGVIDVKRSYVTMTATKIEITMRKAEPMQWASLELPAAKKQEKQKDATTD

SEQ ID NO: 172670 - DNA, 999 bp, Artificial Sequence
  derived and/or modified sequence
atggccctgctgtgctacaacagaggctgcggccagagattcgaccccgagaccaacagcgacgacgcctgcacctaccaccccggcgtgcccgtgttccacgacgccctgaagggctggagctgctgcaagagaagaaccaccgacttcagcgacttcctgagcatcgtgggctgcaccaagggcagacacaacagcgagaagccccccgagcccgtgaagcccgaggtgaagaccaccgagaagaaggagctgtgcgagctgaagcccaagttccaggagcacatcatccaggcccccaagcccgtggaggccatcaagagacccagccccgacgagcccatgaccaacctggagctgaagatcagcgccagcctgaagcaggccctggacaagctgaagctgagcagcggcaacgaggagaacaagaaggaggaggacaacgacgagatcaagatcggcaccagctgcaagaacggcggctgcagcaagacctaccagggcctggagagcctggaggaggtgtgcgtgtaccacagcggcgtgcccatcttccacgagggcatgaagtactggagctgctgcagaagaaagaccagcgacttcaacaccttcctggcccaggagggctgcaccaagggcaagcacatgtggaccaagaaggacgccggcaagaaggtggtgccctgcagacacgactggcaccagaccggcggcgaggtgaccatcagcgtgtacgccaagaacagcctgcccgagctgagcagagtggaggccaacagcaccctgctgaacgtgcacatcgtgttcgagggcgagaaggagttcgaccagaacgtgaagctgtggggcgtgatcgacgtgaagagaagctacgtgaccatgaccgccaccaagatcgagatcaccatgagaaaggccgagcccatgcagtgggccagcctggagctgcccgccgccaagaagcaggagaagcagaaggacgccaccaccgactag

SEQ ID NO: 172671 - DNA, 2654 bp, Artificial Sequence
  derived and/or modified sequence
atgagagggcggggcggccactttgctgcaggagatacccaaagccagttagcactgaggaagtcagaagagaattgtcagtctctcggacaccttcattttctgccccggaaatttctcctccgctgttgtctgggctccacttccgacccccagttgctaccagctgtagtccgacctatcgtggcccgggctagtgccagcctcccgccgctacctccgcctcgtcccttctcctctgcgcctgcgcgaccggaaaattcgcgaaggttcctgaaacgcaacggatcgtttccggaagccggtagccgcctcagtcgtcagaccggtgctagcgacacgggagtggcaaacgcatcctcttgccgttcccggtgtttgggccttgcctgtgacggtgggaaaagaaaatggccttgctgtgctacaaccggggctgcggtcagcgcttcgatcctgagaccaattccgacgatgcttgcacataccacccaggtgttccggtctttcacgatgcattaaagggttggtcttgctgtaagagaagaacaactgatttttctgatttcttaagcattgtaggctgtacaaaaggtagacataatagtgagaagccacctgagccagtcaaacctgaagtcaagactactgagaagaaggagctatgtgaattaaaacccaaatttcaggaacacatcattcaagcccctaagccagtagaagcaataaaaagaccaagcccagatgaaccaatgacaaatttggaattaaaaatatctgcctccctaaaacaagcacttgataaacttaaactgtcatcagggaatgaagaaaataagaaagaagaagacaatgatgaaattaagattgggacctcatgtaagaatggagggtgttcaaagacataccagggtctagagagtctagaagaagtctgtgtatatcattctggagtacctattttccatgaggggatgaaatactggagctgttgtagaagaaaaacttctgattttaatacattcttagcccaagagggctgtacaaaagggaaacacatgtggactaaaaaagatgctgggaaaaaagttgttccatgtagacatgactggcatcagactggaggtgaagttaccatttcagtatatgctaaaaactcacttccagaacttagccgagtagaagcaaatagcacattgttaaatgtgcatattgtatttgaaggagagaaggaatttgatcaaaatgtgaaattatggggtgtgattgatgtaaagcgaagttatgtaactatgactgcaacaaagattgaaatcactatgagaaaagctgaaccgatgcagtgggcaagccttgaactgcctgcagctaaaaagcaggaaaaacaaaaagatgccacaacagattgagtgggagatggaaggaaggctattacattatttccgaatttttaatactgtgtgaagtggtggcttgctgctgtaatcttttgttttgttgttgtgttactgaatgtggcatttcagggttaacattaggttcttaaaagccaaagtcagtttgtctttttgtgcctctcatctttcttttgtgttatgtaagattgattattcatttctccctactggtaggaaccatagttgtgtcctatacttgaagaggctggaaagtagcccataaccataattgcagtatttctttgtatttctctgttaagcaaagaaatattaaggaacattttttttatgtttttgtattattccataattagtaaagcaagatgaaatgtcaaattttaatcagttttttcatggatttgtgttcttacagtacttgaaaatatttaaggaagagatgaagctctgcagttttttctatgtgggatgattacttttttaaggaggattaattctgaggtagtatagtaactaaaggggaatatatgaattgtttaacaaattagaatttgtttacaactacttgaatttttaaattatgtcaaaacttacattacttgccaagcagtatgatgttataggaaacataaataagattacagaggtatcaatttggttaaaattcaccattttataagactaagcaataatcttaacaacctctttcctgaatatttaaatgtgtttgtatggtgttatgactaattgttactgatttagagactaagccctcttaaaacctttagttaaatataaaaagaaattatatatatcttgcctccctgatggaaaactatataaaattgtagacttaaaaggtttgtggaaatacattaggatatcagaaaactaaatatatggagttgctttatgactattacatgttaaataaaaatagcttaattgttttggagtttttttttaaagtcatgaagagcttcacaattctagtgatacaatgttgactatatattgtactttatattaaatataggtaatacagaattagatcgtttggataggttttgagttagtgcagaactcaagaagaaaaattaggaaatattctgaaggccagaactctggaagaacttagaaagtttgggaataaattaaacttatgtagatttaaaattaaaaggggtttatttcccaaaccccttgagtcttttcttttccttggtatttatggaattc

SEQ ID NO: 172672 - DNA, 999 bp, Artificial Sequence
  derived and/or modified sequence
atggctctgctctgctataaccgagggtgtgggcagcggttcgacccagaaaccaattccgatgacgcctgtacctaccatcccggggtgccagtatttcatgatgccctcaaaggttggtcttgttgtaagcggcggaccaccgatttttccgattttctgagtatcgtgggatgcacgaagggtcgccacaactccgaaaagcccccagagcctgttaagcctgaagtcaaaaccacggagaagaaagaactgtgcgagttgaaacccaaatttcaggagcatatcatccaggcgccaaaacccgtcgaagctatcaagcgtcctagccccgatgagcccatgaccaatctcgaattgaagatttcagcaagccttaagcaggctctggacaagctgaaactctcctctggcaatgaggaaaacaagaaagaggaggacaacgacgagatcaagatagggacaagttgcaagaacggggggtgtagcaagacataccaaggtttagaatctctggaagaagtttgcgtgtaccactccggtgtccccatcttccacgaagggatgaagtactggtcctgctgtagaaggaagacttccgatttcaacactttcctagcacaggaggggtgtaccaaagggaagcacatgtggaccaaaaaggatgctggcaaaaaggtcgttccctgtcgccatgactggcaccaaacagggggcgaggtgacgatctcagtctatgctaagaattctctcccagagctttccagagttgaggccaactccacacttctgaacgtgcacatagtctttgagggagagaaggagttcgaccagaatgtgaaactgtggggggttatcgacgtgaagaggtcttatgtcacaatgaccgcgaccaaaatcgaaataacaatgaggaaagccgagcccatgcaatgggcctccctggagctgcccgccgcaaagaagcaggagaagcaaaaggacgccaccaccgattag

SEQ ID NO: 172673 - DNA, 999 bp, Artificial Sequence
  derived and/or modified sequence
atggccctgctgtgctacaacagaggctgcggccagagatttgatcctgagaccaacagtgatgatgcctgcacctaccaccctggggtgcctgtgttccatgatgccctgaagggctggagctgctgcaagaggaggaccacagacttcagtgacttcctgagcatcgtgggctgcaccaagggccgccacaacagcgagaagcccccagagcctgtgaagccagaggtgaagaccacagagaagaaggagctgtgtgagctgaagcccaagttccaggagcacatcatccaggcccccaagcctgtggaggccatcaagaggcccagcccagatgagcccatgaccaacctggagctgaagatcagcgccagcctgaagcaggccctggacaagctgaagctgagcagtggaaatgaggagaacaagaaggaggaggacaatgatgagatcaagattggcaccagctgcaagaatggaggctgcagcaagacctaccagggcctggagagcctggaggaggtgtgtgtgtaccacagcggcgtgcccatcttccacgagggcatgaagtactggagctgctgcaggaggaagaccagtgacttcaacaccttcctggcccaggagggctgcaccaagggcaagcacatgtggaccaagaaggatgctgggaagaaggtggtgccctgcagacatgactggcaccagacaggaggagaggtgaccatctctgtgtatgccaagaacagcctgcctgagctgagccgggtggaggccaacagcaccctgctgaatgtgcacatcgtgtttgaaggagagaaggagtttgaccagaatgtgaagctgtggggcgtgattgatgtgaagaggagctatgtgaccatgacagccaccaagattgagatcaccatgaggaaggccgagcccatgcagtgggccagcctggagctgcctgctgccaagaagcaggagaagcagaaggatgccaccacagactag

SEQ ID NO: 172674 - DNA, 999 bp, Artificial Sequence
  derived and/or modified sequence
atggccctgctgtgctacaaccggggctgcggccagcggttcgacccagagactaactctgatgacgcatgtacctaccatcctggagtaccagtgttccatgatgccctcaaggggtggtcatgctgcaaacgaagaaccaccgacttttcggactttctgagcatcgtaggttgcaccaaaggcagacataacagtgaaaaacctcccgagcccgtaaagcctgaggttaaaactacagaaaagaaagaactctgtgagctaaaacccaaattccaagagcatattatacaggcccccaagcctgtagaagccattaagaggcctagtccggatgaaccaatgaccaaccttgagttgaaaatttctgcatcactgaagcaggccctagacaagctcaaactgagctctggtaacgaggagaacaaaaaagaagaggataatgacgagatcaagatagggacgtcttgcaagaatggcgggtgctccaagacttaccaggggctggaaagcctcgaggaagtctgtgtatatcatagtggagtccctattttccatgaagggatgaaatactggtcctgctgtcggcggaagacctccgacttcaacactttccttgcccaagaaggttgtactaaaggcaagcacatgtggaccaagaaggatgctgggaaaaaagtggtgccttgccgacatgattggcaccagacaggaggcgaagtcactattagcgtgtacgcaaaaaacagcctgcccgagttgtccagggtcgaggctaacagcactctcttgaacgtccacatcgtattcgagggagagaaggagttcgatcagaacgttaaactgtggggagtgatcgatgttaagaggtcatatgtcacaatgacagctactaaaattgaaattacgatgagaaaggccgagccaatgcaatgggccagcctggagttgcctgcagccaaaaagcaggagaagcagaaggatgctaccacagattag

SEQ ID NO: 172675 - DNA, 999 bp, Artificial Sequence
  derived and/or modified sequence
atggcattgttgtgttacaaccggggttgcggtcagagattcgaccctgaaaccaactctgacgacgcctgcacataccaccccggtgtgccagtgttccacgatgcgttaaaaggatggtcctgctgtaagcggaggaccacagatttctcagatttcctgagcattgtgggatgtaccaaagggagacataattccgagaagccgccagagcccgtgaagccggaagtcaagacgactgagaagaaggagctgtgcgagcttaagcccaagttccaagagcatatcattcaggcccctaagcccgtcgaggctattaaacggccaagtcccgatgaaccaatgaccaacctggaattaaaaatcagcgcctcgctgaaacaggcactagacaaattgaaacttagctcgggcaacgaagagaacaagaaggaggaggataatgacgaaataaagatcgggacctcttgtaaaaacggtgggtgtagtaagacatatcaaggccttgaatctctagaggaggtttgtgtgtaccatagcggagtccccatctttcacgagggcatgaaatactggtcctgttgcaggcggaaaactagcgatttcaatacattccttgcacaggaaggatgtaccaaggggaagcacatgtggacaaagaaagatgcgggaaaaaaggtcgtaccttgtaggcatgactggcatcagactggcggagaagtgactatcagcgtgtatgcaaaaaattcactgccagagctttctcgagtcgaggccaacagcacactgctgaacgtccacattgtatttgagggtgagaaggagttcgatcaaaacgtcaagctgtggggagtgatcgatgttaaaagaagttatgtcaccatgacagctacgaaaatcgagatcacgatgcgcaaagcagagccaatgcagtgggcatctcttgaactcccggcagctaaaaagcaagaaaaacagaaggatgctacaaccgactag

SEQ ID NO: 172676 - protein, 239 aa, Artificial Sequence
  derived and/or modified sequence
MASTAVQLLGFLLSFLGMVGTLITTILPHWRRTAHVGTNILTAVSYLKGLWMECVWHSTGIYQCQIYRSLLALPQDLQAARALMVISCLLSGIACACAVIGMKCTRCAKGTPAKTTFAILGGTLFILAGLLCMVAVSWTTNDVVQNFYNPLLPSGMKFEIGQALYLGFISSSLSLIGGTLLCLSCQDEAPYRPYQAPPRATTTTANTAPAYQPPAAYKDNRAPSVTSATHSGYRLNDYV

SEQ ID NO: 172677 - DNA, 720 bp, Artificial Sequence
  derived and/or modified sequence
atggcatccactgctgtccaactgctagggtttctgttgagcttccttggaatggtggggacactaattactaccattctgccacattggcgccgaacagctcacgttggcacgaacattttgaccgctgtgtcctacctgaagggattgtggatggagtgtgtgtggcatagcacaggcatttatcagtgtcagatttaccgaagtttattggctttgcctcaagacctgcaggccgcgagagcattaatggtgatcagctgcctgctgagtggcatcgcctgtgcatgcgcagtgatagggatgaagtgcaccagatgcgcgaaaggcactcccgccaagactacatttgccatcttgggtggaacactctttatactggcaggcctgctgtgcatggtggctgtctcttggacgacaaatgacgtagtacaaaacttttacaatcctctgctcccatcaggcatgaaatttgaaatcggccaagctttgtatctgggattcatttcatctagcctgtcgctgatcggcggaacactgttgtgtctgtcgtgtcaggatgaggctccttaccgaccataccaggcccctccgagagcaaccacaactacagcaaacacagcccccgcatatcagccacccgctgcctacaaggataaccgagccccatccgtcacgagcgccacccatagtggttacagactcaatgattatgtttag

SEQ ID NO: 172678 - DNA, 720 bp, Artificial Sequence
  derived and/or modified sequence
atggctagtactgcagtgcagctcctcggatttctgttgtcattcctgggaatggtgggcacactgatcacaactatactgccccattggcggcggaccgcacacgtcggcaccaacatcctcacagcagttagttatctgaaagggctgtggatggaatgcgtgtggcatagtaccgggatttaccagtgccagatctatagaagcctgctcgcgctgccccaggacctgcaggcggccagggccctcatggtcatcagttgccttctcagcgggattgcctgcgcttgtgccgttattggaatgaagtgcactagatgcgcaaagggaacacccgcgaagaccacttttgctatcctgggggggacactcttcatattggccggcctactctgtatggtggcagtgtcttggaccaccaacgatgtggtacaaaatttctataaccccctcctgccatctggtatgaagtttgaaatcgggcaagcactgtatttagggtttatttcctcatccctctccctcataggcggtactctcttgtgcttaagttgccaagatgaagcaccctacagaccctaccaggccccgcccagagcaacgactaccacagcaaataccgcacccgcctatcagccaccagctgcctataaagacaacagagctccatcagtcacgtctgccacccattctggatacaggcttaatgattatgtgtag

SEQ ID NO: 172679 - DNA, 720 bp, Artificial Sequence
  derived and/or modified sequence
atggcttccacggctgttcagctgctggggttcctgctgtcattcctggggatggtgggaacactcatcactactattctcccccattggagacgcacagcccacgtgggtaccaatatcttaaccgcggtgtcatatcttaagggtctatggatggagtgcgtatggcactctaccgggatctaccaatgccaaatctaccgcagcctgctcgctcttccccaagacctgcaagcagccagagcactcatggtaatctcatgtctattaagtggtattgcctgcgcctgcgccgttatcggaatgaagtgcacacgctgcgcaaagggaacccctgccaaaaccacttttgcgatactggggggcaccctgttcattctggccgggctgctgtgtatggtggcggtgtcttggacgacaaatgatgtcgttcagaatttctacaacccgctccttccgtcgggaatgaaattcgagatcggacaggcgctgtatttgggatttatcagtagtagccttagtttgattggcggtactttactgtgcctctcctgtcaggatgaggctccatatagaccataccaggcgccgccccgtgcaactactaccactgctaataccgcacctgcataccagccacccgcagcgtacaaggataatagggctccatctgttacttctgccacacactcagggtaccgactcaatgattatgtgtag

SEQ ID NO: 172680 - DNA, 720 bp, Artificial Sequence
  derived and/or modified sequence
atggccagtaccgctgtgcaactgctgggcttcctcctgtcatttctcggcatggtaggcacactgattacaacgatcctgcctcactggcgacggacagcgcatgtcggtactaatatcttgacggccgtgtcctatctaaaaggcctatggatggagtgcgtttggcattccactggtatctaccagtgccagatctatagatccctgctggcgctgcctcaggatttacaggccgccagagcgctgatggttatctcttgcttgctctctggtattgcctgcgcgtgcgctgtcataggcatgaaatgcacccgctgcgccaaggggacccccgccaagactacatttgcaattctggggggaacgctatttatattagcaggcctgctctgcatggtagcagtgtcctggacaaccaacgatgtggtgcagaatttttataatcccttgctgcctagcgggatgaagtttgaaatcggtcaggccctgtatctggggtttattagcagcagccttagcctcattggaggcacactcctctgtctgagctgtcaagatgaggctccatacaggccataccaggcccccccaagagccactaccacaacagccaacaccgcccccgcctaccagccccctgctgcttacaaagataaccgtgcacctagcgtgacttcagcaactcatagcggatacagacttaacgactatgtatag

SEQ ID NO: 172681 - DNA, 720 bp, Artificial Sequence
  derived and/or modified sequence
atggccagtaccgccgttcagctgctgggttttctgctaagcttcctgggaatggttgggaccctcataacgacaatactcccgcattggaggcgcactgcgcatgtgggcaccaacatcctgacggccgtcagttatctgaaaggactctggatggaatgcgtctggcattccacaggaatatatcagtgccagatctatcgaagtctgctggccctgccacaggaccttcaggctgctcgcgccctgatggtgatctcctgtctgctcagcggtattgcctgtgcctgtgccgtcataggcatgaagtgcactcgctgcgcaaaaggcacgcccgcaaaaactacattcgctatacttggcggaaccctctttattttagcagggcttctgtgcatggtggcagttagctggaccacaaatgacgtcgtgcagaatttctacaatccgctactcccatcagggatgaaattcgaaatcggccaggctctgtatttggggttcataagtagctcccttagtcttattggcggaaccctactgtgcttgtcgtgccaggacgaagccccctacagaccttaccaggcccccccaagggcgacaacgacaacagcaaacacagcccctgcctaccaacccccagcggcatacaaggacaaccgcgctccctccgtgactagcgccactcattctggatataggctcaacgattacgtgtag

SEQ ID NO: 172682 - DNA, 720 bp, Artificial Sequence
  derived and/or modified sequence
atggccagcacagctgtgcagctgctgggcttcctgctgtccttcctgggcatggtgggcaccctcatcaccaccatcctgccccactggaggagaacagcccacgtgggcaccaacatcctgacagctgtgtcctacctgaagggcctgtggatggagtgtgtgtggcacagcacaggcatctaccagtgccagatctaccgcagcctgctggccctgccccaggacctgcaggccgcccgggccctgatggtgatcagctgcctgctgtctggaattgcctgtgcctgtgccgtcatcggcatgaagtgcacccgctgtgccaagggcaccccagccaagaccacctttgccatcctgggcggcaccctcttcatcctggccggcctgctgtgcatggtggccgtgtcctggaccaccaatgatgtggtgcagaacttctacaaccccctgctgcccagcggcatgaagtttgagatcggccaggccctgtacctgggcttcatcagcagcagcctgagcctcatcggcggcaccctgctgtgcctgagctgccaggatgaggccccctaccggccctaccaggccccaccccgggccaccaccaccacagccaacacagccccagcctaccagcccccagctgcctacaaggacaacagagcccccagcgtgaccagcgccacccacagcggctaccgcctgaatgactatgtgtag

SEQ ID NO: 172683 - DNA, 720 bp, Artificial Sequence
  derived and/or modified sequence
atggccagcaccgccgtgcagctgctgggcttcctgctgagcttcttgggaatggtcggaacactcatcaccaccattctccctcactggcgaagaacagcccacgttggcactaatattcttacagcggtgtcctatctgaagggattatggatggagtgcgtgtggcactccacgggaatctaccagtgccagatttacaggtcactgctggctctcccacaggaccttcaagccgccagagcactgatggttatctcctgtctgctgtctggcatcgcttgtgcctgcgccgtcattggcatgaaatgtaccaggtgcgccaaggggacacctgcaaagacaacattcgccattctgggcggcacactgtttattctggcggggctcctttgtatggtggcagtgtcctggacaaccaacgacgttgtgcaaaacttttataacccactactgccctcgggaatgaagtttgaaatcgggcaggcactttacctgggattcatttccagctcacttagtctgattgggggcacacttctttgtctgagttgtcaagatgaggctccatatcgcccttatcaggcaccccctcgcgccacaaccactacggcgaatactgcacctgcttaccagcccccggcagcctacaaagataaccgtgcaccctctgtcacctcagcgacccactctggttaccgactcaatgattatgtttag

SEQ ID NO: 172684 - DNA, 720 bp, Artificial Sequence
  derived and/or modified sequence
atggccagcaccgccgtgcagctgctgggcttcctgctgagcttcttgggaatggttggaacactcataaccactatactgccccattggagacgtactgctcacgtgggcactaacattctgaccgctgtaagctatctgaaaggcctttggatggagtgtgtatggcacagtaccgggatctaccagtgccagatctacagaagccttctggccttgccacaggatcttcaggcggcccgcgccctgatggtcatctcttgtcttctgagcggcatagcctgtgcttgtgctgtgatcgggatgaaatgcaccagatgcgccaaaggaacgccagccaaaacaaccttcgctattcttggaggcaccttgttcattttggcgggcctgctgtgcatggtcgcggtttcatggactacaaacgacgttgttcagaatttttataatccactgctgccttcgggaatgaagttcgaaataggtcaagcactgtatctgggtttcataagctcctctctttccttaattggcggaactctcctctgtctcagctgccaggacgaggccccctacaggccgtaccaggcccctccaagagctaccaccacgaccgccaacaccgctcctgcataccagccaccagccgcatacaaagacaatcgtgctccatcagtaacctctgccactcactctggctaccgattgaacgattatgtttag

SEQ ID NO: 172685 - DNA, 720 bp, Artificial Sequence
  derived and/or modified sequence
atggccagcaccgccgtgcagctgctgggcttcctgctgagcttcctgggcatggtgggcacattgatcaccacaattcttccacactggcgcaggacagcacacgtgggcacaaatatcctgaccgcggtgagttatctgaaaggactgtggatggagtgtgtgtggcacagcaccggcatctaccagtgccagatctacaggagtctgttggcactgccccaagacttacaggcggccagggccttgatggtgatcagttgcctgttgtcaggaattgcgtgcgcatgtgccgttattggcatgaaatgtacacgctgtgccaaaggcacccctgcaaagaccacttttgccatccttggtggcactctctttattttagccggattactttgcatggtcgccgtgagttggaccacgaacgatgtggtccaaaacttctacaaccctttgctgccctccggcatgaagtttgagatcggccaggcattatatctaggattcatatcctcctcgctgtccctcattgggggcacactgctgtgcctctcgtgccaggacgaagccccatacaggccctaccaggctcctcctcgcgcgacgaccactacagcaaacaccgccccagcctaccagccccctgccgcctacaaagacaatcgagccccctccgtcactagcgctacgcatagtggatacaggctgaacgattacgtgtag

SEQ ID NO: 172686 - DNA, 720 bp, Artificial Sequence
  derived and/or modified sequence
atggccagcaccgccgtgcagctgctgggcttcctgctgagcttcctgggcatggtggggactttgattaccactattctgccacattggagacgaaccgcccacgtaggcacaaacattctgacggccgtgagttatctcaaaggactgtggatggaatgcgtttggcatagtaccgggatctaccagtgtcagatttatcgatccctgctggccttaccccaagatctacaggccgcacgcgccctcatggtgatctcatgtctcctctccggtatcgcttgtgcttgtgccgtcattggtatgaaatgcactcgctgcgccaaaggtacgcccgcaaagaccacctttgccatcctgggcggtaccctcttcattctggccgggttgctgtgcatggttgcagtgtcatggacaacgaacgatgtggttcagaatttttataaccctctgctacccagcggcatgaagttcgaaatcgggcaggccctgtacctgggcttcatctcatcctctctctcattgataggtggaacactgctttgtctcagctgtcaggacgaggcaccctatcgcccttatcaggcgccccctagggccacaaccacaacggcgaacacggcccccgcctaccagcctcccgcggcctataaggataaccgagccccctccgtgacgtccgcaacccatagcggatatagattaaatgactacgtgtag

SEQ ID NO: 172687 - DNA, 720 bp, Artificial Sequence
  derived and/or modified sequence
atggccagcaccgccgtgcagctgctgggcttcctgctgagcttcttaggcatggtgggcaccctaatcaccacaattttgccccactggagacgaactgcccatgtgggaactaacattctgacagcagtttcgtatctgaaaggcctgtggatggaatgcgtgtggcactcgacaggcatataccagtgtcagatctaccggtccttgctggctctgcctcaggatctgcaggccgctagagctcttatggtgattagttgtctgctttctggaatcgcatgcgcctgcgctgtcatcggaatgaaatgcactcgttgtgccaaaggcactccagctaagactacctttgccatccttggaggaaccctgttcatccttgcagggctcctgtgtatggtggccgtcagttggacaaccaacgacgtggtacagaacttctataatccactcctgcccagcgggatgaagttcgagattgggcaggccttatatttgggattcatcagtagtagtttgtcactgattggcggcacactgctgtgtctgagctgccaagatgaagcaccctatcggccttaccaggcacccccccgcgccaccactaccacagcaaacacagcgcctgcctaccagccccctgcagcatacaaggataaccgggcacccagcgtgacctctgccactcacagcggctatcgtttgaatgactacgtatag

SEQ ID NO: 172688 - DNA, 720 bp, Artificial Sequence
  derived and/or modified sequence
atggcgagcacggccgtccagctgctggggttcttgttatcctttcttgggatggttgggaccctcattaccaccatacttcctcattggcgcagaactgcccatgtgggcaccaatattctgacagctgtcagctatctgaaaggtctgtggatggaatgtgtttggcatagcacgggaatctaccagtgtcagatctaccggagcctgctggctcttccacaggacctgcaggctgctcgtgccctcatggtgattagctgtctcctgagcggaattgcttgtgcttgtgctgtgattgggatgaagtgtacgagatgtgcaaaagggacaccagctaaaaccacgtttgcaatactcggcggaacgttattcattctcgccggtttgttgtgtatggtggctgtcagttggaccacaaacgatgtagtccagaacttctataaccctttacttcctagtgggatgaaatttgaaattggccaggccctctatctgggcttcatctcgagctccctgagcctgattggcggaacccttttgtgtctttcttgtcaggatgaggcgccatataggccttatcaggcaccccctcgggctacgaccaccactgccaacactgcccctgcttaccaacccccagcagcatataaggacaaccgcgcaccatctgtgacatctgccacccactccgggtatcgccttaacgattatgtttag

SEQ ID NO: 172689 - DNA, 720 bp, Artificial Sequence
  derived and/or modified sequence
atggcaagcaccgcagttcaactgttaggcttcctgttgagctttcttggtatggtaggaacactgatcaccaccatcctgccgcattggagaaggactgctcatgtcggtacaaacatcttgaccgcagtttcctacctaaaaggactatggatggagtgcgtgtggcattctaccggcatctatcagtgccagatctatcgctccctcttggccctaccgcaggacctgcaggcggcacgcgcactgatggtgatctcatgcctgcttagcggtattgcgtgcgcctgcgcggtgattgggatgaaatgtacccgctgtgcaaagggtacccccgctaagacgacatttgccatcttgggcggtaccctcttcatcctggcgggactgttatgtatggtcgctgttagctggacgaccaacgacgtggtgcagaatttctataaccctttgctgccttccgggatgaaatttgaaattggacaggctctgtacctgggattcatttcctcctccctgagtctcatcgggggtacccttttatgtttgagctgtcaggacgaggcaccgtaccgcccttatcaggcacctcctagggctaccacaacaacggctaacacagcgcctgcctatcagccgccagctgcatacaaggataacagggccccaagtgtcacctctgccacacattccgggtacaggctgaacgattacgtttag

SEQ ID NO: 172690 - DNA, 720 bp, Artificial Sequence
  derived and/or modified sequence
atggcaagcacggctgtgcagctgctgggttttcttctgagcttcctgggcatggtgggaaccctcatcaccacgatcctacctcattggcgccgaaccgcccacgtgggcactaacatacttactgcggtgagctatctgaagggtctctggatggagtgtgtctggcactcaacaggaatttatcagtgtcaaatatatcgttcactgctggccctgccacaggacctccaagctgcacgcgcactcatggttatctcctgtctgctctccggcatcgcctgtgcctgtgcagtgattgggatgaaatgcacccgctgcgcaaaggggactccagctaagaccacatttgcgatcctggggggtacactgtttatcctggcagggctgctctgcatggtagctgtgtcctggactaccaatgatgttgtccagaatttctataaccccctcctcccaagcggtatgaagttcgagattggccaggccctgtacctcgggttcatttcatcttcattatctctaatcggcggaactctgctttgcttgagctgtcaggacgaagcgccatacaggccctaccaggcaccgcctcgcgcaaccacaaccaccgccaacacagcgccagcctatcagccccctgcggcttacaaggataatagggccccttcagtgactagtgccactcactcaggctaccgactgaacgactatgtgtag

SEQ ID NO: 172691 - DNA, 720 bp, Artificial Sequence
  derived and/or modified sequence
atggccagcaccgccgtccagctgttgggattcctgctgagcttccttggcatggtgggcacgctaattaccactatcctcccccactggagacgcaccgcccacgttggaacaaacatcctgacagcagtgagctacttgaagggcctgtggatggagtgcgtctggcattcaacaggcatataccagtgtcagatctatcgaagtttactggctcttccccaggatcttcaggcagccagagccttaatggtcatctcgtgcctgctgtcaggcatcgcctgcgcctgtgccgtgattggtatgaagtgcacccgctgtgctaagggcactcctgcaaagaccaccttcgctattctaggcggaactctcttcattctggctggcctgttgtgcatggtcgcagtgagttggacgacaaatgatgtggtgcagaacttttacaatcctctcttacccagtggcatgaaattcgagatcggtcaagctctttacctgggcttcatcagttcttccttaagtctgattggcggaacactgctgtgcctcagttgccaagatgaggctccctacaggccctaccaagcaccgccacgggcaactacgactactgctaacaccgccccagcgtatcagcccccagccgcatataaagacaacagggccccttccgtcacatccgcaacgcacagcggttaccgtctaaacgattatgtctag

SEQ ID NO: 172692 - DNA, 720 bp, Artificial Sequence
  derived and/or modified sequence
atggcctctactgcggtgcagctcttgggtttcctgttgagcttccttggcatggtgggaactctgatcacaacaattctccctcactggaggagaactgcccatgtgggcacgaatatactcacggccgtgtcttacctcaagggcttgtggatggagtgtgtttggcattctactggcatctatcagtgccagatctaccggagcctgctcgccctgccccaggacttgcaagctgctcgggcactgatggtcatcagctgcctgctgtccggtattgcttgtgcttgtgctgttatcggcatgaagtgcacacgctgtgccaagggcacccctgccaagaccacttttgccatcctgggtggcactctctttatacttgccggattactgtgtatggtagctgtgagctggaccactaatgatgtggtgcagaacttttataatcccctgttacccagtggaatgaagttcgaaattggtcaagcactgtatttgggcttcatctcctcttccctctccctgattggcggaacactgttatgtctgtcttgccaagacgaagccccttaccgcccttaccaggcgcctccccgtgccaccacaactactgccaacactgctccagcttaccaacccccagccgcttacaaagataatcgggctccatctgtgacctccgcaacccactccggatacagactgaacgattacgtatag

SEQ ID NO: 172693 - DNA, 1453 bp, Artificial Sequence
  derived and/or modified sequence
ggggagggcaagctgggaaaagctgagagaggcaggcagcccagccaggcagaagtcacgagccaggcacctgccaagagagggagtaagatgttcaagaggagctccggaagaactttcagatatagcactggacttggctgaggacacagcagcacggggctgcaaggcccagagatctggacacaagccaagaagtcaagaactgttgaagccgcagtctccactctcctactgacaccagagaccacccagcccagccaaaccatatggcctcttgttttcctgatgtatgagggctccggctggcacctgaggagcggcgtgaccccgagggcccagggagctgcccggctggcctaggcaggcagccgcaccatggccagcacggccgtgcagcttctgggcttcctgctcagcttcctgggcatggtgggcacgttgatcaccaccatcctgccgcactggcggaggacagcgcacgtgggcaccaacatcctcacggccgtgtcctacctgaaagggctctggatggagtgtgtgtggcacagcacaggcatctaccagtgccagatctaccgatccctgctggcgctgccccaagacctccaggctgcccgcgccctcatggtcatctcctgcctgctctcgggcatagcctgcgcctgcgccgtcatcgggatgaagtgcacgcgctgcgccaagggcacacccgccaagaccacctttgccatcctcggcggcaccctcttcatcctggccggcctcctgtgcatggtggccgtctcctggaccaccaacgacgtggtgcagaacttctacaacccgctgctgcccagcggcatgaagtttgagattggccaggccctgtacctgggcttcatctcctcgtccctctcgctcattggtggcaccctgctttgcctgtcctgccaggacgaggcaccctacaggccctaccaggccccgcccagggccaccacgaccactgcaaacaccgcacctgcctaccagccaccagctgcctacaaagacaatcgggccccctcagtgacctcggccacgcacagcgggtacaggctgaacgactacgtgtgagtccccacagcctgcttctcccctgggctgctgtgggctgggtccccggcgggactgtcaatggaggcaggggttccagcacaaagtttacttctgggcaatttttgtatccaaggaaataatgtgaatgcgaggaaatgtctttagagcacagggacagagggggaaataagaggaggagaaagctctctataccaaagactgaaaaaaaaaatcctgtctgtttttgtatttattatatatatttatgtgggtgatttgataacaagtttaatataaagtgacttgggagtttggtcagtggggttggtttgtgatccaggaataaaccttgcggatgtggctgtttatgaaa

SEQ ID NO: 172694 - DNA, 1752 bp, Artificial Sequence
  derived and/or modified sequence
cgccaggtggtggctcagaggaggacacagtcgctgtgggcaggtggtcagggcgcaggagggaatgagctgtggatttttagtaatctacaacaatcaggcagttccaggacacagggaagtgagtgtgaacagccaatggacccggagccgagagcctgggcaggcgtaggctggactatggacgccctgcaaccctgccaggctgggaaggggaggcttgatcctgagcgcgtgttaggaaggagatgcccaggttcaggtgtatcgtgcattttttttccacagtgcagaaatgacatttctggttggtcttgaatgtctgctctggccaagccacctcctctcatgctagctaaccaagtggcacgtgtgcccacgcaggccattctaaggaacactgtaattgtctagacaattttctctcaaatactccgtcctggaagcgtctggttggcagaagagggaaggcaggagggtggcagcgtcccggctgagtcctcttgcacatgggagctggagtccagccaggctccagagcggctccggctggcaagggacctgaacaggaagatgagactcgaggttttctgcatggctccggctggcacctgaggagcggcgtgaccccgagggcccagggagctgcccggctggcctaggcaggcagccgcaccatggccagcacggccgtgcagcttctgggcttcctgctcagcttcctgggcatggtgggcacgttgatcaccaccatcctgccgcactggcggaggacagcgcacgtgggcaccaacatcctcacggccgtgtcctacctgaaagggctctggatggagtgtgtgtggcacagcacaggcatctaccagtgccagatctaccgatccctgctggcgctgccccaagacctccaggctgcccgcgccctcatggtcatctcctgcctgctctcgggcatagcctgcgcctgcgccgtcatcgggatgaagtgcacgcgctgcgccaagggcacacccgccaagaccacctttgccatcctcggcggcaccctcttcatcctggccggcctcctgtgcatggtggccgtctcctggaccaccaacgacgtggtgcagaacttctacaacccgctgctgcccagcggcatgaagtttgagattggccaggccctgtacctgggcttcatctcctcgtccctctcgctcattggtggcaccctgctttgcctgtcctgccaggacgaggcaccctacaggccctaccaggccccgcccagggccaccacgaccactgcaaacaccgcacctgcctaccagccaccagctgcctacaaagacaatcgggccccctcagtgacctcggccacgcacagcgggtacaggctgaacgactacgtgtgagtccccacagcctgcttctcccctgggctgctgtgggctgggtccccggcgggactgtcaatggaggcaggggttccagcacaaagtttacttctgggcaatttttgtatccaaggaaataatgtgaatgcgaggaaatgtctttagagcacagggacagagggggaaataagaggaggagaaagctctctataccaaagactgaaaaaaaaaatcctgtctgtttttgtatttattatatatatttatgtgggtgatttgataacaagtttaatataaagtgacttgggagtttggtcagtggggttggtttgtgatccaggaataaaccttgcggatgtggctgtttatgaaa

SEQ ID NO: 172695 - DNA, 1330 bp, Artificial Sequence
  derived and/or modified sequence
agcggccatgagctggtgtgcagccgcccaggaggggggctgcaaggcccagagatctggacacaagccaagaagtcaagaactgttgaagccgcagtctccactctcctactgacaccagagaccacccagcccagccaaaccatatggcctcttgttttcctgatgtatgagggctccggctggcacctgaggagcggcgtgaccccgagggcccagggagctgcccggctggcctaggcaggcagccgcaccatggccagcacggccgtgcagcttctgggcttcctgctcagcttcctgggcatggtgggcacgttgatcaccaccatcctgccgcactggcggaggacagcgcacgtgggcaccaacatcctcacggccgtgtcctacctgaaagggctctggatggagtgtgtgtggcacagcacaggcatctaccagtgccagatctaccgatccctgctggcgctgccccaagacctccaggctgcccgcgccctcatggtcatctcctgcctgctctcgggcatagcctgcgcctgcgccgtcatcgggatgaagtgcacgcgctgcgccaagggcacacccgccaagaccacctttgccatcctcggcggcaccctcttcatcctggccggcctcctgtgcatggtggccgtctcctggaccaccaacgacgtggtgcagaacttctacaacccgctgctgcccagcggcatgaagtttgagattggccaggccctgtacctgggcttcatctcctcgtccctctcgctcattggtggcaccctgctttgcctgtcctgccaggacgaggcaccctacaggccctaccaggccccgcccagggccaccacgaccactgcaaacaccgcacctgcctaccagccaccagctgcctacaaagacaatcgggccccctcagtgacctcggccacgcacagcgggtacaggctgaacgactacgtgtgagtccccacagcctgcttctcccctgggctgctgtgggctgggtccccggcgggactgtcaatggaggcaggggttccagcacaaagtttacttctgggcaatttttgtatccaaggaaataatgtgaatgcgaggaaatgtctttagagcacagggacagagggggaaataagaggaggagaaagctctctataccaaagactgaaaaaaaaaatcctgtctgtttttgtatttattatatatatttatgtgggtgatttgataacaagtttaatataaagtgacttgggagtttggtcagtggggttggtttgtgatccaggaataaaccttgcggatgtggctgtttatgaaa

SEQ ID NO: 172696 - DNA, 1942 bp, Artificial Sequence
  derived and/or modified sequence
cgccaggtggtggctcagaggaggacacagtcgctgtgggcaggtggtcagggcgcaggagggaatgagctgtggatttttagtaatctacaacaatcaggcagttccaggacacagggaagtgagtgtgaacagccaatggacccggagccgagagcctgggcaggcgtaggctggactatggacgccctgcaaccctgccaggctgggaaggggaggcttgatcctgagcgcgtgttaggaaggagatgcccaggttcaggtgtatcgtgcattttttttccacagtgcagaaatgacatttctggttggtcttgaatgtctgctctggccaagccacctcctctcatgctagctaaccaagtggcacgtgtgcccacgcaggccattctaaggaacactgtaattgtctagacaattttctctcaaatactccgtcctggaagcgtctggttggcagaagagggaaggcaggagggtggcagcgtcccggctgagtcctcttgcacatgggagctggagtccagccaggctccagagcggctccggctggcaagggacctgaacaggaagatgagactcgaggttttctgcatgcctggaagtgcacatgctcatctacagctttcttggaagaagaaagaaacaaaaactgagatttagaacaccaggtctgtttccactggcggccactcttgggcactggagaccagcaagagctttgtttttaaaaggctcttccatggcagatattcgcagaggcatcagggctacacttaaatgaagggctccggctggcacctgaggagcggcgtgaccccgagggcccagggagctgcccggctggcctaggcaggcagccgcaccatggccagcacggccgtgcagcttctgggcttcctgctcagcttcctgggcatggtgggcacgttgatcaccaccatcctgccgcactggcggaggacagcgcacgtgggcaccaacatcctcacggccgtgtcctacctgaaagggctctggatggagtgtgtgtggcacagcacaggcatctaccagtgccagatctaccgatccctgctggcgctgccccaagacctccaggctgcccgcgccctcatggtcatctcctgcctgctctcgggcatagcctgcgcctgcgccgtcatcgggatgaagtgcacgcgctgcgccaagggcacacccgccaagaccacctttgccatcctcggcggcaccctcttcatcctggccggcctcctgtgcatggtggccgtctcctggaccaccaacgacgtggtgcagaacttctacaacccgctgctgcccagcggcatgaagtttgagattggccaggccctgtacctgggcttcatctcctcgtccctctcgctcattggtggcaccctgctttgcctgtcctgccaggacgaggcaccctacaggccctaccaggccccgcccagggccaccacgaccactgcaaacaccgcacctgcctaccagccaccagctgcctacaaagacaatcgggccccctcagtgacctcggccacgcacagcgggtacaggctgaacgactacgtgtgagtccccacagcctgcttctcccctgggctgctgtgggctgggtccccggcgggactgtcaatggaggcaggggttccagcacaaagtttacttctgggcaatttttgtatccaaggaaataatgtgaatgcgaggaaatgtctttagagcacagggacagagggggaaataagaggaggagaaagctctctataccaaagactgaaaaaaaaaatcctgtctgtttttgtatttattatatatatttatgtgggtgatttgataacaagtttaatataaagtgacttgggagtttggtcagtggggttggtttgtgatccaggaataaaccttgcggatgtggctgtttatgaaa

SEQ ID NO: 172697 - DNA, 1231 bp, Artificial Sequence
  derived and/or modified sequence
tgtaaagaggatgtgtttgcttcaccttctgccaggattgtaagtttcctgaggcctccccagtcctgcggaactggctccggctggcacctgaggagcggcgtgaccccgagggcccagggagctgcccggctggcctaggcaggcagccgcaccatggccagcacggccgtgcagcttctgggcttcctgctcagcttcctgggcatggtgggcacgttgatcaccaccatcctgccgcactggcggaggacagcgcacgtgggcaccaacatcctcacggccgtgtcctacctgaaagggctctggatggagtgtgtgtggcacagcacaggcatctaccagtgccagatctaccgatccctgctggcgctgccccaagacctccaggctgcccgcgccctcatggtcatctcctgcctgctctcgggcatagcctgcgcctgcgccgtcatcgggatgaagtgcacgcgctgcgccaagggcacacccgccaagaccacctttgccatcctcggcggcaccctcttcatcctggccggcctcctgtgcatggtggccgtctcctggaccaccaacgacgtggtgcagaacttctacaacccgctgctgcccagcggcatgaagtttgagattggccaggccctgtacctgggcttcatctcctcgtccctctcgctcattggtggcaccctgctttgcctgtcctgccaggacgaggcaccctacaggccctaccaggccccgcccagggccaccacgaccactgcaaacaccgcacctgcctaccagccaccagctgcctacaaagacaatcgggccccctcagtgacctcggccacgcacagcgggtacaggctgaacgactacgtgtgagtccccacagcctgcttctcccctgggctgctgtgggctgggtccccggcgggactgtcaatggaggcaggggttccagcacaaagtttacttctgggcaatttttgtatccaaggaaataatgtgaatgcgaggaaatgtctttagagcacagggacagagggggaaataagaggaggagaaagctctctataccaaagactgaaaaaaaaaatcctgtctgtttttgtatttattatatatatttatgtgggtgatttgataacaagtttaatataaagtgacttgggagtttggtcagtggggttggtttgtgatccaggaataaaccttgcggatgtggctgtttatgaaa

SEQ ID NO: 172698 - DNA, 720 bp, Artificial Sequence
  derived and/or modified sequence
atggccagcaccgccgtgcagctgctgggcttcctgctgagcttcctgggcatggtgggcaccctgatcaccaccatcctgccccactggagaagaaccgcccacgtgggcaccaacatcctgaccgccgtgagctacctgaagggcctgtggatggagtgcgtgtggcacagcaccggcatctaccagtgccagatctacagaagcctgctggccctgccccaggacctgcaggccgccagagccctgatggtgatcagctgcctgctgagcggcatcgcctgcgcctgcgccgtgatcggcatgaagtgcaccagatgcgccaagggcacccccgccaagaccaccttcgccatcctgggcggcaccctgttcatcctggccggcctgctgtgcatggtggccgtgagctggaccaccaacgacgtggtgcagaacttctacaaccccctgctgcccagcggcatgaagttcgagatcggccaggccctgtacctgggcttcatcagcagcagcctgagcctgatcggcggcaccctgctgtgcctgagctgccaggacgaggccccctacagaccctaccaggccccccccagagccaccaccaccaccgccaacaccgcccccgcctaccagccccccgccgcctacaaggacaacagagcccccagcgtgaccagcgccacccacagcggctacagactgaacgactacgtgtag

SEQ ID NO: 172699 - protein, 155 aa, Artificial Sequence
  derived and/or modified sequence
  misc_feature (1)..(1): Xaa can be any naturally occurring amino acid
XAGSFSCTMKFTVRDCDPNTGVPDEDGYDDEYVLEDLEVTVSDHIQKVLKPNFAAAWEEVGDTFEKEETFALSSTKTLEEAVNNIITFLGMQPCERSDKVPENKNSHSLYLAGIFRGGYDLLVRSRLALADGVTMQVTVRSKERTPVDVILASVG

SEQ ID NO: 172700 - DNA, 468 bp, Artificial Sequence
  derived and/or modified sequence
taagccggcagcttcagttgtaccatgaagttcactgtgagggattgcgacccaaacacgggcgtccctgacgaggatggttacgacgacgaatacgtgctggaagatctcgaggttacagtgagtgaccacatccaaaaggtgctgaagcccaattttgcggctgcctgggaagaagtcggtgatacctttgagaaagaggagacgtttgctctgagcagtactaagacactggaggaggcagtgaacaatatcattaccttcctggggatgcagccctgcgagagaagcgataaggtgcctgagaataagaactcccactctctctatcttgcgggcatattcagaggaggctatgatcttctggtccgcagtagactagccttagccgacggggtgacaatgcaagtcacagtgcggtccaaggagagaacgcccgtggatgtgattctggcgtctgtaggctag

SEQ ID NO: 172701 - DNA, 468 bp, Artificial Sequence
  derived and/or modified sequence
tgagctggcagcttcagctgcaccatgaagttcaccgtgcgggactgtgaccccaacacaggagtgcctgatgaagatggctatgatgatgaatatgtgctggaggacctggaggtgacagtgtctgaccacatccagaaggtgctgaagcccaactttgctgctgcctgggaggaggtgggggacacctttgagaaggaggagacctttgccctgagcagcaccaagaccctggaggaggccgtgaacaacatcatcaccttcctgggcatgcagccctgtgagaggagtgacaaggtgcctgagaacaagaacagccacagcctgtacctggccggcatcttccggggcggctatgacctgctggtgcgcagccggctggccctggctgatggagtgaccatgcaggtgacagtgcgcagcaaggagaggacccctgtggatgtgatcctggcctctgtgggctag

SEQ ID NO: 172702 - DNA, 468 bp, Artificial Sequence
  derived and/or modified sequence
tgagccggcagcttcagctgcaccatgaagttcaccgtgcgggactgcgatccaaatacgggggtgccggacgaggatggatatgacgatgagtacgtactcgaggatctggaagtgacagtcagcgatcatatccagaaggtgttaaagcccaactttgctgctgcatgggaggaagtgggtgatacctttgaaaaggaggagacatttgcactgagttcaaccaagacactggaggaagctgttaataacatcataactttccttgggatgcagccgtgtgagcgctcggacaaggttcccgaaaataagaattcccattctttgtatttggcaggcatctttcgcggcggatacgacctgttggtacgttctcggctcgcccttgcagatggagtgacaatgcaggtcacggtaaggtctaaagaacgtactcccgtcgacgtgattctcgcgagcgtcggatag

SEQ ID NO: 172703 - DNA, 468 bp, Artificial Sequence
  derived and/or modified sequence
tgagcaggaagttttagttgcactatgaagttcacggttcgagactgtgacccgaataccggtgttcctgatgaggacggatacgacgacgagtatgtgctcgaggatctcgaagtcacggtgagtgaccacatccagaaagttctcaagcctaacttcgccgcagcctgggaagaggtcggcgacaccttcgagaaagaggagacattcgctctgtcatcgaccaaaaccctggaggaggctgtaaacaatatcatcacatttcttggaatgcagccatgtgaaagatcagacaaggtaccagaaaataagaattcccatagcctatatctggcgggaatctttcgagggggttatgatttgcttgtcaggtcacgcctagctcttgccgatggtgtcacaatgcaggtcacggtgcgcagcaaggagaggactccggtggacgtcattttggcgagtgttggctag

SEQ ID NO: 172704 - DNA, 895 bp, Artificial Sequence
  derived and/or modified sequence
ttgcaggctcctttagctgcaccatgaagtttacagtccgggactgtgaccctaacactggagttccagatgaggatgggtatgatgatgagtatgtgctggaagatctcgaagtgactgtgtctgaccatattcagaaagtactgaagcctaactttgctgctgcttgggaagaggtgggagatacctttgagaaagaggaaacctttgccctcagttctaccaaaacccttgaagaggctgtcaacaatatcatcacatttctgggcatgcagccatgtgagaggtccgataaagtacctgagaacaagaattcccattcgctctatctggcaggtatattcagaggtggctatgatttattggtgaggtccaggctggccttagccgatggagtgaccatgcaggtgactgtcagaagtaaagagagaacacctgtagatgttatcttagcttctgttggataaatgcttactggacaagaggaaactgatgcacactacatggtcagtgggcttttaggctagtggcatcagtttcccagaatcagacttttgaagatgaatgactttggagaagcaaattaaacatttggccctgagccagcagatcaagcaaatgtctatctttgcgcatgggttgtttttttttttttttctttttattctacttggtcagctttgggacgatagtgcagctttgggtgatcttgaaaatcaaatactatcctatactccagctgcttaacttcattttattctttaatgtgtacctgaaagctcctggcaatgctggaaaatttttatcccagaggggtgggggggaggggggaggggaagccagagtccacttttgtcacaattcatttttattaatagaaaataaacacttattc

SEQ ID NO: 172705 - DNA, 468 bp, Artificial Sequence
  derived and/or modified sequence
tgagccggcagcttcagctgcaccatgaagttcaccgtgagagactgcgaccccaacaccggcgtgcccgacgaggacggctacgacgacgagtacgtgctggaggacctggaggtgaccgtgagcgaccacatccagaaggtgctgaagcccaacttcgccgccgcctgggaggaggtgggcgacaccttcgagaaggaggagaccttcgccctgagcagcaccaagaccctggaggaggccgtgaacaacatcatcaccttcctgggcatgcagccctgcgagagaagcgacaaggtgcccgagaacaagaacagccacagcctgtacctggccggcatcttcagaggcggctacgacctgctggtgagaagcagactggccctggccgacggcgtgaccatgcaggtgaccgtgagaagcaaggagagaacccccgtggacgtgatcctggccagcgtgggctag

SEQ ID NO: 172706 - protein, 600 aa, Artificial Sequence
  derived and/or modified sequence
MSRVAKYRRQVSEDPDIDSLLETLSPEEMEELEKELDVVDPDGSVPVGLRQRNQTEKQSTGVYNREAMLNFCEKETKKLMQREMSMDESKQVETKTDAKNGEERGRDASKKALGPRRDSDLGKEPKRGGLKKSFSRDRDEAGGKSGEKPKEEKIIRGIDKGRVRAAVDKKEAGKDGRGEERAVATKKEEEKKGSDRNTGLSRDKDKKREEMKEVAKKEDDEKVKGERRNTDTRKEGEKMKRAGGNTDMKKEDEKVKRGTGNTDTKKDDEKVKKNEPLHEKEAKDDSKTKTPEKQTPSGPTKPSEGPAKVEEEAAPSIFDEPLERVKNNDPEMTEVNVNNSDCITNEILVRFTEALEFNTVVKLFALANTRADDHVAFAIAIMLKANKTITSLNLDSNHITGKGILAIFRALLQNNTLTELRFHNQRHICGGKTEMEIAKLLKENTTLLKLGYHFELAGPRMTVTNLLSRNMDKQRQKRLQEQRQAQEAKGEKKDLLEVPKAGAVAKGSPKPSPQPSPKPSPKNSPKKGGAPAAPPPPPPPLAPPLIMENLKNSLSPATQRKMGDKVLPAQEKNSRDQLLAAIRSSNLKQLKKVEVPKLLQ

SEQ ID NO: 172707 - protein, 600 aa, Artificial Sequence
  derived and/or modified sequence
MSRVAKYRRQVSEDPDIDSLLETLSPEEMEELEKELDVVDPDGSVPVGLRQRNQTEKQSTGVYNREAMLNFCEKETKKLMQREMSMDESKQVETKTDAKNGEERGRDASKKALGPRRDSDLGKEPKRGGLKKSFSRDRDEAGGKSGEKPKEEKIIRGIDKGRVRAAVDKKEAGKDGRGEERAVATKKEEEKKGSDRNTGLSRDKDKKREEMKEVAKKEDDEKVKGERRNTDTRKEGEKMKRAGGNTDMKKEDEKVKRGTGNTDTKKDDEKVKKNEPLHEKEAKDDSKTKTPEKQTPSGPTKPSEGPAKVEEEAAPSIFDEPLERVKNNDPEMTEVNVNNSDCITNEILVRFTEALEFNTVVKLFALANTRADDHVAFAIAIMLKANKTITSLNLDSNHITGKGILAIFRALLQNNTLTELRFHNQRHICGGKTEMEIAKLLKENTTLLKLGYHFELAGPRMTVTNLLSRNMDKQRQKRLQEQRQAQEAKGEKKDLLEVPKAGAVAKGSPKPSPQPSPKPSPKNSPKKGGAPAAPPPPPPPLAPPLIMENLKNSLSPATQRKMGDKVLPAQEKNSRDQLLAAIRSSNLKQLKKLELPLLLQ

SEQ ID NO: 172708 - protein, 549 aa, Artificial Sequence
  derived and/or modified sequence
MSRVAKYRRQVSEDPDIDSLLETLSPEEMEELEKELDVVDPDGSVPVGLRQRNQTEKQSTGVYNREAMLNFCEKETKKLMQREMSMDESKQVETKTDAKEEKIIRGIDKGRVRAAVDKKEAGKDGRGEERAVATKKEEEKKGSDRNTGLSRDKDKKREEMKEVAKKEDDEKVKGERRNTDTRKEGEKMKRAGGNTDMKKEDEKVKRGTGNTDTKKDDEKVKKNEPLHEKEAKDDSKTKTPEKQTPSGPTKPSEGPAKVEEEAAPSIFDEPLERVKNNDPEMTEVNVNNSDCITNEILVRFTEALEFNTVVKLFALANTRADDHVAFAIAIMLKANKTITSLNLDSNHITGKGILAIFRALLQNNTLTELRFHNQRHICGGKTEMEIAKLLKENTTLLKLGYHFELAGPRMTVTNLLSRNMDKQRQKRLQEQRQAQEAKGEKKDLLEVPKAGAVAKGSPKPSPQPSPKPSPKNSPKKGGAPAAPPPPPPPLAPPLIMENLKNSLSPATQRKMGDKVLPAQEKNSRDQLLAAIRSSNLKQLKKVEVPKLLQ

SEQ ID NO: 172709 - protein, 507 aa, Artificial Sequence
  derived and/or modified sequence
MSTFGYRRGLSKYESIDEDELLASLSAEELKELERELEDIEPDRNLPVGLRQKSLTEKTPTGTFSREALMAYWEKESQKLLEKERLGECGKVAEDKEERTIETAKGINGTVNYDSVNSDNSKPKIFKSQIENINLTNGSNGRNTESPAAIHPCGNPTVIEDALDKIKSNDPDTTEVNLNNIENITTQTLTRFAEALKDNTVVKTFSLANTHADDSAAMAIAEMLKVNEHITNVNVESNFITGKGILAIMRALQHNTVLTELRFHNQRHIMGSQVEMEIVKLLKENTTLLRLGYHFELPGPRMSMTSILTRNMDKQRQKRLQEQKQQEGYDGGPNLRTKVWQRGTPSSSPYVSPRHSPWSSPKLPKKVQTVRSRPLSPVATPPPPPPPPPPPPPSSQRLPPPPPPPPPPLPEKKLITRNIAEVIKQQESAQRALQNGQKKKKGKKVKKQPNSILKEIKNSLRSVQEKKMEDSSRPSTPQRSAHENLMEAIRGSSIKQLKRVEVPEALR

SEQ ID NO: 172710 - DNA, 1803 bp, Artificial Sequence
  derived and/or modified sequence
atgagcagagtggccaagtacagaagacaggtgagcgaggaccccgacatcgacagcctgctggagaccctgagccccgaggagatggaggagctggagaaggagctggacgtggtggaccccgacggcagcgtgcccgtgggcctgagacagagaaaccagaccgagaagcagagcaccggcgtgtacaacagagaggccatgctgaacttctgcgagaaggagaccaagaagctgatgcagagagagatgagcatggacgagagcaagcaggtggagaccaagaccgacgccaagaacggcgaggagagaggcagagacgccagcaagaaggccctgggccccagaagagacagcgacctgggcaaggagcccaagagaggcggcctgaagaagagcttcagcagagacagagacgaggccggcggcaagagcggcgagaagcccaaggaggagaagatcatcagaggcatcgacaagggcagagtgagagccgccgtggacaagaaggaggccggcaaggacggcagaggcgaggagagagccgtggccaccaagaaggaggaggagaagaagggcagcgacagaaacaccggcctgagcagagacaaggacaagaagagagaggagatgaaggaggtggccaagaaggaggacgacgagaaggtgaagggcgagagaagaaacaccgacaccagaaaggagggcgagaagatgaagagagccggcggcaacaccgacatgaagaaggaggacgagaaggtgaagagaggcaccggcaacaccgacaccaagaaggacgacgagaaggtgaagaagaacgagcccctgcacgagaaggaggccaaggacgacagcaagaccaagacccccgagaagcagacccccagcggccccaccaagcccagcgagggccccgccaaggtggaggaggaggccgcccccagcatcttcgacgagcccctggagagagtgaagaacaacgaccccgagatgaccgaggtgaacgtgaacaacagcgactgcatcaccaacgagatcctggtgagattcaccgaggccctggagttcaacaccgtggtgaagctgttcgccctggccaacaccagagccgacgaccacgtggccttcgccatcgccatcatgctgaaggccaacaagaccatcaccagcctgaacctggacagcaaccacatcaccggcaagggcatcctggccatcttcagagccctgctgcagaacaacaccctgaccgagctgagattccacaaccagagacacatctgcggcggcaagaccgagatggagatcgccaagctgctgaaggagaacaccaccctgctgaagctgggctaccacttcgagctggccggccccagaatgaccgtgaccaacctgctgagcagaaacatggacaagcagagacagaagagactgcaggagcagagacaggcccaggaggccaagggcgagaagaaggacctgctggaggtgcccaaggccggcgccgtggccaagggcagccccaagcccagcccccagcccagccccaagcccagccccaagaacagccccaagaagggcggcgcccccgccgcccccccccccccccccccccccctggccccccccctgatcatggagaacctgaagaacagcctgagccccgccacccagagaaagatgggcgacaaggtgctgcccgcccaggagaagaacagcagagaccagctgctggccgccatcagaagcagcaacctgaagcagctgaagaaggtggaggtgcccaagctgctgcagtag

SEQ ID NO: 172711 - DNA, 1803 bp, Artificial Sequence
  derived and/or modified sequence
atgagcagagtggccaagtacagaagacaggtgagcgaggaccccgacatcgacagcctgctggagaccctgagccccgaggagatggaggagctggagaaggagctggacgtggtggaccccgacggcagcgtgcccgtgggcctgagacagagaaaccagaccgagaagcagagcaccggcgtgtacaacagagaggccatgctgaacttctgcgagaaggagaccaagaagctgatgcagagagagatgagcatggacgagagcaagcaggtggagaccaagaccgacgccaagaacggcgaggagagaggcagagacgccagcaagaaggccctgggccccagaagagacagcgacctgggcaaggagcccaagagaggcggcctgaagaagagcttcagcagagacagagacgaggccggcggcaagagcggcgagaagcccaaggaggagaagatcatcagaggcatcgacaagggcagagtgagagccgccgtggacaagaaggaggccggcaaggacggcagaggcgaggagagagccgtggccaccaagaaggaggaggagaagaagggcagcgacagaaacaccggcctgagcagagacaaggacaagaagagagaggagatgaaggaggtggccaagaaggaggacgacgagaaggtgaagggcgagagaagaaacaccgacaccagaaaggagggcgagaagatgaagagagccggcggcaacaccgacatgaagaaggaggacgagaaggtgaagagaggcaccggcaacaccgacaccaagaaggacgacgagaaggtgaagaagaacgagcccctgcacgagaaggaggccaaggacgacagcaagaccaagacccccgagaagcagacccccagcggccccaccaagcccagcgagggccccgccaaggtggaggaggaggccgcccccagcatcttcgacgagcccctggagagagtgaagaacaacgaccccgagatgaccgaggtgaacgtgaacaacagcgactgcatcaccaacgagatcctggtgagattcaccgaggccctggagttcaacaccgtggtgaagctgttcgccctggccaacaccagagccgacgaccacgtggccttcgccatcgccatcatgctgaaggccaacaagaccatcaccagcctgaacctggacagcaaccacatcaccggcaagggcatcctggccatcttcagagccctgctgcagaacaacaccctgaccgagctgagattccacaaccagagacacatctgcggcggcaagaccgagatggagatcgccaagctgctgaaggagaacaccaccctgctgaagctgggctaccacttcgagctggccggccccagaatgaccgtgaccaacctgctgagcagaaacatggacaagcagagacagaagagactgcaggagcagagacaggcccaggaggccaagggcgagaagaaggacctgctggaggtgcccaaggccggcgccgtggccaagggcagccccaagcccagcccccagcccagccccaagcccagccccaagaacagccccaagaagggcggcgcccccgccgcccccccccccccccccccccccctggccccccccctgatcatggagaacctgaagaacagcctgagccccgccacccagagaaagatgggcgacaaggtgctgcccgcccaggagaagaacagcagagaccagctgctggccgccatcagaagcagcaacctgaagcagctgaagaagctggagctgcccctgctgctgcagtag

SEQ ID NO: 172712 - DNA, 1650 bp, Artificial Sequence
  derived and/or modified sequence
atgagcagagtggccaagtacagaagacaggtgagcgaggaccccgacatcgacagcctgctggagaccctgagccccgaggagatggaggagctggagaaggagctggacgtggtggaccccgacggcagcgtgcccgtgggcctgagacagagaaaccagaccgagaagcagagcaccggcgtgtacaacagagaggccatgctgaacttctgcgagaaggagaccaagaagctgatgcagagagagatgagcatggacgagagcaagcaggtggagaccaagaccgacgccaaggaggagaagatcatcagaggcatcgacaagggcagagtgagagccgccgtggacaagaaggaggccggcaaggacggcagaggcgaggagagagccgtggccaccaagaaggaggaggagaagaagggcagcgacagaaacaccggcctgagcagagacaaggacaagaagagagaggagatgaaggaggtggccaagaaggaggacgacgagaaggtgaagggcgagagaagaaacaccgacaccagaaaggagggcgagaagatgaagagagccggcggcaacaccgacatgaagaaggaggacgagaaggtgaagagaggcaccggcaacaccgacaccaagaaggacgacgagaaggtgaagaagaacgagcccctgcacgagaaggaggccaaggacgacagcaagaccaagacccccgagaagcagacccccagcggccccaccaagcccagcgagggccccgccaaggtggaggaggaggccgcccccagcatcttcgacgagcccctggagagagtgaagaacaacgaccccgagatgaccgaggtgaacgtgaacaacagcgactgcatcaccaacgagatcctggtgagattcaccgaggccctggagttcaacaccgtggtgaagctgttcgccctggccaacaccagagccgacgaccacgtggccttcgccatcgccatcatgctgaaggccaacaagaccatcaccagcctgaacctggacagcaaccacatcaccggcaagggcatcctggccatcttcagagccctgctgcagaacaacaccctgaccgagctgagattccacaaccagagacacatctgcggcggcaagaccgagatggagatcgccaagctgctgaaggagaacaccaccctgctgaagctgggctaccacttcgagctggccggccccagaatgaccgtgaccaacctgctgagcagaaacatggacaagcagagacagaagagactgcaggagcagagacaggcccaggaggccaagggcgagaagaaggacctgctggaggtgcccaaggccggcgccgtggccaagggcagccccaagcccagcccccagcccagccccaagcccagccccaagaacagccccaagaagggcggcgcccccgccgcccccccccccccccccccccccctggccccccccctgatcatggagaacctgaagaacagcctgagccccgccacccagagaaagatgggcgacaaggtgctgcccgcccaggagaagaacagcagagaccagctgctggccgccatcagaagcagcaacctgaagcagctgaagaaggtggaggtgcccaagctgctgcagtag

SEQ ID NO: 172713 - DNA, 1803 bp, Artificial Sequence
  derived and/or modified sequence
atgtctcgcgtggcaaagtataggcgccaggtgtcggaggacccggacattgattccctcctggaaacgttatctcccgaggagatggaggagctggaaaaagagctggatgttgttgaccctgacggctccgtgccggtcgggctgaggcagagaaaccagactgagaagcagagcacaggcgtttataaccgcgaggcaatgctgaacttctgcgaaaaggagacaaaaaaactgatgcagcgtgagatgagtatggatgaaagcaaacaggttgaaaccaaaacagatgccaagaatggagaagagagaggccgggacgcatcaaagaaggccctgggaccccggcgggactccgaccttggaaaagagcctaaacggggtggtctgaaaaaatccttttcacgggatagggacgaggccggaggcaaatctggcgagaagcctaaggaagaaaaaatcatccgtgggatagacaaaggacgggtgagggcagcagtagataaaaaggaggctggcaaagatggacggggggaagaaagggcagtggccactaagaaagaagaagagaaaaagggttccgatcggaacactgggttgtccagggacaaggataagaaaagggaggagatgaaagaggtggccaagaaagaggacgacgagaaagttaaaggcgaaaggcgcaacacagacaccaggaaggagggcgagaagatgaagcgcgcaggcggaaataccgatatgaagaaggaagacgaaaaggtcaagagggggacaggaaatacggatacaaagaaggacgatgagaaggtgaagaaaaacgaaccactccacgagaaagaggccaaggatgatagtaagaccaaaacaccagagaaacagactcctagcggccccacaaagccatctgagggaccagcaaaggtcgaagaagaagccgcgccctcaattttcgacgaacccttagaaagggtcaagaacaatgatcccgaaatgaccgaggtaaacgtcaacaactcggattgcattacaaatgaaatattagttaggttcacagaagcgcttgaatttaatacagtggtcaagctgttcgccttggccaatacgagggctgatgaccacgttgctttcgccattgcaatcatgttgaaagcaaataaaaccataacaagccttaatctggacagcaatcatattactgggaagggaatccttgctattttcagagctctgttacaaaacaacacactcactgaattgcggtttcacaatcagaggcatatctgcggagggaaaaccgagatggagatagccaagctcctgaaggaaaatactactttattgaagcttggctaccactttgagctggctggtccacggatgaccgtcacaaacctgctttcaagaaacatggataagcagcgccagaagaggctgcaagaacagcgacaggcccaggaagcaaagggtgaaaagaaggacctgctagaagtgcctaaagcaggcgctgtggcaaaagggagccctaaaccaagccctcaaccgtccccaaagccttccccaaagaacagcccaaagaagggaggcgcacccgccgctcctcccccgccacccccacccctggcccctcccctgattatggagaatctcaagaattccctaagtccggctactcaacggaagatgggcgacaaggttctacctgcacaggagaaaaacagtcgtgaccagctgctggcggcaatccggagcagcaacttgaagcagctcaaaaaggttgaagttccaaagctcttacagtag

SEQ ID NO: 172714 - DNA, 3970 bp, Artificial Sequence
  derived and/or modified sequence
gttgtcgggtcttattggccgctgattagaccagccggggtccactagccctgggcttcagggaggctgctgcgtccagtgaacacttcagcacctgtagcacagaagggccaaggagctgcagtcctcgaccagcaggaggtttgctcctcagcccactcgctgcatccagatcagctcacccctctcccttccctgcccaccaggactctgatagcccctggcagccacagcccattttgccaagatgtctagagtagccaaatatcgccggcaggtgagtgaagaccccgacatcgacagcctgctggagaccctgtctcccgaggagatggaggagctggagaaggagctggacgtggtggacccagacgggagtgttcccgtggggctgcggcagagaaaccagacggagaaacagtccacgggtgtgtacaaccgggaggccatgctcaacttctgtgaaaaggagaccaagaaacttatgcagagggagatgtccatggatgaaagcaagcaagtggagaccaagacagatgccaagaatggagaggaaaggggcagagatgccagcaaaaaagccctgggccccagacgggactcagatctggggaaggagccaaagaggggtggtttaaagaaaagcttctctagagacagagatgaagctggtggcaagagtggcgagaagcccaaggaggagaagatcatccggggcattgacaagggccgggtcagggctgcagtggataagaaggaggcagggaaggatgggagaggagaggagagggcagtggccaccaagaaggaagaggagaagaaagggagtgacaggaacacaggcttgagcagggacaaggataaaaagagagaggagatgaaggaggtggccaagaaagaggatgatgagaaggtaaaaggggagcgtaggaacacagacaccagaaaagagggtgagaagatgaaaagagcaggtgggaacacagacatgaaaaaggaggatgagaaggtaaaaagaggaactgggaacacagacaccaaaaaggacgatgaaaaagtcaagaagaatgaacccttacatgaaaaggaagccaaggatgacagcaagaccaaaacacccgagaaacagacgcccagtggccccaccaagccctctgaaggaccggccaaggtggaggaggaggcagctcccagcatatttgatgagcctctggagagagtgaagaacaatgaccccgagatgactgaggtgaacgtcaacaactcagactgcatcacaaatgagatcttggtccggtttactgaggctctggagttcaacactgtggttaagctgttcgccttggccaacacgcgagccgatgaccacgtggcctttgccattgccatcatgctcaaggccaacaagaccatcaccagcctcaacctggactccaaccacatcacaggcaaaggcatcctggccatcttccgggccctcctccagaacaacacgctgaccgagctccgcttccacaaccagcgacacatctgtggaggcaagacggagatggagatcgccaagctgctgaaggagaatactaccctgctcaagctgggctaccattttgagctggccgggccccgaatgactgtcaccaatctgctcagccgcaacatggacaagcagagacaaaagcggctgcaggagcaaaggcaggcacaggaagccaagggagagaagaaggatctgctggaggtacccaaggccggggccgtggctaagggctccccaaaaccttcacctcaaccatctccaaagccctctccaaagaactcacccaaaaaagggggtgctccagctgccccaccaccccctccccctcccttggctccaccccttatcatggagaacctgaagaattcactctcaccagctacccagaggaagatgggagacaaagtcctccctgcccaggagaagaactcccgtgaccagctattggctgccatccgctccagcaacctcaagcagctcaagaaggtggaagtgcccaaactgcttcagtaggaccaggctgccaggcaccatctgccaatgccatgactgctcaggcctcacctcccagggctacacagaccctgcccaccccatccctggctgacctgctgtggatgtccctattctgccatgggagagtccaggcctgggtcacgctcaaggaaggatgccttatctcttctcactttccttttcttgtctctgaggctctccaaattttgctttagtacatggagctcaggtttctggacaagaagagtccttttagcacatcactgagaagatggcactgtccagggcccatgtagctggcaagctgcaaaaggcctgtgatccaggaaagatgtcccacagggaccacatccaccccagccccactgccctccagggccaggattcaggcctctgaggagcccacggggcaaagctgctgggccagtggcactctgtgtgggaaaatggcagaaagatggagaggcatgggggcccaaaggggagcgtggggaggggctgaggataccccaaagtccaggctaattagaggatgtggcaggggcagtggcctggatgcacagtgcctgatgggagtaggctccagacaggaggagtgggacagacagcagctggacttgaaggtttgatgccaaagcagacattttcctcacacccacctgctgctgtatgaatagctgtgtatctgtttttccataagattttgataatatatacaaacctttagctgtgaatggctgtgccccacctgttgtcctgaactgtgagtcctgatcctaaccctgggctccctggaggactctagaagctcaggttccctgccacactatttgagttggccaagaaataaattcacatcctcagaaagtgcagcatggaggaaaatctgaactctaagcagaagactctccactgacctggttgtccaggtctagaaggccaggcctctactaggtctgctcctgaaccagtcctgctgcctggagtcagtagccagagttgttctcaggggtgctggggcagagtggagcccagggtgctgggatggctatattaggcatgttcagggatgctcattccatgactctgcctaaccatgggctcagggccaggtcctcacagcagtcacaggcccaggaaggcggcaggcagagaagtggagtgactatttggagaatagcacccatatctgtgtgccctagggctcagaggggcctcatcttccccagccctccccacctgctcaccaattccacttcctgccccaactgcaggaatgctgacaatgctgccatgcccaccatcgggtgtaggtgaaaggcatctttctgaatttcattctcttgaaggtgctgccaccccttggcactgtggaactgccaccttgggtctgtgtcacttgtaggtttctctgcctccaggttgcctcaacagcaggaggcacagcagtttcaccatctttgaggtgagggtggggtgccccagctaggaagcaagatcgctgtgctaggtctgaccaaaaccagagggcagtctagtcctgggggtaaagccctcagatcccagggtacactcttctccattccctccacccacttgcctgtcaccccagtcacctaagcaatcactgggcccagaggagaggagacagacacacactggctcctggacctaaagggtatgagctggagctaaggccagctagagcttccactgtcagccctcactgtcagtcccactgcacccccctgtgcctgctgggcactgggcactagctagatgctttaggttgcttcagctgatccttcaactctgtgaggtggataccaatattctattttgcagatagaatttggcccagagaggttaactaatatatccatgatcacacagctaataaaagtcagagctcaggtc

SEQ ID NO: 172715 - DNA, 1803 bp, Artificial Sequence
  derived and/or modified sequence
atgtctagagttgcgaagtaccgcaggcaagtgagtgaagaccccgatattgactcactgctcgaaacactgtccccagaggaaatggaagagctagaaaaagagctggatgttgtagaccctgatggctcagtgccagtggggttacgccagagaaatcagacggaaaagcaatccaccggggtgtacaatcgcgaagcgatgctaaacttttgcgaaaaggaaaccaaaaagctcatgcaaagagaaatgtctatggacgaatccaaacaggtggagaccaagacagacgccaagaacggcgaggaacgcggcagagacgcctccaaaaaagctctaggccccagacgcgatagcgatctcggaaaagagcctaaacgtgggggcctcaagaaatcgttctccagagaccgcgacgaggctggcggcaagagcggcgaaaagccgaaagaggaaaaaatcattcgcggcattgacaaaggaagggtgcgagccgcagtagacaagaaagaggcaggcaaagacggccggggcgaagaaagagcagtggctaccaagaaggaggaggagaagaagggctcagatcgcaacacaggactcagccgggataaagataaaaagcgcgaggaaatgaaagaggtagcaaagaaggaggacgacgagaaggtgaagggcgaacgtcgcaacactgatactaggaaagaaggcgaaaagatgaaacgagccggaggaaacacagatatgaagaaggaggatgaaaaggttaagcggggtacaggcaatacggacaccaaaaaagacgatgagaaggtaaagaagaatgaacctctgcacgaaaaagaggccaaagacgatagcaagacgaaaacccccgagaaacaaactccttccggccccaccaaaccctctgaagggcccgctaaggtcgaggaggaagctgccccctccatattcgatgagccgcttgaacgggtgaagaataatgatcccgagatgactgaagtcaatgttaacaacagcgattgcatcactaacgagattctcgtgcggtttacggaggcgctggaattcaataccgtagttaaattgtttgccctcgctaatacgagagccgacgaccatgttgcattcgccattgccatcatgttgaaggcaaataaaactatcacaagcctcaacctcgattctaaccatataacaggtaaggggatcctcgctatcttccgcgctttgctgcagaacaacactctgactgagcttcggttccataaccaacgccatatttgtggcggcaagaccgaaatggaaattgccaagctccttaaagaaaatacaacactccttaagctcggataccacttcgaacttgccggcccgaggatgaccgtgacaaatcttctctcccggaacatggacaagcagcgacagaagcggctgcaagagcagaggcaggcccaggaagctaagggcgagaaaaaggatttgctggaggtccccaaagcgggtgccgtggctaagggctctcctaagccgtcaccacaaccaagcccaaagccctctccgaaaaactcacctaagaaggggggagctcccgctgctccaccccctccaccaccgcccttggcacccccactgataatggaaaacctcaaaaactcactgtcccctgccacccagcgaaaaatgggtgacaaggtcctgcccgctcaagaaaagaactcgcgggatcaactgctggctgctattcgctcttctaatctgaaacagctcaagaagctggaactgcccttactgcttcagtag

SEQ ID NO: 172716 - DNA, 1650 bp, Artificial Sequence
  derived and/or modified sequence
atgtcgagggtagccaagtacaggagacaggtgtcagaagatccggacatagactccctgcttgagacgttatccccagaagaaatggaggaactggaaaaggagctcgacgtggttgaccccgacggctccgttcccgtgggcctgaggcagagaaaccagactgagaaacaatccaccggcgtgtacaatcgggaagccatgctgaatttttgcgaaaaggaaaccaagaagctgatgcagcgggaaatgtcaatggatgaatcaaagcaggttgagaccaaaaccgatgccaaggaggaaaagatcatcagagggattgataaaggacgcgtgcgggctgcagtggataaaaaagaagccggaaaggacggacggggagaagagcgggcagtggcaactaagaaggaagaggagaagaaaggctcggatcgtaacacaggcctctcccgggacaaagataaaaagagggaagagatgaaagaggtggcaaagaaagaagacgacgagaaggtaaaaggagagagacgtaacacagacaccaggaaggaaggcgaaaagatgaaacgagctgggggaaacacagatatgaagaaggaggacgagaaagtaaagcgtggaaccggtaacacggacaccaagaaagacgatgagaaggtgaagaaaaatgagccgctccacgaaaaagaagcaaaggacgattcgaagacaaagacccccgagaagcagacaccttctggccctaccaaaccttcggaggggcccgcgaaggtggaagaagaggcggctccatctatttttgatgagcccttggaacgcgtcaaaaataatgatcccgaaatgacagaggtgaatgtgaacaatagcgactgcattaccaatgagattttggtgaggttcaccgaggcccttgagttcaatactgtcgtcaagctgttcgcactggcaaacacccgagctgacgatcacgtagcatttgccatagccattatgctaaaggctaataagaccatcacttctctgaacctggactctaatcacattacgggaaagggaatcttagctatctttagagccctcttgcagaataataccctgaccgagctgagatttcacaaccaacggcatatttgcggcggtaaaactgagatggagatcgctaaactgcttaaagaaaataccaccctgctgaaactgggttaccattttgagttggctggtccacgaatgactgtcaccaatttgttgtctcggaacatggacaaacagcgacaaaagagactgcaggagcaaagacaggcccaggaggcaaaaggggagaagaaggatctgttggaggtcccaaaggctggcgcagtggccaagggctctccgaagccgtctccccagccttctccgaagccatcccccaagaattcccccaaaaagggtggagcaccagccgctccccctccacctcccccaccattagctccaccactcattatggagaacctaaaaaactctctctcgccagcgacacagcggaaaatgggcgataaggtcctccccgctcaggaaaaaaatagtcgcgaccagcttctcgccgccatccgctcatctaatctgaaacaactgaaaaaggtggaggtgccaaagttgctgcagtag

SEQ ID NO: 172717 - DNA, 1803 bp, Artificial Sequence
  derived and/or modified sequence
atgagccgggtggccaagtaccgccggcaggtgtctgaagatcctgacatcgacagcctgctggagaccctgagccctgaggagatggaggagctggagaaggagctggatgtggtggaccctgatggctctgtgcctgtgggcctgcggcagaggaaccagacagagaagcagagcactggagtgtacaaccgggaggccatgctgaacttctgtgagaaggagaccaagaagctgatgcagcgggagatgtccatggatgagagcaagcaggtggagaccaagacagatgccaagaatggagaggagcggggcagagatgccagcaagaaggccctgggcccccggcgggacagcgacctgggcaaggagcccaagaggggcggcctgaagaagagcttcagccgggacagagatgaagctgggggcaagtctggagagaagcccaaggaggagaagatcatccggggcatcgacaagggccgggtgcgggctgctgtggacaagaaggaggccggcaaggatggccgcggggaggagagagctgtggccaccaagaaggaggaggagaagaagggcagtgacaggaacacaggcctgagccgggacaaggacaagaagcgggaggagatgaaggaggtggccaagaaggaggatgatgagaaggtgaagggggagaggaggaacacagacaccaggaaggagggggagaagatgaagagagctgggggcaacacagacatgaagaaggaggatgagaaggtgaagaggggcactggaaacacagacaccaagaaggatgatgagaaggtgaagaagaatgagcccctgcacgagaaggaggccaaggatgacagcaagaccaagaccccagagaagcagaccccatctggccccaccaagcccagcgagggccctgccaaggtggaggaggaggccgcccccagcatctttgatgagcccctggagcgggtgaagaacaatgaccctgagatgacagaggtgaatgtgaacaacagcgactgcatcaccaatgagatcctggtgcgcttcacagaggccctggagttcaacacagtggtgaagctgtttgccctggccaacaccagggcagatgaccacgtggcctttgccatcgccatcatgctgaaggccaacaagaccatcaccagcctgaacctggacagcaaccacatcaccgggaagggcatcctggccatcttccgggccctgctgcagaacaacaccctgacagagctgcgcttccacaaccagaggcacatctgtggcggcaagacagagatggagatcgccaagctgctgaaggagaacaccaccctgctgaagctgggctaccactttgagctggccggccccaggatgacagtgaccaacctgctgagcaggaacatggacaagcagaggcagaagaggctgcaggagcagaggcaggcccaggaggccaagggggagaagaaggacctgctggaggtgcccaaggccggggctgtggccaagggcagccccaagcccagcccccagcccagccccaagcccagccccaagaacagccccaagaagggcggggccccagctgcccctcctcctcctcctccacccctggcccctcctctcatcatggagaacctgaagaacagcctgagccctgccacccagaggaagatgggagacaaggtgctgcctgcccaggagaagaacagccgggaccagctgctggccgccatccgcagcagcaacctgaagcagctgaagaaggtggaggtgcccaagctgctgcagtag

SEQ ID NO: 172718 - DNA, 1803 bp, Artificial Sequence
  derived and/or modified sequence
atgagccgggtggccaagtaccgccggcaggtgtctgaagatcctgacatcgacagcctgctggagaccctgagccctgaggagatggaggagctggagaaggagctggatgtggtggaccctgatggctctgtgcctgtgggcctgcggcagaggaaccagacagagaagcagagcactggagtgtacaaccgggaggccatgctgaacttctgtgagaaggagaccaagaagctgatgcagcgggagatgtccatggatgagagcaagcaggtggagaccaagacagatgccaagaatggagaggagcggggcagagatgccagcaagaaggccctgggcccccggcgggacagcgacctgggcaaggagcccaagaggggcggcctgaagaagagcttcagccgggacagagatgaagctgggggcaagtctggagagaagcccaaggaggagaagatcatccggggcatcgacaagggccgggtgcgggctgctgtggacaagaaggaggccggcaaggatggccgcggggaggagagagctgtggccaccaagaaggaggaggagaagaagggcagtgacaggaacacaggcctgagccgggacaaggacaagaagcgggaggagatgaaggaggtggccaagaaggaggatgatgagaaggtgaagggggagaggaggaacacagacaccaggaaggagggggagaagatgaagagagctgggggcaacacagacatgaagaaggaggatgagaaggtgaagaggggcactggaaacacagacaccaagaaggatgatgagaaggtgaagaagaatgagcccctgcacgagaaggaggccaaggatgacagcaagaccaagaccccagagaagcagaccccatctggccccaccaagcccagcgagggccctgccaaggtggaggaggaggccgcccccagcatctttgatgagcccctggagcgggtgaagaacaatgaccctgagatgacagaggtgaatgtgaacaacagcgactgcatcaccaatgagatcctggtgcgcttcacagaggccctggagttcaacacagtggtgaagctgtttgccctggccaacaccagggcagatgaccacgtggcctttgccatcgccatcatgctgaaggccaacaagaccatcaccagcctgaacctggacagcaaccacatcaccgggaagggcatcctggccatcttccgggccctgctgcagaacaacaccctgacagagctgcgcttccacaaccagaggcacatctgtggcggcaagacagagatggagatcgccaagctgctgaaggagaacaccaccctgctgaagctgggctaccactttgagctggccggccccaggatgacagtgaccaacctgctgagcaggaacatggacaagcagaggcagaagaggctgcaggagcagaggcaggcccaggaggccaagggggagaagaaggacctgctggaggtgcccaaggccggggctgtggccaagggcagccccaagcccagcccccagcccagccccaagcccagccccaagaacagccccaagaagggcggggccccagctgcccctcctcctcctcctccacccctggcccctcctctcatcatggagaacctgaagaacagcctgagccctgccacccagaggaagatgggagacaaggtgctgcctgcccaggagaagaacagccgggaccagctgctggccgccatccgcagcagcaacctgaagcagctgaagaagctggagctgcccctgctgctgcagtag

SEQ ID NO: 172719 - DNA, 1650 bp, Artificial Sequence
  derived and/or modified sequence
atgagccgggtggccaagtaccgccggcaggtgtctgaagatcctgacatcgacagcctgctggagaccctgagccctgaggagatggaggagctggagaaggagctggatgtggtggaccctgatggctctgtgcctgtgggcctgcggcagaggaaccagacagagaagcagagcactggagtgtacaaccgggaggccatgctgaacttctgtgagaaggagaccaagaagctgatgcagcgggagatgtccatggatgagagcaagcaggtggagaccaagacagatgccaaggaggagaagatcatccggggcatcgacaagggccgggtgcgggctgctgtggacaagaaggaggccggcaaggatggccgcggggaggagagagctgtggccaccaagaaggaggaggagaagaagggcagtgacaggaacacaggcctgagccgggacaaggacaagaagcgggaggagatgaaggaggtggccaagaaggaggatgatgagaaggtgaagggggagaggaggaacacagacaccaggaaggagggggagaagatgaagagagctgggggcaacacagacatgaagaaggaggatgagaaggtgaagaggggcaccggcaacacagacaccaagaaggatgatgagaaggtgaagaagaatgagcccctgcacgagaaggaggccaaggatgacagcaagaccaagaccccagagaagcagacccccagcggccccaccaagcccagcgagggccctgccaaggtggaggaggaggccgcccccagcatctttgatgagcccctggagcgggtgaagaacaatgaccctgagatgacagaggtgaatgtgaacaacagcgactgcatcaccaatgagatcctggtgcgcttcacagaggccctggagttcaacacagtggtgaagctgtttgccctggccaacaccagggcagatgaccacgtggcctttgccatcgccatcatgctgaaggccaacaagaccatcaccagcctgaacctggacagcaaccacatcaccgggaagggcatcctggccatcttccgggccctgctgcagaacaacaccctgacagagctgcgcttccacaaccagaggcacatctgtggcggcaagacagagatggagatcgccaagctgctgaaggagaacaccaccctgctgaagctgggctaccactttgagctggccggccccaggatgacagtgaccaacctgctgagcaggaacatggacaagcagaggcagaagaggctgcaggagcagaggcaggcccaggaggccaagggggagaagaaggacctgctggaggtgcccaaggccggggctgtggccaagggcagccccaagcccagcccccagcccagccccaagcccagccccaagaacagccccaagaagggcggggccccagctgcccctcctcctcctcctccacccctggccccacccctcatcatggagaacctgaagaacagcctgagccctgccacccagaggaagatgggagacaaggtgctgcctgcccaggagaagaacagccgggaccagctgctggccgccatccgcagcagcaacctgaagcagctgaagaaggtggaggtgcccaagctgctgcagtag

SEQ ID NO: 172720 - DNA, 1803 bp, Artificial Sequence
  derived and/or modified sequence
atgagccgggtggccaagtaccggcggcaggtgagcgaggaccccgacattgactcactcctggagaccttgtcacctgaagaaatggaggaattggagaaggaacttgatgtggtagaccctgatgggtcagtgcctgtagggctgagacagaggaatcagactgaaaagcagtccacgggagtgtacaatagagaggcaatgctcaatttttgtgagaaggaaacaaagaagctgatgcagcgcgaaatgtcaatggacgagtccaagcaggtggagacgaagacagacgctaagaatggggaggagaggggacgcgatgcctctaaaaaagcactgggaccacggcgcgactccgatctcgggaaggagcccaagcgcggaggcctgaagaagtccttttcacgtgatagggatgaagctggcggtaagagtggcgagaagccgaaggaggaaaagatcatcaggggcattgacaaaggtagagtccgagctgcagtggacaaaaaggaggcaggaaaggacggccgaggggaagagagagccgtggctacgaagaaggaagaggagaaaaaaggttctgacagaaatactggtctctcacgtgataaggacaagaagagggaggagatgaaggaagttgctaaaaaggaggatgacgagaaggtcaagggcgagaggcgtaataccgacacacggaaagaaggggaaaagatgaaacgcgctggaggtaacacggatatgaagaaggaagatgagaaggtgaaacggggcaccggaaacaccgacactaagaaagatgacgagaaggtaaaaaaaaacgagcctttacacgaaaaggaggccaaggacgatagtaagacaaaaactcccgaaaaacaaactccaagcggccccaccaagccctccgagggacccgccaaggtcgaagaggaggccgccccaagtatctttgatgaaccactggagagggtgaagaataatgacccagagatgaccgaagtgaacgtgaacaactcagattgtattacaaatgagattcttgtgcgattcaccgaggcactggagttcaataccgttgttaagctctttgctctggccaacacacgtgccgatgatcatgtggcgtttgccatcgccatcatgttgaaagcaaataaaacgataacatccctgaacctggactccaatcatattactggtaaggggatcctggccatcttcagggctctgcttcaaaacaacacccttaccgagttaagattccataatcaaagacacatctgcggtggaaaaactgagatggagatagcaaaactcctgaaagagaatacaaccttgctaaaactaggctatcactttgaactggctggacctagaatgacggtcaccaacctcctgtcacgaaacatggacaaacagcgccaaaaacggctgcaagaacagcgtcaggctcaggaggccaagggggagaagaaggacctactcgaagtcccaaaggccggagcggtggcgaaaggttcgccaaaaccatctcctcaaccttcaccaaaaccatccccaaaaaattcaccaaagaagggcggcgcccctgccgcacccccaccaccgcctcctccactggcacctccactcataatggagaacttgaagaattcgctgtcgccggctacgcagaggaagatgggtgacaaagtgttaccagcccaggaaaagaactccagggatcagctgctggcagcgatccggtcctctaatctcaagcaactgaagaaagtcgaagtgccgaagttgctgcagtag

SEQ ID NO: 172721 - DNA, 1803 bp, Artificial Sequence
  derived and/or modified sequence
atgagccgggtggccaagtaccggcggcaggtgagcgaggaccccgatattgattctctactcgagactttgagcccagaggaaatggaagaattggaaaaggagctcgatgtggtggaccccgacggctctgttcctgtcgggctgcgacaacgtaatcaaaccgagaagcagagtacaggtgtttataacagagaggccatgttgaatttctgcgaaaaggagaccaagaaactgatgcagcgtgaaatgtctatggatgaaagtaaacaggtagagacgaagaccgacgccaaaaatggcgaggaaaggggacgcgacgcctcgaaaaaggctcttggcccaaggcgggatagcgacttggggaaggagcccaaacgtgggggccttaaaaaatcttttagtagagatagagatgaggctgggggcaagtcaggcgaaaagcccaaagaggaaaaaatcatacgggggatcgataaggggagagtgagagctgccgtggacaaaaaagaggctggtaaggacgggagaggcgaggagagagctgtagccactaagaaggaagaggaaaaaaaaggaagcgatcggaatacaggtttgtcgcgggataaagacaaaaagcgtgaagagatgaaagaagtggcaaagaaggaggatgacgaaaaggtaaagggtgagaggcggaatacagataccagaaaggagggtgaaaagatgaagagagccggggggaacacagacatgaaaaaggaggacgagaaagtgaagcgtggaacgggtaatactgacaccaaaaaagatgacgagaaggttaagaagaacgaaccactgcatgagaaggaagctaaagacgactccaaaacgaagacaccagaaaagcagactccaagcggccctaccaagccaagtgagggacctgctaaggtagaggaagaggccgcaccaagcatcttcgacgagccgctggagcgcgtgaaaaacaacgatcccgagatgacagaagtcaacgtgaataatagcgactgtattaccaatgaaatcttagtgcgctttactgaggcgctcgagttcaatactgtggtaaagctcttcgcactcgctaacacaagggctgacgatcatgtggcattcgcaatcgctattatgcttaaggccaataagacaatcaccagtctgaatctagattcaaatcatatcaccggcaaaggcattctggccatctttagggcccttctacagaacaatactcttactgagctgaggttccataaccagaggcatatatgcgggggcaagacagagatggaaatcgctaagctgttgaaggaaaacaccaccttactaaagctgggatatcattttgagcttgcggggccccggatgactgttaccaaccttctgtcacgcaatatggataaacagcgccaaaagcgcctccaagagcaaagacaggcccaggaagccaaaggcgagaaaaaggacttgctggaggtccccaaggctggtgctgtggccaagggatctccgaaaccatcccctcagccatctccaaagccttcgcccaaaaatagccctaaaaagggaggcgccccagctgccccgccccccccacccccaccactagccccccccctcataatggaaaacttgaagaacagtttaagccctgcaacccagcggaaaatgggtgacaaagtcctgcctgctcaggaaaagaactcgagggatcaacttctggcagctattaggtcctccaatctcaagcagctcaaaaaattggaactccctctgctacttcagtag

SEQ ID NO: 172722 - DNA, 1650 bp, Artificial Sequence
  derived and/or modified sequence
atgagccgggtggccaagtaccggcggcaggtgagcgaggaccccgacatcgactcgttactggagacccttagtcctgaggagatggaggagctggagaaagaactcgacgtcgtcgatccggacggatctgtcccggtagggctgcggcagcgaaaccagaccgaaaaacagtccacaggtgtttacaaccgcgaggctatgctgaatttttgtgaaaaggagacaaagaagctcatgcagagggagatgtccatggacgagtctaaacaggttgagacgaaaacggacgcgaaggaggagaaaataatccggggaattgataaggggagagtgcgagctgcagtggacaagaaagaagcaggcaaggacggacgtggcgaagagcgagccgtcgctaccaaaaaggaggaggaaaagaagggaagcgacagaaataccggtctctcgcgagataaagataaaaagcgagaggagatgaaggaggtcgctaaaaaggaagatgacgaaaaggtgaagggagagaggagaaataccgatacccgaaaggagggcgagaaaatgaagagggctggcggaaacacagatatgaagaaagaagacgagaaagtgaagaggggcactgggaacaccgatacaaaaaaggatgatgaaaaagttaaaaaaaacgagccgctgcacgaaaaggaagcaaaggacgattccaaaacaaaaacaccagaaaagcagacacccagtggtcccaccaaaccctcagaaggacccgctaaagttgaggaagaggcagcaccatctatttttgatgagcccctggagagagtaaaaaataacgatccagagatgactgaagtcaatgtgaacaattcagattgcatcacgaatgagattttggtgcgtttcacagaagccctcgaattcaacaccgtggtgaagctattcgccctggcaaacacgcgagctgacgaccacgtggccttcgccatcgcaatcatgctgaaagcgaacaaaactatcaccagtctcaacttggatagtaaccacatcacaggtaaagggatactggctatcttcagggcactccttcaaaataataccctgaccgaactgagatttcacaatcaaagacatatttgtgggggcaagaccgagatggagattgcaaaattattaaaggagaacactacactccttaaattgggttatcactttgaattagcaggcccaagaatgacagtcaccaatctgctaagtcggaacatggataaacagagacagaagcgcctccaggagcagcggcaggcgcaggaggccaagggcgagaaaaaggaccttcttgaggtccccaaggcaggggccgtggctaaaggatcacctaaacccagcccgcagccgtccccaaagccttcacctaaaaattcccccaaaaaaggaggcgcacccgcagcaccacccccacctcccccaccattggccccccctcttattatggaaaatcttaagaactctttgtcacctgccactcagagaaagatgggtgacaaagtcttacctgcacaggaaaagaattctcgggatcagctcttagcagctatccggtcttctaaccttaaacaattgaagaaggtagaagtgcctaaactgctacagtag

SEQ ID NO: 172723 - DNA, 2048 bp, Artificial Sequence
  derived and/or modified sequence
agttgtcgggtcttattggccgctgattagaccagccggggtccactagccctgggcttcagggaggctgctgcgtccagtgaacacttcagcacctgtagcacagaagggccaaggagctgcagtcctcgaccagcaggaggtttgctcctcagcccactcgctgcatccagatcagctcacccctctcccttccctgcccaccaggactctgatagcccctggcagccacagcccattttgccaagatgtctagagtagccaaatatcgccggcaggtgagtgaagaccccgacatcgacagcctgctggagaccctgtctcccgaggagatggaggagctggagaaggagctggacgtggtggacccagacgggagtgttcccgtggggctgcggcagagaaaccagacggagaaacagtccacgggtgtgtacaaccgggaggccatgctcaacttctgtgaaaaggagaccaagaaacttatgcagagggagatgtccatggatgaaagcaagcaagtggagaccaagacagatgccaagaatggagaggaaaggggcagagatgccagcaaaaaagccctgggccccagacgggactcagatctggggaaggagccaaagaggggtggtttaaagaaaagcttctctagagacagagatgaagctggtggcaagagtggcgagaagcccaaggaggagaagatcatccggggcattgacaagggccgggtcagggctgcagtggataagaaggaggcagggaaggatgggagaggagaggagagggcagtggccaccaagaaggaagaggagaagaaagggagtgacaggaacacaggcttgagcagggacaaggataaaaagagagaggagatgaaggaggtggccaagaaagaggatgatgagaaggtaaaaggggagcgtaggaacacagacaccagaaaagagggtgagaagatgaaaagagcaggtgggaacacagacatgaaaaaggaggatgagaaggtaaaaagaggaactgggaacacagacaccaaaaaggacgatgaaaaagtcaagaagaatgaacccttacatgaaaaggaagccaaggatgacagcaagaccaaaacacccgagaaacagacgcccagtggccccaccaagccctctgaaggaccggccaaggtggaggaggaggcagctcccagcatatttgatgagcctctggagagagtgaagaacaatgaccccgagatgactgaggtgaacgtcaacaactcagactgcatcacaaatgagatcttggtccggtttactgaggctctggagttcaacactgtggttaagctgttcgccttggccaacacgcgagccgatgaccacgtggcctttgccattgccatcatgctcaaggccaacaagaccatcaccagcctcaacctggactccaaccacatcacaggcaaaggcatcctggccatcttccgggccctcctccagaacaacacgctgaccgagctccgcttccacaaccagcgacacatctgtggaggcaagacggagatggagatcgccaagctgctgaaggagaatactaccctgctcaagctgggctaccattttgagctggccgggccccgaatgactgtcaccaatctgctcagccgcaacatggacaagcagagacaaaagcggctgcaggagcaaaggcaggcacaggaagccaagggagagaagaaggatctgctggaggtacccaaggccggggccgtggctaagggctccccaaaaccttcacctcaaccatctccaaagccctctccaaagaactcacccaaaaaagggggtgctccagctgccccaccaccccctccccctcccttggctccaccccttatcatggagaacctgaagaattcactctcaccagctacccagaggaagatgggagacaaagtcctccctgcccaggagaagaactcccgtgaccagctattggctgccatccgctccagcaacctcaagcagctcaagaagctagagcttccactgttgcttcag

SEQ ID NO: 172724 - DNA, 2081 bp, Artificial Sequence
  derived and/or modified sequence
gaacacttcagcacctgtagcacagaagggccaaggagctgcagtcctcgaccagcaggaggtttgctcctcagcccactcgctgcatccagatcagctcacccctctcccttccctgcccaccaggactctgatagcccctggcagccacagcccattttgccaagatgtctagagtagccaaatatcgccggcaggtgagtgaagaccccgacatcgacagcctgctggagaccctgtctcccgaggagatggaggagctggagaaggagctggacgtggtggacccagacgggagtgttcccgtggggctgcggcagagaaaccagacggagaaacagtccacgggtgtgtacaaccgggaggccatgctcaacttctgtgaaaaggagaccaagaaacttatgcagagggagatgtccatggatgaaagcaagcaagtggagaccaagacagatgccaaggaggagaagatcatccggggcattgacaagggccgggtcagggctgcagtggataagaaggaggcagggaaggatgggagaggagaggagagggcagtggccaccaagaaggaagaggagaagaaagggagtgacaggaacacaggcttgagcagggacaaggataaaaagagagaggagatgaaggaggtggccaagaaagaggatgatgagaaggtaaaaggggagcgtaggaacacagacaccagaaaagagggtgagaagatgaaaagagcaggtgggaacacagacatgaaaaaggaggatgagaaggtaaaaagaggaactgggaacacagacaccaaaaaggacgatgaaaaagtcaagaagaatgaacccttacatgaaaaggaagccaaggatgacagcaagaccaaaacacccgagaaacagacgcccagtggccccaccaagccctctgaaggaccggccaaggtggaggaggaggcagctcccagcatatttgatgagcctctggagagagtgaagaacaatgaccccgagatgactgaggtgaacgtcaacaactcagactgcatcacaaatgagatcttggtccggtttactgaggctctggagttcaacactgtggttaagctgttcgccttggccaacacgcgagccgatgaccacgtggcctttgccattgccatcatgctcaaggccaacaagaccatcaccagcctcaacctggactccaaccacatcacaggcaaaggcatcctggccatcttccgggccctcctccagaacaacacgctgaccgagctccgcttccacaaccagcgacacatctgtggaggcaagacggagatggagatcgccaagctgctgaaggagaatactaccctgctcaagctgggctaccattttgagctggccgggccccgaatgactgtcaccaatctgctcagccgcaacatggacaagcagagacaaaagcggctgcaggagcaaaggcaggcacaggaagccaagggagagaagaaggatctgctggaggtacccaaggccggggccgtggctaagggctccccaaaaccttcacctcaaccatctccaaagccctctccaaagaactcacccaaaaaagggggtgctccagctgccccaccaccccctccccctcccttggctccaccccttatcatggagaacctgaagaattcactctcaccagctacccagaggaagatgggagacaaagtcctccctgcccaggagaagaactcccgtgaccagctattggctgccatccgctccagcaacctcaagcagctcaagaaggtggaagtgcccaaactgcttcagtaggaccaggctgccaggcaccatctgccaatgccatgactgctcaggcctcacctcccagggctacacagaccctgcccaccccatccctggctgacctgctgtggatgtccctattctgccatgggagagtccaggcctgggtcacgctcaaggaaggatgccttatctcttctcactttccttttcttgtctctgaggctctccaaattttgctttagtacatggagctcaggtttctggacaagaagagtccttttagcacat

SEQ ID NO: 172725 - DNA, 1803 bp, Artificial Sequence
  derived and/or modified sequence
atgtcgcgagttgctaaatatcgcaggcaggtaagtgaagaccccgatattgactctttgctggagaccctgagccctgaggagatggaggagctggagaaggaattagatgtagttgatccagacggcagcgtgcctgtcggtctgcgtcagcgcaaccagaccgagaagcaaagtaccggagtttacaaccgcgaggccatgctcaacttctgcgagaaagaaaccaagaagctgatgcagcgcgaaatgtcaatggacgagtcaaaacaggtggaaactaagactgatgctaaaaacggcgaggagagaggcagagacgcctccaagaaggcgttaggtcccagacgagactccgaccttggcaaagaaccgaagcggggtggtcttaagaaatcttttagccgagaccgggacgaggctggtgggaagtctggcgagaagcccaaagaggagaaaataatcagaggaattgacaaagggagggttagagccgctgtggacaaaaaggaggctgggaaggacggcagaggtgaagagcgcgcagtcgcgaccaagaaggaggaagaaaagaagggcagtgaccggaatactggactgtctagggataaggacaagaagagggaagagatgaaagaggtggccaagaaggaagatgatgagaaagtgaagggtgagcgtcggaataccgacacacggaaggagggagaaaaaatgaagcgcgctggagggaataccgacatgaagaaagaagatgagaaggttaagcggggtacaggcaacaccgatactaaaaaggatgatgaaaaagtaaagaaaaacgagccgttgcacgaaaaggaggcaaaagatgattccaagaccaagacgcctgaaaagcagacgcccagcggccctacaaagccttccgagggacccgctaaggtggaggaagaggccgctcctagtatttttgacgagccccttgaaagggtgaaaaataatgacccagaaatgacagaggttaatgtaaacaactcagattgcatcactaacgaaatcctagttcggtttacagaagctctggagttcaatactgtggtgaaacttttcgctctcgctaacactagagccgatgaccacgtcgcctttgcgatcgccatcatgcttaaggccaataagaccatcacaagtctaaacctggactcaaatcacatcaccgggaaggggatattggccattttccgggctctgttacagaacaatacacttacagaattgagatttcacaaccagcgccacatctgtggaggcaaaacagagatggagatagccaagctcctgaaggaaaacaccactctgctgaaactgggctatcattttgagttggcaggacctcggatgaccgtaacgaatctgttgtcaagaaacatggataaacaaagacagaagagattgcaagagcaacgccaggcacaagaagccaagggagagaagaaggacctgctggaagtcccaaaagcaggcgcagtggcaaaggggagcccaaaacctagtccccagccgagccctaaacctagcccaaagaacagcccgaagaagggaggagccccagcggctccgccaccgccacccccacctcttgcacccccattaattatggaaaacttgaagaatagcttgtcgcccgctacccagagaaagatgggagataaagtgctccccgctcaggaaaagaacagtcgggaccagctgctggcagccattcggtcttcaaatctcaaacagttgaaaaaagttgaagtgcctaaactgctgcagtag

SEQ ID NO: 172726 - DNA, 1803 bp, Artificial Sequence
  derived and/or modified sequence
atgagtcgtgtagctaaatataggcggcaggtgagtgaagacccggacatcgacagcctgctcgaaactctcagccccgaggagatggaggagctggaaaaagaactcgacgtggtcgacccggatggcagtgtgcctgttggtctcaggcagagaaatcaaaccgagaagcaatctacaggagtgtacaaccgggaggcgatgttgaatttttgtgaaaaggagaccaagaaactcatgcagcgggagatgtcaatggatgagtctaaacaagtggagaccaagacagatgccaagaatggcgaggaacggggtcgtgacgctagcaagaaggcacttgggccacggagagacagcgacctgggaaaagaacctaagagaggcggactaaaaaagagtttcagccgcgacagggacgaagcgggtgggaagagtggggagaaacccaaagaggagaagatcatccgcggtattgacaaagggagagttcgcgcagccgttgacaaaaaggaagccggtaaagacggcagaggcgaagagcgagccgttgctacgaagaaagaggaggagaaaaaaggatccgatcggaacacaggtctcagtagagacaaagataagaagagggaagagatgaaggaggtcgcgaaaaaagaggacgatgagaaagtcaagggcgaacgaaggaacaccgatactaggaaagagggcgaaaaaatgaaacgcgctggaggcaataccgatatgaagaaggaggacgagaaagttaaaagggggaccggaaacaccgatactaagaaggacgacgagaaggtcaaaaagaatgagccactacacgaaaaggaagctaaagacgattccaaaactaagacccccgagaagcagactccatctggacctactaagccttcagagggaccagcgaaggtcgaagaagaggccgctccttcaatttttgacgaaccccttgagagagtcaagaacaatgaccccgagatgacggaggtcaacgtgaataattcagactgcattactaacgagatactcgttcggttcactgaggccctggaattcaacaccgtggtcaaactgttcgccctggccaacaccagagccgacgaccacgtcgcttttgctatcgccattatgctcaaagctaacaaaactattacatctctgaatctggattctaaccatattacgggaaaggggattctggccatttttagggctctgcttcagaataacactctgacggaattacgctttcacaaccagcggcatatttgcggcggaaagaccgagatggaaatcgccaaacttctgaaggagaacactactctcttgaaactgggttaccacttcgagctcgcaggacccaggatgaccgtgaccaacctgctgtccaggaacatggataagcagagacagaaaaggctgcaggagcagagacaggcccaggaggctaagggtgaaaaaaaagatctgctggaagttcctaaagctggggcagtggctaaaggctcgcctaaacccagcccacagccaagtcctaagccttcccctaagaacagtcccaagaagggaggggctccagccgctcctccgccacctcccccacccctggcccctcccctcattatggaaaacctaaaaaacagcttgtcccctgccactcagcggaaaatgggggataaggtgctgcccgctcaggaaaagaacagccgggatcagctcctcgctgcgatcagatcaagtaacctgaaacagctcaaaaagctggaactgcctcttttactccaatag

SEQ ID NO: 172727 - DNA, 1650 bp, Artificial Sequence
  derived and/or modified sequence
atgtccagggtggcaaagtacaggcgccaagtctcagaggaccccgatatcgattcactgttagagacattgtcaccagaggaaatggaggaactcgagaaagagctggacgttgtggaccccgacggttcagtgcctgtggggctgcgacagcgcaaccagaccgagaaacagagcaccggggtatataacagagaggctatgctcaacttctgcgaaaaagagactaagaaacttatgcagcgcgagatgtctatggatgagagtaagcaggtagagaccaagacagatgcaaaggaagaaaaaattattagagggatcgacaaaggccgtgtcagggctgcagttgataagaaagaggcgggtaaggacggacgaggcgaggaacgagccgttgccacaaagaaagaagaggagaagaaaggctccgaccgaaatacaggcttgagtcgcgacaaggacaaaaagcgcgaggagatgaaagaggtagcaaaaaaggaagacgacgagaaggtgaagggagaacgcaggaataccgacacccgcaaggaaggcgagaaaatgaagcgggctgggggtaataccgatatgaaaaaggaagacgagaaggtgaaacgcggtacaggcaacaccgataccaaaaaagacgatgagaaggtgaagaaaaacgagcccctccacgagaaggaagctaaagatgactctaagactaagactccggagaagcagaccccctctggcccaacgaaaccctctgaagggccagcaaaggtagaggaagaggcggcaccttccatcttcgatgaacccctggagcgcgtaaaaaataacgacccggaaatgacagaggtgaacgtcaacaacagcgattgcattacaaatgagatactcgttagatttaccgaggcacttgagttcaacacagtcgttaagctgtttgctctagcaaacaccagggcagacgaccatgtggccttcgccatcgccattatgctgaaggcaaacaaaacaataacatcgcttaaccttgattctaaccatattactggcaagggtatcctggccatatttagagctttgctgcagaataacaccttaacagagctccgctttcacaatcagcgccacatttgtggagggaagacagagatggaaatagctaaactgctgaaggagaacaccactctgctgaagctcggctaccacttcgaactggcaggtcctcgaatgactgtaacaaacctgctgtctaggaacatggacaagcagaggcagaaacgtctgcaggagcagcggcaggctcaagaggccaagggtgaaaagaaggacctgctggaggtgcctaaggccggtgcagtagccaagggcagtccaaaaccctctccacagccctctcccaagcctagccccaagaactcaccaaagaagggcggagccccagccgcacctccccctcctcccccaccgctagccccacccctgataatggagaatttaaagaattctttgagtcccgcaacccagaggaaaatgggagacaaggtgctgccggcacaagagaagaatagcagggaccagctcctggccgctatccgcagctctaacctcaaacaattgaagaaggtggaagtgcccaaactgctgcagtag

SEQ ID NO: 172728 - protein, 325 aa, Artificial Sequence
  derived and/or modified sequence
MAQYKGTMREAGRAMHLLKKRERQREQMEVLKQRIAEETILKSQVDKRFSAHYDAVEAELKSSTVGLVTLNDMKARQEALVRERERQLAKRQHLEEQRLQQERQREQEQRRERKRKISCLSFALDDLDDQADAAEARRAGNLGKNPDVDTSFLPDRDREEEENRLREELRQEWEAQREKVKDEEMEVTFSYWDGSGHRRTVRVRKGNTVQQFLKKALQGLRKDFLELRSAGVEQLMFIKEDLILPHYHTFYDFIIARARGKSGPLFSFDVHDDVRLLSDATMEKDESHAGKVVLRSWYEKNKHIFPASRWEAYDPEKKWDKYTIR

SEQ ID NO: 172729 - DNA, 978 bp, Artificial Sequence
  derived and/or modified sequence
atggcccagtacaagggcaccatgagagaggccggcagagccatgcacctgctgaagaagagagagagacagagagagcagatggaggtgctgaagcagagaatcgccgaggagaccatcctgaagagccaggtggacaagagattcagcgcccactacgacgccgtggaggccgagctgaagagcagcaccgtgggcctggtgaccctgaacgacatgaaggccagacaggaggccctggtgagagagagagagagacagctggccaagagacagcacctggaggagcagagactgcagcaggagagacagagagagcaggagcagagaagagagagaaagagaaagatcagctgcctgagcttcgccctggacgacctggacgaccaggccgacgccgccgaggccagaagagccggcaacctgggcaagaaccccgacgtggacaccagcttcctgcccgacagagacagagaggaggaggagaacagactgagagaggagctgagacaggagtgggaggcccagagagagaaggtgaaggacgaggagatggaggtgaccttcagctactgggacggcagcggccacagaagaaccgtgagagtgagaaagggcaacaccgtgcagcagttcctgaagaaggccctgcagggcctgagaaaggacttcctggagctgagaagcgccggcgtggagcagctgatgttcatcaaggaggacctgatcctgccccactaccacaccttctacgacttcatcatcgccagagccagaggcaagagcggccccctgttcagcttcgacgtgcacgacgacgtgagactgctgagcgacgccaccatggagaaggacgagagccacgccggcaaggtggtgctgagaagctggtacgagaagaacaagcacatcttccccgccagcagatgggaggcctacgaccccgagaagaagtgggacaagtacaccatcagatag

SEQ ID NO: 172730 - DNA, 978 bp, Artificial Sequence
  derived and/or modified sequence
atggcccagtataaaggtaccatgagggaagccggtcgcgcaatgcacttgttgaagaaaagggagagacaaagagagcagatggaagtgcttaaacagcgtattgcagaggagacaatacttaaatctcaagtcgacaaaagattttctgcccactacgatgccgtagaggccgagttgaaatctagtactgttggcttagtgacattgaatgatatgaaggctcggcaggaggctcttgtcagagaacgagagcggcagctcgcgaagaggcagcacctcgaagaacagcgcctgcagcaggaacgtcagcgagagcaggagcaaagacgggagagaaaaaggaaaatctcttgcctttccttcgccctggacgatctggatgatcaggctgatgcagccgaggcaagaagggccgggaatctgggcaagaatccagatgtggatacaagcttcctgcctgatagagaccgagaggaagaggagaataggcttcgcgaagaattacggcaggaatgggaagctcaacgagaaaaggtaaaagacgaggagatggaagtgacattcagctattgggacgggagtgggcaccgacggacagtgagagtgagaaagggaaatacagtgcaacaattcttgaagaaggccctgcaagggttgcgtaaggattttcttgagcttagaagcgcaggggtcgaacagctgatgttcatcaaggaagatcttatcttgccacactaccacactttctatgatttcattatcgcccgcgctcgcggtaagtctggacccctgttcagctttgatgtgcatgatgatgtacgcctgctcagtgacgccaccatggagaaggatgaaagtcatgcaggcaaggtggtattacgcagctggtacgagaaaaataaacatatttttcctgccagcagatgggaggcttatgatcccgaaaaaaagtgggacaagtatacaatacgctag

SEQ ID NO: 172731 - DNA, 978 bp, Artificial Sequence
  derived and/or modified sequence
atggcccagtataaagggacaatgcgggaggccggtagggctatgcacctcctgaagaaacgtgagagacagcgggaacagatggaggtcttgaagcaacgaattgcggaagagacaattcttaagtctcaagtagacaaacgtttctctgctcactatgatgcagtggaagccgaattgaaaagtagtaccgtgggcctggtaaccttgaacgatatgaaagccagacaagaggcccttgtgcgagaacgcgaaaggcagttagcgaaaagacagcatctggaggagcagagactgcagcaagaaaggcagcgcgagcaggagcagcgcagagagagaaagcgcaagatttcctgtctgagtttcgctctcgatgaccttgatgatcaggccgatgctgctgaggcacgcagagccggtaatttgggcaagaacccagacgtagatacgagcttcttacctgatcgcgatcgggaagaggaggagaacagactgcgagaagagcttagacaggagtgggaggcccaaagagagaaggttaaggacgaggagatggaagtgaccttctcctactgggatgggagcggccatagacggactgtgcgagttagaaaggggaataccgtgcaacagttcctgaagaaggccctccagggcctgcgcaaggactttctggaattgcgtagcgctggcgtcgagcagttgatgttcattaaggaagatctcattctccctcattaccacactttctacgatttcattattgcacgcgcccgcggaaagtctggacctttgttctcgttcgacgtgcacgacgatgtgcggctgctctccgacgccactatggagaaggacgaatctcacgccgggaaggtggtgctgcgctcttggtacgagaagaataaacacatttttccggcctccagatgggaagcatacgatcctgagaagaagtgggataagtacaccatccgttag

SEQ ID NO: 172732 - DNA, 1628 bp, Artificial Sequence
  derived and/or modified sequence
ggctgtcgcgagagcccggggcgagtgggcctctgctcgtgggtggttctcgtggaggtcagctcccgcgtgtctccgctcgacagggtgcttgggcagagcccatcgggtaggcgcgggccatggcgcagtacaagggcaccatgcgcgaggcaggccgtgccatgcacctcctcaagaagcgcgaaaggcagcgggagcagatggaggtgctgaagcagcgcatcgccgaggagaccatcctcaagtcgcaggtggacaagaggttctcggcgcattacgacgccgtggaggccgagctgaagtccagcacggtgggcctggtgaccctgaacgacatgaaggcccggcaggaggccctggtcagggagcgcgagcggcagctggccaagcgccagcacctggaggagcagcggctgcagcaggagcggcagcgggagcaggagcagcggcgcgagcgcaagcgtaagatctcctgcctgtcctttgcactagacgacctcgatgaccaggccgacgcggccgaggccaggcgcgccggaaacctgggcaagaaccccgacgtggacaccagcttcctgccagaccgcgaccgcgaggaggaggagaaccggctccgagaggagctgcgccaagagtgggaggcgcagcgcgagaaagtgaaggacgaggagatggaggtcaccttcagctactgggacggctcgggccaccggcgcacggtgcgggtgcgcaagggcaacacggtgcagcagttcctgaagaaggcgctgcaggggctgcgcaaggacttcctggagctgcgctccgccggcgtggagcagctcatgttcatcaaggaggacctcatcctgccgcactaccacaccttctacgacttcatcatcgccagggcgaggggcaagagcgggccgctcttcagcttcgatgtgcacgatgacgtgcgcctgctcagcgacgccaccatggagaaggacgagtcgcacgcgggcaaggtggtgctgcgcagctggtacgagaagaacaagcacatcttccccgccagccgctgggaggcctatgaccccgagaagaagtgggacaagtacaccatccgctaacacccgcctgccagagcggaaaccgggggtggggggagacactcatttctaggccccatcaccagtcacttgatttcgtgaccttgatttcttcccccaaatttaataaagacagagggttctcatgattcacattggttgtgctattgctgatgttatgctttggttgcttggttggtcttttctgagtattttagtgttgccacctggatttgctgcattgctctgctgagctgtattgaaaccatgactgggcccactgtcagacagaaattagaataggaggcacattttttacctggtggttatgagcatggacttgggggccacagtgactgagtttgattcccgacacagcctcctccttgctgtgtagttttgggtaagcttattaaacccccatgcctcagtttggtcacctgtaaaaggaaataacaagagcacttactttataagattgatgtgagtattaagtgaattaatatttgtaaaacgcttagctcttaataaatgtttctgttgttatta

SEQ ID NO: 172733 - DNA, 1932 bp, Artificial Sequence
  derived and/or modified sequence
acggctgtcgcgagagcccggggcgagtgggcctctgctcgtgggtggttctcgtggaggtcagctcccgcgtgtctccgctcgacagggtgcttgggcaggtaagggtccgctcagtagcccaaccctctctgtatgcagctccccaaattcagcgctgcgctcaggcatggcagccacccgttacgtggggccgttcgcatttgcatttattgaggtcaaataaaatgctggaaattggtgcctggtgacactgtcaggttggtggttaccctagcaggtcggcccagcccctgaacgcttccatcactgccgaaagccctgtgaggaggcgcagagctgagcattccccgccgttgcgtgggcccccctctacctgccgcgtttttcctctttgctgcagagcccatcgggtaggcgcgggccatggcgcagtacaagggcaccatgcgcgaggcaggccgtgccatgcacctcctcaagaagcgcgaaaggcagcgggagcagatggaggtgctgaagcagcgcatcgccgaggagaccatcctcaagtcgcaggtggacaagaggttctcggcgcattacgacgccgtggaggccgagctgaagtccagcacggtgggcctggtgaccctgaacgacatgaaggcccggcaggaggccctggtcagggagcgcgagcggcagctggccaagcgccagcacctggaggagcagcggctgcagcaggagcggcagcgggagcaggagcagcggcgcgagcgcaagcgtaagatctcctgcctgtcctttgcactagacgacctcgatgaccaggccgacgcggccgaggccaggcgcgccggaaacctgggcaagaaccccgacgtggacaccagcttcctgccagaccgcgaccgcgaggaggaggagaaccggctccgagaggagctgcgccaagagtgggaggcgcagcgcgagaaagtgaaggacgaggagatggaggtcaccttcagctactgggacggctcgggccaccggcgcacggtgcgggtgcgcaagggcaacacggtgcagcagttcctgaagaaggcgctgcaggggctgcgcaaggacttcctggagctgcgctccgccggcgtggagcagctcatgttcatcaaggaggacctcatcctgccgcactaccacaccttctacgacttcatcatcgccagggcgaggggcaagagcgggccgctcttcagcttcgatgtgcacgatgacgtgcgcctgctcagcgacgccaccatggagaaggacgagtcgcacgcgggcaaggtggtgctgcgcagctggtacgagaagaacaagcacatcttccccgccagccgctgggaggcctatgaccccgagaagaagtgggacaagtacaccatccgctaacacccgcctgccagagcggaaaccgggggtggggggagacactcatttctaggccccatcaccagtcacttgatttcgtgaccttgatttcttcccccaaatttaataaagacagagggttctcatgattcacattggttgtgctattgctgatgttatgctttggttgcttggttggtcttttctgagtattttagtgttgccacctggatttgctgcattgctctgctgagctgtattgaaaccatgactgggcccactgtcagacagaaattagaataggaggcacattttttacctggtggttatgagcatggacttgggggccacagtgactgagtttgattcccgacacagcctcctccttgctgtgtagttttgggtaagcttattaaacccccatgcctcagtttggtcacctgtaaaaggaaataacaagagcacttactttataagattgatgtgagtattaagtgaattaatatttgtaaaacgcttagctcttaataaatgtttctgttgttatta

SEQ ID NO: 172734 - DNA, 978 bp, Artificial Sequence
  derived and/or modified sequence
atggcccagtacaagggcaccatgagggaggccggccgggccatgcacctgctgaagaagcgggagcggcagcgggagcagatggaggtgctgaagcagagaattgctgaggagaccatcctgaagagccaggtggacaagcgcttcagcgcccactatgatgctgtggaggccgagctgaagagcagcacagtgggcctggtgaccctgaatgacatgaaggcccggcaggaggccctggtgcgggagcgggagcggcagctggccaagaggcagcacctggaggagcagaggctgcagcaggagcggcagcgggagcaggagcagaggcgggagaggaagaggaagatcagctgcctgagctttgccctggatgacctggatgaccaggctgatgctgctgaggccaggagagctggcaacctgggcaagaacccagatgtggacaccagcttcctgcctgaccgggaccgggaggaggaggagaaccggctgcgggaggagctgcggcaggagtgggaggcccagcgggagaaggtgaaggatgaggagatggaggtgaccttctcctactgggatggcagcggccacagaagaacagtgcgggtgaggaaaggaaacacagtgcagcagttcctgaagaaggccctgcagggcctgaggaaggacttcctggagctgcggtctgctggggtggagcagctgatgttcatcaaggaggacctgatcctgccccactaccacaccttctatgacttcatcatcgcccgggcccggggcaagagcggccccctcttctcctttgatgtgcatgatgatgtgcggctgctgagtgatgccaccatggagaaggatgagagccatgctgggaaggtggtgctgcgctcctggtatgagaagaacaagcacatcttccctgccagccgctgggaggcctatgaccctgagaagaagtgggacaagtacaccatcagatag

SEQ ID NO: 172735 - DNA, 978 bp, Artificial Sequence
  derived and/or modified sequence
atggcccagtacaagggcaccatgcgggaggccggccgggccatgcatctactaaagaagagggaaaggcagagagaacagatggaggtgctcaagcaacggatcgccgaggagacgattttgaaatcgcaggtggataaaaggttttcagcccactatgatgctgtggaggctgagctgaagagcagcactgtcggtctcgtgaccctgaacgacatgaaggcccgtcaggaagctctggtgcgcgaaagagaacgccagttagctaagcggcagcatctggaagagcagaggctccagcaagaacggcagcgggaacaagagcagaggcgtgagcgtaaacgcaaaatttcctgcttgagctttgcactagatgacctggacgaccaagctgatgctgccgaggctcggcgcgccgggaaccttggcaagaaccccgacgtcgatacttcctttcttcccgatagagatcgggaagaggaggaaaatcgcctgcgggaagagctgagacaagagtgggaggctcagagagaaaaagtaaaagatgaagaaatggaagtgaccttcagttactgggatggctccggtcacagacgtacagtccgagttcgaaagggaaatacagtgcaacagtttctgaagaaggcccttcagggactacgcaaggactttctggaactccgatccgccggagtagagcagctcatgtttatcaaggaagacctgattttgcctcactaccatacattttatgactttataatagcacgggcacggggcaagagtggccctcttttttcgttcgacgtgcacgacgacgtgcggctgctcagcgatgctacaatggaaaaagacgaatctcatgctggtaaggtggtccttagaagttggtatgagaagaataaacacatttttccggcctcccggtgggaggcatacgacccagaaaagaagtgggataaatataccatcaggtag

SEQ ID NO: 172736 - DNA, 978 bp, Artificial Sequence
  derived and/or modified sequence
atggcccagtacaagggcaccatgcgggaggccggccgggccatgcacctgctcaagaagagggagaggcaaagggagcagatggaggtactcaagcagaggatcgccgaagaaaccatattgaagtcacaggtggacaagcgcttctccgctcactacgacgctgtcgaggcagaactgaagtccagcactgtgggactggtgaccctgaacgacatgaaggctcgacaggaggccctagtgagggagcgggagagacagctggctaagcggcagcatctcgaggagcagcgtcttcagcaggaaagacagcgagaacaggaacagcgtcgggaacgcaaaagaaaaatcagttgtctgtcttttgccctcgacgacctggatgatcaagcagacgcagcagaagcccggagagcaggaaatcttggtaagaaccctgatgtcgatacgtccttcctgcccgacagagaccgggaggaggaggaaaaccgccttcgtgaggagcttcgacaggaatgggaagcccagagagagaaggtaaaggacgaggagatggaggttaccttcagttattgggacggcagcggtcatcggcggactgtgcgggtgaggaagggaaacactgtgcagcagttccttaaaaaggccctgcaaggactgaggaaggatttcctcgagctaaggtcagcaggggttgagcagttgatgttcatcaaggaagacttgatcctgccccattatcacactttctacgacttcattattgcacgcgcacgggggaaatccgggccattattctcttttgatgtgcacgacgatgtccgcctcttaagcgacgctacaatggagaaagacgagagccatgccggcaaagtggtcctcagaagttggtacgagaaaaacaagcacatctttcctgctagtcgttgggaggcatacgatcctgagaaaaagtgggataagtacactatacgatag

SEQ ID NO: 172737 - DNA, 978 bp, Artificial Sequence
  derived and/or modified sequence
atggcccaatataaagggacaatgcgtgaagccggacgcgctatgcaccttttaaaaaaacgggagcggcaaagggagcagatggaggtgctgaagcaaaggatcgcagaggagactatccttaaaagccaagtagataaacggttctccgcacactacgatgccgtggaagccgaactgaagagctccacggtgggacttgtgacgttgaacgacatgaaagcacggcaggaggccctagtgcgggaacgcgaacgacagcttgccaagagacaacatctggaagagcagaggctgcagcaggagcggcagagggaacaggagcagaggcgtgaacgtaagcgtaagatcagttgtctgtcattcgcactagatgatttggacgaccaggcagatgccgctgaagctagacgcgctggaaacctggggaaaaatccagatgtggacactagtttccttcccgatagagaccgcgaagaggaagagaacaggctaagggaggaactcaggcaagagtgggaagcacagcgagagaaagtcaaagacgaagagatggaggtgaccttttcttattgggatgggtctgggcatcgtaggaccgtacgggtcaggaaggggaacaccgtgcagcagttcctgaagaaggccttgcaagggcttaggaaggatttcttagaattaagatctgcaggagtcgagcagctgatgttcatcaaagaagaccttattctgccacactatcacacattctacgattttattattgctcgtgcaagggggaagtcaggccctcttttctcattcgatgtgcatgatgacgtgcgcctgttgtcggacgcaactatggagaaagatgaatcccatgccggaaaggtggtactgcgctcttggtatgaaaaaaacaagcacatttttcctgccagccgctgggaggcatatgaccctgaaaaaaaatgggacaaatataccatcagatag

SEQ ID NO: 172738 - DNA, 978 bp, Artificial Sequence
  derived and/or modified sequence
atggctcagtataagggaacaatgcgagaggcaggtagggccatgcacctgctcaagaaaagagaaaggcagcgggagcagatggaagtgcttaagcagaggatcgccgaggagactatccttaagtctcaggttgacaagcgctttagcgctcattacgacgctgtagaagctgagctaaagtcctccactgtgggcctggtcaccctcaacgacatgaaagcacggcaggaagctctcgttcgcgaaagagaaaggcagctcgctaagaggcagcacctggaagaacagagactccaacaggagcgacagagggaacaggaacagcggagggaacgcaaacgcaagatcagttgtctgtcttttgctctggacgatctggatgatcaggcagatgcagccgaagcgcgaagagcgggtaatctcggcaagaatcccgacgttgatacctcctttctgccagacagagatagggaagaggaagagaatcgactgcgcgaggaactaaggcaggagtgggaagctcagcgggaaaaggtgaaggacgaggagatggaggtgacttttagttactgggacggttcagggcacaggagaactgttagagtgcgaaaggggaataccgtccagcagtttctgaagaaagccttgcagggcctgcggaaggattttcttgagctgcgctccgcaggcgttgagcagctgatgttcattaaagaggatctgattctgccgcactatcacacattctacgactttatcatcgctagagccagagggaagtctggcccactcttcagtttcgatgtgcacgatgacgtgcggctcctgagtgatgcgactatggagaaggacgaaagtcacgcagggaaggttgtgcttagatcctggtacgagaagaacaagcacatttttccagcctcccgctgggaggcctatgacccggaaaagaagtgggataagtatacaataagatag

SEQ ID NO: 172739 - protein, 560 aa, Artificial Sequence
  derived and/or modified sequence
MAGPQPLALQLEQLLNPRPSEADPEADPEEATAARVIDRFDEGEDGEGDFLVVGSIRKLASASLLDTDKRYCGKTTSRKAWNEDHWEQTLPGSSDEEISDEEGSGDEDSEGLGLEEYDEDDLGAAEEQECGDHRESKKSRSHSAKTPGFSVQSISDFEKFTKGMDDLGSSEEEEDEESGMEEGDDAEDSQGESEEDRAGDRNSEDDGVVMTFSSVKVSEEVEKGRAVKNQIALWDQLLEGRIKLQKALLTTNQLPQPDVFPLFKDKGGPEFSSALKNSHKALKALLRSLVGLQEELLFQYPDTRYLVDGTKPNAGSEEISSEDDELVEEKKQQRRRVPAKRKLEMEDYPSFMAKRFADFTVYRNRTLQKWHDKTKLASGKLGKGFGAFERSILTQIDHILMDKERLLRRTQTKRSVYRVLGKPEPAAQPVPESLPGEPEILPQAPANAHLKDLDEEIFDDDDFYHQLLRELIERKTSSLDPNDQVAMGRQWLAIQKLRSKIHKKVDRKASKGRKLRFHVLSKLLSFMAPIDHTTMNDDARTELYRSLFGQLHPPDEGHGD

SEQ ID NO: 172740 - DNA, 2172 bp, Artificial Sequence
  derived and/or modified sequence
aatcccttcaaccttctgcgcgcttccgccttcatgctagcaacgcccgcagtgacgcgcaggccccgccccctcccgcgcgcctcccggaagtggccggtccagagctgtggggtggcctccgcgcggtctctggcggagtcggggaatcggatcaaggcgagaggatccggcagggaaggagcttcggggccgggggttgggccgcacatttacgtgcgcgaagcggagtggaccgggagctggtgacgatggcggggccgcagcccctggcgctgcaactggaacagttgttgaacccgcgaccaagcgaggcggaccctgaagcggaccccgaggaagccactgctgccagggtgattgacaggtttgatgaaggggaagatggggaaggtgatttcctagtagtgggtagcattagaaaactggcatcagcctccctcttggacacggacaaaaggtattgcggcaaaaccacctctagaaaagcatggaatgaagaccattgggagcagactctgccaggatcgtctgatgaggaaatatctgatgaggaagggtctggagatgaagattcagagggactgggtctggaggaatatgatgaggacgacctgggtgctgctgaggaacaggagtgtggtgatcacagggagagcaagaagagcagaagccactctgcaaaaacaccgggcttcagtgtccagagtatcagtgactttgagaaatttaccaagggaatggatgaccttgggagcagtgaggaggaggaagacgaagagagtggcatggaagaaggggatgacgcggaagactcccaaggcgagagtgaggaagacagggctggagatagaaacagtgaggatgatggtgtggtgatgaccttctctagtgtcaaagtttctgaggaagtggagaaaggaagagccgtgaagaaccagatagcactgtgggaccagctcttggaaggaaggatcaaactacaaaaagctctgttgaccaccaaccagcttcctcaaccagatgttttcccattgttcaaggacaaaggtggcccagaattttccagtgccctgaaaaatagtcacaaggcacttaaagcattgttgaggtcattggtaggtcttcaggaagagttgcttttccagtacccagacactagatatctagtagatgggacaaagcccaatgcgggaagtgaggagatttctagtgaagatgatgagctggtagaagagaagaagcagcaacgaagaagggtccctgcaaagaggaagctggagatggaggactatcccagcttcatggcaaagcgctttgccgactttacagtctacaggaaccgcacacttcagaaatggcacgataagaccaaactggcttctggaaaactggggaagggttttggtgcctttgaacgctcaatcttgactcagatcgaccatattctgatggacaaagagagattacttcgaaggacacagaccaagcgctctgtctatcgagttcttggcaaacctgagccagcagctcagcctgtcccagagagtttgccaggggaaccggagatccttcctcaagcccctgctaatgctcatctgaaggacttggatgaagaaatctttgatgatgatgacttttaccaccagctccttcgagaactcatagaacggaagaccagctccttggatcccaacgatcaggtggccatgggaaggcagtggcttgcaatccagaagttacgaagcaaaatccacaaaaaagtagataggaaagccagcaaaggcaggaaacttcggtttcatgtccttagcaagctactgagtttcatggcacctattgaccatactacaatgaatgatgatgccaggacagaactgtaccgctctctttttggccagctccaccctcccgacgaaggccacggggattgacatcgcccacctccgacacccagtgggcgccttggctggtgcggctgctggtccagatggaggaaaccagtgactttatggggctgagctagtagggaagcccctggaaagatgctgcgttccgaacctgtgcctaatacacgcaagggcgctgtcccgcccaaccccgcctttaaacgccacaaataaagagcattgttaccgccaaaaaaaaaaaaaaaaaaaaaaaaaaaaaaaa

SEQ ID NO: 172741 - DNA, 1683 bp, Artificial Sequence
  derived and/or modified sequence
atggccggcccccagcccctggccctgcagctggagcagctgctgaaccccagacccagcgaggccgaccccgaggccgaccccgaggaggccaccgccgccagagtgatcgacagattcgacgagggcgaggacggcgagggcgacttcctggtggtgggcagcatcagaaagctggccagcgccagcctgctggacaccgacaagagatactgcggcaagaccaccagcagaaaggcctggaacgaggaccactgggagcagaccctgcccggcagcagcgacgaggagatcagcgacgaggagggcagcggcgacgaggacagcgagggcctgggcctggaggagtacgacgaggacgacctgggcgccgccgaggagcaggagtgcggcgaccacagagagagcaagaagagcagaagccacagcgccaagacccccggcttcagcgtgcagagcatcagcgacttcgagaagttcaccaagggcatggacgacctgggcagcagcgaggaggaggaggacgaggagagcggcatggaggagggcgacgacgccgaggacagccagggcgagagcgaggaggacagagccggcgacagaaacagcgaggacgacggcgtggtgatgaccttcagcagcgtgaaggtgagcgaggaggtggagaagggcagagccgtgaagaaccagatcgccctgtgggaccagctgctggagggcagaatcaagctgcagaaggccctgctgaccaccaaccagctgccccagcccgacgtgttccccctgttcaaggacaagggcggccccgagttcagcagcgccctgaagaacagccacaaggccctgaaggccctgctgagaagcctggtgggcctgcaggaggagctgctgttccagtaccccgacaccagatacctggtggacggcaccaagcccaacgccggcagcgaggagatcagcagcgaggacgacgagctggtggaggagaagaagcagcagagaagaagagtgcccgccaagagaaagctggagatggaggactaccccagcttcatggccaagagattcgccgacttcaccgtgtacagaaacagaaccctgcagaagtggcacgacaagaccaagctggccagcggcaagctgggcaagggcttcggcgccttcgagagaagcatcctgacccagatcgaccacatcctgatggacaaggagagactgctgagaagaacccagaccaagagaagcgtgtacagagtgctgggcaagcccgagcccgccgcccagcccgtgcccgagagcctgcccggcgagcccgagatcctgccccaggcccccgccaacgcccacctgaaggacctggacgaggagatcttcgacgacgacgacttctaccaccagctgctgagagagctgatcgagagaaagaccagcagcctggaccccaacgaccaggtggccatgggcagacagtggctggccatccagaagctgagaagcaagatccacaagaaggtggacagaaaggccagcaagggcagaaagctgagattccacgtgctgagcaagctgctgagcttcatggcccccatcgaccacaccaccatgaacgacgacgccagaaccgagctgtacagaagcctgttcggccagctgcacccccccgacgagggccacggcgactag

SEQ ID NO: 172742 - DNA, 1683 bp, Artificial Sequence
  derived and/or modified sequence
atggctggaccccagccgctagcattacagctggagcagttattgaatcccaggcctagcgaagccgaccccgaggcagacccggaggaagccaccgccgcccgagtcattgaccgatttgacgaaggggaggatggtgagggtgatttccttgtggtgggcagcatacggaaacttgcctctgcctcactactggacactgacaagcggtactgtgggaagactacctctagaaaagcgtggaatgaggatcactgggaacaaacgcttcccggtagcagcgacgaagagataagcgacgaggaagggtctggtgacgaagatagtgaagggctgggattggaggagtatgatgaggatgacctgggtgccgctgaggagcaggaatgtggagatcatagggaatcaaagaagagcagaagccactcagcgaaaactccgggcttttccgtacagtccataagtgattttgagaaattcaccaagggaatggatgatctgggatcaagtgaggaggaggaggatgaagaaagcggcatggaggaaggagacgacgccgaagactctcagggcgaatccgaggaggatagggcgggagaccgtaactcagaagacgatggagttgtaatgacattctcttcagtcaaggtgagcgaggaagtcgagaagggaagagctgtcaaaaatcaaatcgcgctgtgggaccaattgttggagggacggattaagctgcagaaggccctgttgactaccaaccagctgccacagccggacgtgttcccactctttaaggacaagggcgggccggagttctctagcgcattgaagaattcgcacaaagctttaaaagctctactgagaagcctagtaggacttcaggaagagcttctgtttcagtatccagataccaggtatctggttgacggtacaaaacccaatgctggatctgaagagatttcaagcgaagacgatgaactcgtggaagaaaaaaaacagcagcgccggcgagtgcctgccaagagaaaactagagatggaagattacccaagcttcatggcgaagcgatttgctgactttacagtgtaccgaaaccggactctgcagaagtggcacgataaaaccaaattagcatccggcaaactggggaaaggattcggcgccttcgaacggtctatccttactcagattgaccatattcttatggacaaagaacgcctcctccgccggactcagaccaagaggtccgtgtaccgtgtattaggtaagccggagccagccgcgcagcctgtccccgagagtcttcccggcgagcctgagatcctaccgcaagcccctgctaatgctcacctcaaggatctggatgaggaaattttcgacgatgatgacttttatcatcaactgctgcgagagcttatcgagagaaagacatcttcattagaccctaatgatcaagttgcgatggggcgccagtggctggctattcagaaactgcggtccaaaatccataagaaggtggatcgcaaagcctcaaaaggccggaagctcaggttccacgtactcagtaagctgctttcattcatggcaccgatagaccataccacgatgaatgatgacgcaaggacggagctctatagaagcctgttcgggcagctccaccccccagacgagggccacggagactag

SEQ ID NO: 172743 - DNA, 1683 bp, Artificial Sequence
  derived and/or modified sequence
atggccggcccccagcccctggccctgcagctggagcagctgctgaacccccggcccagcgaggccgaccctgaggccgaccctgaggaggccacagctgcccgggtgattgacagatttgatgaaggagaagatggagagggggacttcctggtggtgggcagcatcaggaagctggccagcgccagcctgctggacacagacaagcgctactgtgggaagaccaccagcaggaaggcctggaatgaagaccactgggagcagaccctgcccggcagcagtgatgaggagatcagtgatgaggagggcagcggagatgaagattctgagggcctgggcctggaggagtatgatgaagatgacctgggcgctgctgaggagcaggagtgtggggaccaccgggagagcaagaagagccgcagccacagcgccaagaccccaggcttctctgtgcagagcatcagtgactttgagaagttcaccaagggcatggatgacctgggcagcagcgaggaggaggaggatgaggagagcggcatggaggagggagatgatgctgaggacagccagggcgagagtgaagaagatcgggccggggacagaaattctgaagatgatggagtggtgatgaccttcagctctgtgaaggtgtctgaggaggtggagaagggccgggctgtgaagaaccagatcgccctgtgggaccagctgctggagggccgcatcaagctgcagaaggccctgctgaccaccaaccagctgccccagccagatgtgttccccctcttcaaggacaagggcggccctgagttcagcagcgccctgaagaacagccacaaggccctgaaggccctgctgcggagcctggtgggcctgcaggaggagctgctcttccagtacccagacacccgctacctggtggatggcaccaagcccaatgccggcagcgaggagatcagcagtgaagatgatgagctggtggaggagaagaagcagcagaggagaagagtgcctgccaagaggaagctggagatggaggactaccccagcttcatggccaagagatttgctgacttcaccgtgtacagaaacagaaccctgcagaagtggcatgacaagaccaagctggccagcggcaagctgggcaaaggatttggagcctttgagaggagcatcctgacccagattgaccacatcctgatggacaaggagcggctgctgcggaggacccagaccaagaggtctgtgtacagagtgctgggcaagccagagcctgctgcccagcctgtgcctgagagcctgcctggagagcctgagatcctgccccaggccccagccaatgcccacctgaaggacctggatgaggagatctttgatgatgatgacttctaccaccagctgctgcgggagctgattgaaaggaagaccagcagcctggaccccaatgaccaggtggccatgggccggcagtggctggccatccagaagctgcggagcaagatccacaagaaggtggacaggaaggccagcaaaggaaggaagctgcgcttccacgtgctgagcaagctgctgtccttcatggcccccatcgaccacaccaccatgaatgatgatgccaggacagagctgtaccgcagcctgtttggccagctgcaccccccagatgagggccacggggactag

SEQ ID NO: 172744 - DNA, 1683 bp, Artificial Sequence
  derived and/or modified sequence
atggccggcccccagcccctggccctgcagctggagcagctgctgaaccctaggccctctgaggccgaccccgaggctgacccagaggaggcgaccgcagctcgcgtgatcgatagatttgatgagggtgaggatggcgaaggggacttcctggtcgtagggagcatccggaagctcgctagcgcatcattgctcgacacagacaaacggtattgcggtaaaacaacatctcgtaaggcatggaacgaagaccactgggaacagaccctaccagggtcatcagacgaggagatcagcgatgaagaaggtagcggtgacgaggactctgagggcttgggactggaggagtacgatgaagatgatctcggagcggcggaagaacaggagtgcggtgatcaccgagagtcaaagaagtcccggtcacacagcgctaaaacaccgggcttcagtgtgcagagtatcagtgactttgaaaagttcacaaaaggcatggatgatctggggagctcggaggaagaagaggatgaggagtcaggcatggaagaaggagatgacgccgaagatagccagggcgagagtgaggaggaccgggccggcgacaggaatagtgaggacgatggggtggttatgacattttcatcagtcaaagtgtcagaggaggtcgagaaggggcgggccgtaaagaaccagatagccctctgggatcagctgctggagggcagaattaagctccagaaagccttgctgaccacaaaccagctgccccagccagatgtattcccgcttttcaaagacaagggcggccctgaattctcgtccgcccttaagaactcgcataaggcactgaaggctttattgaggtccctcgtcggactgcaggaagagctactgttccagtaccccgacaccaggtatctcgtggacggtacaaagccgaacgcaggaagcgaagagatatctagcgaggacgacgaactcgtcgaggagaagaagcaacagcggaggcgcgtgcctgcgaagcgtaaattggaaatggaggactacccatcatttatggcaaagcgattcgctgattttaccgtgtacagaaatagaactttacagaaatggcacgataaaacgaagctggcctcaggaaagctgggcaagggcttcggcgccttcgaaagatccattctaacacaaatagaccacatcctaatggataaggagagacttctgagaagaactcagaccaagcgctctgtttaccgggttttagggaagccagaacccgcagcgcagcctgttccagagagtctgcccggggaaccagagattctcccacaagcacccgcaaacgcccacctgaaagatttagacgaagaaatctttgatgatgacgatttctaccaccaattgctccgagaactcattgagaggaagacctccagtctagacccgaacgaccaagtggctatgggaaggcagtggctggccatccagaagctaagatccaaaatacacaagaaggttgacaggaaagccagtaagggccgtaaattaagatttcatgtcttatctaagctgctctcatttatggctcccatcgaccacacaacaatgaatgatgatgcgaggacagaattgtataggtccttgtttggacaacttcaccctcctgacgaaggccacggtgactag

SEQ ID NO: 172745 - DNA, 2140 bp, Artificial Sequence
  derived and/or modified sequence
aatcccttcaaccttctgcgcgcttccgccttcatgctagcaacgcccgcagtgacgcgcaggccccgccccctcccgcgcgcctcccggaagtggccggtccagagctgtggggtggcctccgcgcggtctctggcggagtcggggaatcggatcaaggcgagaggatccggcagggaaggagcttcggggccgggggttgggccgcacatttacgtgcgcgaagcggagtggaccgggagctggtgacgatggcggggccgcagcccctggcgctgcaactggaacagttgttgaacccgcgaccaagcgaggcggaccctgaagcggaccccgaggaagccactgctgccagggtgattgacaggtttgatgaaggggaagatggggaaggtgatttcctagtagtgggtagcattagaaaactggcatcagcctccctcttggacacggacaaaaggtattgcggcaaaaccacctctagaaaagcatggaatgaagaccattgggagcagactctgccaggatcgtctgatgaggaaatatctgatgaggaagggtctggagatgaagattcagagggactgggtctggaggaatatgatgaggacgacctgggtgctgctgaggaacaggagtgtggtgatcacagggagagcaagaagagcagaagccactctgcaaaaacaccgggcttcagtgtccagagtatcagtgactttgagaaatttaccaagggaatggatgaccttgggagcagtgaggaggaggaagacgaagagagtggcatggaagaaggggatgacgcggaagactcccaaggcgagagtgaggaagacagggctggagatagaaacagtgaggatgatggtgtggtgatgaccttctctagtgtcaaagtttctgaggaagtggagaaaggaagagccgtgaagaaccagatagcactgtgggaccagctcttggaaggaaggatcaaactacaaaaagctctgttgaccaccaaccagcttcctcaaccagatgttttcccattgttcaaggacaaaggtggcccagaattttccagtgccctgaaaaatagtcacaaggcacttaaagcattgttgaggtcattggtaggtcttcaggaagagttgcttttccagtacccagacactagatatctagtagatgggacaaagcccaatgcgggaagtgaggagatttctagtgaagatgatgagctggtagaagagaagaagcagcaacgaagaagggtccctgcaaagaggaagctggagatggaggactatcccagcttcatggcaaagcgctttgccgactttacagtctacaggaaccgcacacttcagaaatggcacgataagaccaaactggcttctggaaaactggggaagggttttggtgcctttgaacgctcaatcttgactcagatcgaccatattctgatggacaaagagagattacttcgaaggacacagaccaagcgctctgtctatcgagttcttggcaaacctgagccagcagctcagcctgtcccagagagtttgccaggggaaccggagatccttcctcaagcccctgctaatgctcatctgaaggacttggatgaagaaatctttgatgatgatgacttttaccaccagctccttcgagaactcatagaacggaagaccagctccttggatcccaacgatcaggtggccatgggaaggcagtggcttgcaatccagaagttacgaagcaaaatccacaaaaaagtagataggaaagccagcaaaggcaggaaacttcggtttcatgtccttagcaagctactgagtttcatggcacctattgaccatactacaatgaatgatgatgccaggacagaactgtaccgctctctttttggccagctccaccctcccgacgaaggccacggggattgacatcgcccacctccgacacccagtgggcgccttggctggtgcggctgctggtccagatggaggaaaccagtgactttatggggctgagctagtagggaagcccctggaaagatgctgcgttccgaacctgtgcctaatacacgcaagggcgctgtcccgcccaaccccgcctttaaacgccacaaataaagagcattgttaccgcc

SEQ ID NO: 172746 - DNA, 1683 bp, Artificial Sequence
  derived and/or modified sequence
atggcaggtccacagcctttggccttgcagttggagcaacttctcaatcctcgtccctccgaggcagatcccgaggcagacccagaagaggccaccgctgctagggtcatcgacaggttcgacgaaggtgaggacggcgagggcgactttttagttgtgggctctatcagaaagctggccagcgcctcactcctcgacacagataagcggtattgtggaaaaactacatctaggaaggcctggaatgaagatcactgggagcagaccctacctggatcttctgatgaagagatatccgatgaagagggaagtggagatgaggatagcgaaggacttggcctggaggagtatgatgaggacgacctaggcgctgctgaggaacaagagtgtggggaccacagagagtccaagaaatcccgatcacattcagcgaagaccccaggtttctctgtgcagagtatttccgactttgagaagttcactaagggcatggacgatctggggagttccgaagaggaggaggatgaagaatctggtatggaggaaggcgacgatgcagaggattctcagggagagagcgaggaagatagagcaggtgaccgaaactcggaggatgatggcgtggtcatgacattttccagcgttaaggtcagcgaagaggtggagaaaggaagggccgtcaaaaaccagattgccttgtgggatcagctgcttgaagggagaataaagctgcagaaagccctcctcaccactaaccagttaccacagcccgatgtgttccctttgttcaaggacaaagggggaccagagttctcttccgccctgaagaatagtcataaagcccttaaagcactattgcgtagcttggttgggctccaggaggaactgttgttccagtaccctgacactcgttacttagtagatggaacgaaacccaatgctggcagtgaggaaataagttctgaggatgacgagctcgtggaagagaaaaaacagcagcgcagacgggtgcccgctaaaaggaaattggaaatggaagattacccgtcatttatggccaagcggtttgctgatttcacggtctaccggaacaggacactccagaagtggcatgataaaaccaaactcgctagcggaaaactgggaaaaggattcggagccttcgaacggtccatactgactcagattgaccatattctgatggataaagagcgtcttctgcgcagaacccaaactaagaggagcgtctatcgtgtgctgggaaagcctgagcccgcagcacagcccgttcctgaaagtttacccggagagcccgaaattttgccccaggccccagctaatgcgcatctgaaggacttagatgaagagatatttgatgatgacgatttttaccatcagctcttgcgtgagttgatcgagcggaagacttctagcctggatcctaatgatcaagtggccatggggcgacaatggctggcgattcagaaactgcgttccaagattcacaaaaaagtagaccgaaaggcctctaagggcaggaagctccgctttcacgtgctgtccaaattgttgtcgttcatggccccaatcgaccacacgactatgaatgacgatgccaggacagaattatatagaagtctgttcgggcagctgcacccgcctgacgagggtcatggcgactag

SEQ ID NO: 172747 - protein, 458 aa, Artificial Sequence [sequence omitted]

SEQ ID NO: 172748 - protein, 288 aa, Artificial Sequence
  derived and/or modified sequence
MEREPSASEAAPAAAALFAWGANSYGQLGLGHKEDVLLPQQLNDFCKPRSVRRITGGGGHSAVVTDGGDLFVCGLNKDGQLGLGHTEDIPYFTPCKSLFGCPIQQVACGWDFTIMLTENGQVLSCGSNSFGQLGVPHGPRRCVVPQAIELHKEKVVCIAAGLRHAVAATASGIVFQWGTGLASCGRRLCPGQTLPLFFTAKEPSRVTGLENSKAMCVLAGSDHSASLTDAGEVYVWGSNKHGQLANEAAFLPVPQKIEAHCFQNEKVTAIWSGWTHLVAQTGLLWLRA

SEQ ID NO: 172749 - protein, 174 aa, Artificial Sequence
  derived and/or modified sequence
MLTENGQVLSCGSNSFGQLGVPHGPRRCVVPQAIELHKEKVVCIAAGLRHAVAATASGIVFQWGTGLASCGRRLCPGQTLPLFFTAKEPSRVTGLENSKAMCVLAGSDHSASLTDAGEVYVWGSNKHGQLANEAAFLPVPQKIEAHCFQNEKVTAIWSGWTHLVAQTGLLWLRA

SEQ ID NO: 172750 - DNA, 867 bp, Artificial Sequence
  derived and/or modified sequence
atggagagagagcccagcgccagcgaggccgcccccgccgccgccgccctgttcgcctggggcgccaacagctacggccagctgggcctgggccacaaggaggacgtgctgctgccccagcagctgaacgacttctgcaagcccagaagcgtgagaagaatcaccggcggcggcggccacagcgccgtggtgaccgacggcggcgacctgttcgtgtgcggcctgaacaaggacggccagctgggcctgggccacaccgaggacatcccctacttcaccccctgcaagagcctgttcggctgccccatccagcaggtggcctgcggctgggacttcaccatcatgctgaccgagaacggccaggtgctgagctgcggcagcaacagcttcggccagctgggcgtgccccacggccccagaagatgcgtggtgccccaggccatcgagctgcacaaggagaaggtggtgtgcatcgccgccggcctgagacacgccgtggccgccaccgccagcggcatcgtgttccagtggggcaccggcctggccagctgcggcagaagactgtgccccggccagaccctgcccctgttcttcaccgccaaggagcccagcagagtgaccggcctggagaacagcaaggccatgtgcgtgctggccggcagcgaccacagcgccagcctgaccgacgccggcgaggtgtacgtgtggggcagcaacaagcacggccagctggccaacgaggccgccttcctgcccgtgccccagaagatcgaggcccactgcttccagaacgagaaggtgaccgccatctggagcggctggacccacctggtggcccagaccggcctgctgtggctgagagcctag

SEQ ID NO: 172751 - DNA, 525 bp, Artificial Sequence
  derived and/or modified sequence
atgctgaccgagaacggccaggtgctgagctgcggcagcaacagcttcggccagctgggcgtgccccacggccccagaagatgcgtggtgccccaggccatcgagctgcacaaggagaaggtggtgtgcatcgccgccggcctgagacacgccgtggccgccaccgccagcggcatcgtgttccagtggggcaccggcctggccagctgcggcagaagactgtgccccggccagaccctgcccctgttcttcaccgccaaggagcccagcagagtgaccggcctggagaacagcaaggccatgtgcgtgctggccggcagcgaccacagcgccagcctgaccgacgccggcgaggtgtacgtgtggggcagcaacaagcacggccagctggccaacgaggccgccttcctgcccgtgccccagaagatcgaggcccactgcttccagaacgagaaggtgaccgccatctggagcggctggacccacctggtggcccagaccggcctgctgtggctgagagcctag

SEQ ID NO: 172752 - DNA, 1377 bp, Artificial Sequence
  derived and/or modified sequence
atggagcgcgaacccagtgcttctgaggctgcacccgctgctgccgctctgttcgcatggggtgcaaactcttacggtcagttgggactgggacacaaagaggacgtgctactaccacaacagctcaacgatttttgtaagcctagatcagttagaaggatcactgggggcggaggccattctgcagtggtgacggacggaggcgacctgtttgtttgtggacttaacaaggacggccagctgggattaggccataccgaggacattccctatttcactccatgcaaaagcttgttcggatgcccaatacagcaagtcgcttgcggctgggacttcacgattatgctgacagagaacggccaggtacttagttgcggctctaactctttcggtcaactgggcgtgccacacggaccaagacgctgcgtagttccccaggctatcgagctgcacaaagagaaagtggtgtgtatcgctgccgggttgaggcacgccgtcgctgccactgcctcagggatcgtgttccagtggggaacaggtctcgccagttgcggaagaaggctttgcccgggacagacgctcccgctattttttactgctaaagagccaagccgggttaccggcctggagaactccaaagcgatgtgcgttctcgcaggctctgaccattcagcatcactgacagacgccggcgaggtgtacgtttggggatccaacaagcacggtcagctggctaacgaggcggcttttctcccggttccccaaaagattgaagctcattgtttccagaatgaaaaagtcacggccatttggtcaggatggactcaccttgtggcccagaccgaaactggtaaaatgttcacctggggcagagccgactatggccagctgggcaggaagctcgagacatacgaggggtggaaactggagaaacaggactcattcctgccgtgctctcgaccccccaactcaatgccctctagccctcactgccttacaggcgccacagaggtgtcctgcggaagtgagcacaacttggctatcatcgggggagtgtgctatagctgggggtggaatgagcacgggatgtgcggtgatgggaccgaggcaaatgtatgggcccctaaaccggttcaggcactgctgtcatcctcaggcctgctagtgggctgcggagccggccattctctcgccttatgccagttacctgcccatcccgctcttgtgcaagacccaaaagtgacttatctgtcgcccgatgcaatcgaggataccgagtcacagaaggcaatggacaaggagcgaaattggaaggagcgccaatccgagaccagtacccagtctcagagcgattggagcagaaacggcggtctgtag

SEQ ID NO: 172753 - DNA, 867 bp, Artificial Sequence
  derived and/or modified sequence
atggagagggagcctagtgcctccgaagcggcacctgcagctgcagccctgttcgcttggggcgccaacagctacggacagctcggcctgggacacaaagaggacgtgctactgccccagcaactgaacgatttctgcaagcctcggtcagtacggcggataaccggcgggggaggccacagcgcagttgtcacggacggcggcgatctgttcgtgtgcggactgaataaggacggacagctcggtctaggacacaccgaggatataccgtattttaccccttgcaaatctctgttcggatgccccattcaacaggtagcttgcgggtgggattttacgatcatgctcaccgagaacggacaagttttatcctgcggatctaacagcttcggtcagctcggagtcccccacggaccccggaggtgtgtggtcccgcaggccatcgaacttcataaagagaaagttgtgtgtatagcggcaggactccggcacgccgtggcggccacggcgagtggcatcgtgtttcaatggggtaccggcctcgcctcctgcggaaggcgtctgtgcccgggacagacattgcctctgtttttcacagctaaggaacctagtcgggtcacgggcttagaaaattccaaagccatgtgtgtcctggcggggagtgatcactcagccagtctgactgatgcgggggaggtctatgtctggggctcaaacaaacatggacagcttgcaaacgaggcagcctttctacccgtcccccagaaaattgaggctcattgttttcagaacgaaaaggtcacagctatttggtctgggtggactcaccttgtggctcagacagggcttctctggctccgtgcctag

SEQ ID NO: 172754 - DNA, 525 bp, Artificial Sequence
  derived and/or modified sequence
atgcttaccgaaaacggacaggtattgagctgcgggagtaattcttttggacagctgggcgtgccacacggaccacgcaggtgcgtggtgccccaggctatcgagctgcacaaagagaaggtcgtttgcattgctgcagggcttcgccatgccgtcgctgcaacagcctcgggtatcgttttccaatggggcacaggattggcaagttgcggtaggagactttgtccagggcagacacttccgttgttttttactgctaaagaaccaagtcgtgttaccggtctagagaactcaaaagccatgtgtgtactagcaggctctgaccactctgcatccctgaccgacgcaggggaagtttacgtgtggggcagcaataagcacggccagcttgcaaacgaggcagcctttttaccggttccccagaaaattgaagctcattgcttccaaaatgaaaaagtcactgctatttggtccggctggacccacctcgtcgcacagaccgggctgttgtggttgcgagcatag

SEQ ID NO: 172755 - DNA, 1377 bp, Artificial Sequence
  derived and/or modified sequence
atggagcgggagcccagcgccagcgaggccgccccagctgctgctgccctgtttgcctggggcgccaacagctatggccagctgggcctgggccacaaggaggatgtgctgctgccccagcagctgaatgacttctgcaagcccaggtctgtgcggcgcatcactggaggcggcggccacagcgctgtggtgacagatggaggagacctgtttgtgtgtggcctgaacaaggatggccagctgggcctgggccacacagaggacatcccctacttcaccccctgcaagagcctgtttggctgccccatccagcaggtggcctgtggctgggacttcaccatcatgctgacagaaaatggccaggtgctgagctgtggcagcaacagctttggccagctgggcgtgccccacggcccccggcgctgtgtggtgccccaggccatcgagctgcacaaggagaaggtggtgtgcatcgccgccggcctgcggcatgctgtggccgccacagccagcggcatcgtgttccagtggggcaccggcctggccagctgtggccggcggctgtgccccggccagaccctgcccctcttcttcaccgccaaggagcccagccgggtgacaggcctggagaacagcaaggccatgtgtgtgctggccggcagtgaccacagcgccagcctgacagatgctggggaggtgtatgtgtggggcagcaacaagcacggccagctggccaatgaggccgccttcctgcctgtgccccagaagattgaggcccactgcttccagaatgagaaggtgacagccatctggagcggctggacccacctggtggcccagacagaaacaggcaagatgttcacctggggccgggctgactatggccagctgggcaggaagctggagacctatgagggctggaagctggagaagcaggacagcttcctgccctgcagcaggcctcccaacagcatgcccagcagcccccactgcctgactggagccacagaggtgtcctgtggcagcgagcacaacctggccatcattggaggagtgtgctacagctggggctggaatgaacatggcatgtgtggagatggaacagaggccaacgtgtgggcccccaagcctgtgcaggccctgctgagcagcagcggcctgctggtgggctgtggggccggccacagcctggccctgtgccagctgcctgcccacccagccctggtgcaggaccccaaggtgacctacctgagcccagatgccatcgaggacacagagagccagaaggccatggacaaggagaggaactggaaggagcggcagagcgagaccagcacccagagccagagcgactggagcagaaatggaggcctgtag

SEQ ID NO: 172756 - DNA, 867 bp, Artificial Sequence
  derived and/or modified sequence
atggagcgggagcccagcgccagcgaggccgccccagctgctgctgccctgtttgcctggggcgccaacagctatggccagctgggcctgggccacaaggaggatgtgctgctgccccagcagctgaatgacttctgcaagcccaggtctgtgcggcgcatcactggaggcggcggccacagcgctgtggtgacagatggaggagacctgtttgtgtgtggcctgaacaaggatggccagctgggcctgggccacacagaggacatcccctacttcaccccctgcaagagcctgtttggctgccccatccagcaggtggcctgtggctgggacttcaccatcatgctgacagaaaatggccaggtgctgagctgtggcagcaacagctttggccagctgggcgtgccccacggcccccggcgctgtgtggtgccccaggccatcgagctgcacaaggagaaggtggtgtgcatcgccgccggcctgcggcatgctgtggccgccacagccagcggcatcgtgttccagtggggcaccggcctggccagctgtggccggcggctgtgccccggccagaccctgcccctcttcttcaccgccaaggagcccagccgggtgacaggcctggagaacagcaaggccatgtgtgtgctggccggcagtgaccacagcgccagcctgacagatgctggggaggtgtatgtgtggggcagcaacaagcacggccagctggccaatgaggccgccttcctgcctgtgccccagaagattgaggcccactgcttccagaatgagaaggtgacagccatctggagcggctggacccacctggtggcccagacaggcctgctgtggctgcgggcctag

SEQ ID NO: 172757 - DNA, 525 bp, Artificial Sequence
  derived and/or modified sequence
atgctgacagaaaatggccaggtgctgagctgtggcagcaacagctttggccagctgggcgtgccccacggcccccggcgctgtgtggtgccccaggccatcgagctgcacaaggagaaggtggtgtgcatcgccgccggcctgcggcatgctgtggccgccacagccagcggcatcgtgttccagtggggcaccggcctggccagctgtggccggcggctgtgccccggccagaccctgcccctcttcttcaccgccaaggagcccagccgggtgacaggcctggagaacagcaaggccatgtgtgtgctggccggcagtgaccacagcgccagcctgacagatgctggggaggtgtatgtgtggggcagcaacaagcacggccagctggccaatgaggccgccttcctgcctgtgccccagaagattgaggcccactgcttccagaatgagaaggtgacagccatctggagcggctggacccacctggtggcccagacaggcctgctgtggctgcgggcctag

SEQ ID NO: 172758 - DNA, 1377 bp, Artificial Sequence
  derived and/or modified sequence
atggagcgggagcccagcgccagcgaggccgcccccgccgccgccgccttgtttgcttggggggcgaactcctatggccagttaggactgggccataaagaagacgtactcctgccccagcagctgaatgacttctgtaagccaaggtcggtacggcggatcaccggtggcggaggtcattctgccgtggtgaccgatgggggagacctatttgtctgcggccttaacaaagacggacaactgggtctgggccatactgaggacattccctattttaccccctgcaaaagcctgtttggatgccccattcagcaggtggcctgtgggtgggactttacaatcatgcttaccgagaatggacaggtcttatcctgtggaagcaactcttttggtcagctgggtgttcctcacgggccgcggaggtgtgtggtcccgcaggctattgagctgcataaagagaaggttgtctgcattgccgccggacttcggcacgctgtggcggctacagccagcggaatcgtttttcagtggggcaccggactcgcctcatgtggcagacgcctgtgtccaggccagaccctgcccctgttttttacagctaaggagccgtctagagttactggacttgaaaattcaaaggctatgtgtgtgctggccggtagtgaccactccgccagcctgaccgacgccggggaggtgtacgtgtggggatctaacaagcacgggcaactcgctaacgaagccgcttttctgcccgtaccacagaagattgaagcgcattgctttcagaacgagaaagtcaccgcaatttggtcaggatggacgcatctggtggcccagacggaaactggtaagatgttcacctggggacgagcagattacgggcaactgggcaggaaactagagacttacgaggggtggaagttagaaaaacaggattcttttctgccttgctcccggccgcctaactctatgcctagctctcctcattgtctgaccggcgcaacagaagtctcttgcgggagtgagcacaatttagccataattgggggggtgtgttatagctggggctggaacgagcacggaatgtgcggagatggaaccgaagcgaacgtgtgggcccccaagcctgttcaggccctgctctcctcttcaggcctcttagttggctgcggtgctggtcacagtctggcgttgtgtcagcttcccgctcaccccgctctggtgcaagacccaaaggttacttatttgtcacccgacgccattgaggataccgagagccagaaagctatggataaggagagaaattggaaagaaagacagagtgaaacaagtacacaatcacagtcggactggagcagaaacggaggcctgtag

SEQ ID NO: 172759 - DNA, 867 bp, Artificial Sequence
  derived and/or modified sequence
atggagcgggagcccagcgccagcgaggccgcccccgccgccgccgctttgtttgcttggggcgctaactcttacggacagcttggcctcggacataaggaggacgtcctgctccctcagcagctgaatgatttctgtaagcccaggagcgtgcggagaatcactggcggaggtggacacagtgctgtggtgactgacggcggggatttgtttgtgtgtggtttgaataaagatggtcagttgggactgggccatacggaagacattccctattttaccccttgtaaatcacttttcggatgtcctatccaacaggtcgcttgtggttgggacttcaccatcatgctgaccgaaaacggccaagttctcagttgcggctccaattcctttggccaactaggagtgccgcacggcccaaggagatgcgtggtgccccaggccattgagctgcacaaagaaaaggttgtgtgtattgccgccggacttcgccacgcggtcgctgcaaccgcctccggcattgttttccagtgggggactggcctcgccagctgtggacgacggctgtgccctgggcagacactgcccctctttttcaccgccaaagaaccttctagagtaactggactggagaacagcaaagctatgtgtgttctggccggatctgatcacagtgcatcactaactgatgctggcgaggtttacgtgtgggggtccaataaacacggccagctggctaacgaggccgcgttcttgccagtccctcagaagatcgaggctcactgtttccagaatgaaaaggttactgccatctggtcaggatggacacatctcgtggctcagacggggctcctgtggctccgagcttag

SEQ ID NO: 172760 - DNA, 525 bp, Artificial Sequence
  derived and/or modified sequence
atgctgaccgagaacggccaggtgctgagctgcggcagcaacagctttggccagttgggggtaccacacggtcccaggcgctgtgtggtcccacaagcaatagagcttcataaagagaaagtggtgtgcatcgcggccgggctgaggcatgctgtcgccgccacagcaagcggtatcgttttccagtggggaaccgggctggcctcctgtggacgaagactctgtccaggtcagacactgcccctgtttttcaccgcaaaggagccgtcgagagtgacagggctcgagaactccaaggctatgtgtgtattagctggaagtgaccacagtgctagccttaccgatgccggagaagtgtacgtgtgggggagcaataaacatggacagttggctaatgaggccgccttcctccctgttcctcagaagatcgaggcccactgcttccagaatgaaaaagtgactgcaatttggtctggctggacccacctggtggcacaaacagggttactgtggctccgtgcctag

SEQ ID NO: 172761 - DNA, 1377 bp, Artificial Sequence
  derived and/or modified sequence
atggagcgtgagccatcggcctctgaggcagccccagccgctgcagcgctcttcgcatggggggcaaactcttatggtcaattgggacttggtcacaaagaggatgtgttattaccacagcaactgaacgatttttgtaagcccagatctgtgagaagaatcaccggaggaggaggtcactctgctgtcgtgacagatggaggtgatttgttcgtgtgcggtcttaacaaggatggacagctggggctggggcacacggaggacatcccctattttacgccgtgtaaaagcctgttcggctgtcccattcagcaggtagcttgtgggtgggatttcaccattatgctgacggaaaatggtcaggtcctgtcctgtggctccaactccttcggacagttaggcgtgcctcacgggccacgaaggtgtgtggtcccccaagccattgagctgcataaggaaaaggtcgtatgcattgcagctggactgcggcacgctgttgcagcaactgctagtggaatcgtgtttcagtggggcaccggcctggcttcctgtggcaggaggctgtgcccaggccagaccctgcctcttttcttcactgcgaaggagccctcaagagttactggattggagaactctaaagccatgtgcgttctggccggatctgaccacagcgcttctctcacagacgctggagaggtatacgtttggggaagcaacaaacacggtcaacttgccaacgaagccgcttttttgccagtgccacagaaaattgaggctcattgctttcagaacgagaaggtaaccgctatttggtccggatggactcatctggtggcccagacagaaacaggaaaaatgttcacttggggccgtgccgattacggtcagctgggcaggaagctcgagacatatgagggatggaaacttgaaaaacaggactcttttttaccatgtagccggcctccaaacagtatgccctcctctcctcactgcttaacgggagccacggaggtcagctgcgggtctgaacataatctggctattattggaggcgtctgctactcctgggggtggaatgaacacgggatgtgtggagacggaactgaagctaatgtttgggccccaaagcctgtgcaggctttactaagcagtagtggcctgctagtgggatgcggcgctggtcacagcctggctctctgtcagctgccggctcatcctgccctggtgcaggacccaaaggtcacatacctcagtcccgacgccatcgaggatactgagtcccagaaggccatggacaaggagcgcaactggaaggaacgccaaagtgaaacgagcacccagtcccagagtgactggtcccggaatggtggactgtag

SEQ ID NO: 172762 - DNA, 867 bp, Artificial Sequence
  derived and/or modified sequence
atggaacgtgaaccttcggccagcgaggccgcacccgctgccgctgctctgtttgcttggggagctaattcttacggtcagctgggactgggtcacaaggaggatgtgttgttaccccaacagctgaacgacttctgtaaaccacggtcggttcggaggataaccggcggtggcggacacagcgccgtagtgacagatggaggggacctcttcgtgtgcgggctgaacaaggatggccagcttggcctaggtcacaccgaagacattccttatttcactccttgtaagtcgttatttggctgccccatacaacaggtcgcctgcgggtgggacttcacgatcatgctgaccgaaaatgggcaggttctaagctgcggaagtaacagttttggtcagctgggcgtcccacacggccctaggcgctgtgtggttccccaagctatcgaactgcataaggagaaagtggtttgcattgccgcaggtctgagacacgctgtcgcggctaccgcgagtgggatcgtgttccagtggggcactggactggctagttgcggccgaagactttgtcctgggcagaccttgcctcttttctttaccgccaaagaaccatcaagagtaaccgggttggagaacagcaaggccatgtgcgtcctagcaggcagcgatcatagtgcgagtcttaccgacgccggagaggtatacgtctgggggagcaacaaacatggacaactggccaacgaggctgcctttctgccagtgcctcagaaaatcgaagcccactgcttccagaatgagaaagtcaccgccatctggtctgggtggactcaccttgtggctcagacaggactcctatggttaagggcctag

SEQ ID NO: 172763 - DNA, 525 bp, Artificial Sequence
  derived and/or modified sequence
atgctgacggagaatggccaggtgctcagctgtggcagtaactcctttgggcaactcggcgtcccccacggccctcggagatgtgttgttcctcaggcaattgaactgcataaagagaaagtcgtttgcattgctgccggattacgtcacgctgtcgccgcaaccgcatcaggaattgtgttccaatggggaactgggctagcctcgtgcggcagaagactctgtcccggacaaaccttgcctctctttttcaccgccaaggagccatcccgtgtgaccggactagagaacagtaaggctatgtgtgtgctggctggaagcgatcattcagccagcttgaccgatgctggggaggtgtacgtgtggggatccaacaagcacgggcagttagccaacgaggctgcattcctaccggtgccccagaagattgaggcacattgctttcagaacgagaaggtgacagcgatatggagtgggtggacgcatctggtggcgcagactggacttctatggctgcgggcatag

SEQ ID NO: 172764 - DNA, 1264 bp, Artificial Sequence
  derived and/or modified sequence
ccggcggagcgtcctcgcatggagcgcgagcccagcgcctcggaggccgcccccgcggcggccgcgctcttcgcctggggtgcaaatagctatgggcaacttggcctcggccataaggaagatgtgctgttgccccagcaactgaatgacttctgtaaacccaggagtgtcaggaggatcacaggaggagggggccactctgcagttgtcacagatggaggagacctctttgtttgtggcctgaacaaagatgggcaactggggcttggtcacacagaggatatcccatattttaccccctgcaaatccctctttggctgtcccatccaacaggtggcctgtggctgggattttacgattatgctcacagaaaatggtcaagttctatcatgtggatccaactcctttggccagttaggagttcctcatggacctcgaagatgtgtggttccccaggccattgagctccataaagagaaggttgtttgtattgctgctggactgaggcatgcagtagctgctacagcgagtggcatcgtgttccagtgggggactggtttggcatcatgtggacgacggttgtgccctgggcagactcttccattgtttttcacagcaaaggaaccaagcagagtgacaggtctagagaattctaaagcaatgtgtgttcttgctggctcagaccactcagcttcattaacagatgcaggagaggtgtatgtttggggaagcaacaagcatgggcaactggctaatgaggctgctttccttcctgtgccccagaaaatagaagcacattgtttccagaatgaaaaggtcactgccatctggagtggatggacacacctggttgctcagacaggtctcttgtggctcagagcataatttggcaataattggtggagtgtgttactcttggggctggaatgagcatggcatgtgcggagatggcactgaagccaacgtctgggccccaaagccggtgcaggctctgctgtcatcgtcaggactccttgtgggctgtggggctggccactccttggccctctgccagctgccagctcaccctgcattggtccaggaccccaaggtcacctacctttccccagatgccatcgaggacactgaatctcagaaagccatggacaaagagagaaactggaaggaaagacaatcagaaacttcaacccaaagccaatctgactggtccagaaatgggggactgtgatagagaatctttaataaagtggcttttcccaccaaa

SEQ ID NO: 172765 - DNA, 1124 bp, Artificial Sequence
  derived and/or modified sequence
tgggtacgtgactccgcccccgggccggtgcaggccctgaggggcgccgagatgtgggagctgctggccgcggcgtgggcagttcaggggctgggcggctgagggtgcaaatagctatgggcaacttggcctcggccataaggaagatgtgctgttgccccagcaactgaatgacttctgtaaacccaggagtgtcaggaggatcacaggaggagggggccactctgcagttgtcacagatggaggagacctctttgtttgtggcctgaacaaagatgggcaactggggcttggtcacacagaggatatcccatattttaccccctgcaaatccctctttggctgtcccatccaacaggtggcctgtggctgggattttacgattatgctcacagaaaatggtcaagttctatcatgtggatccaactcctttggccagttaggagttcctcatggacctcgaagatgtgtggttccccaggccattgagctccataaagagaaggttgtttgtattgctgctggactgaggcatgcagtagctgctacagcgagtggcatcgtgttccagtgggggactggtttggcatcatgtggacgacggttgtgccctgggcagactcttccattgtttttcacagcaaaggaaccaagcagagtgacaggtctagagaattctaaagcaatgtgtgttcttgctggctcagaccactcagcttcattaacagatgcaggagaggtgtatgtttggggaagcaacaagcatgggcaactggctaatgaggctgctttccttcctgtgccccagaaaatagaagcacattgtttccagaatgaaaaggtcactgccatctggagtggatggacacacctggttgctcagacaggtctcttgtggctcagagcataatttggcaataattgtatctctgcaaggtaagtattattatcccagttttgctgatgtggaaatggagttgcagagaaattaagagatatactcaagatcacagtgttcatgtgtcatggagccatttttgaatcctgtgagagacttcagtgctgatgatcggatgaccagaccatcaaaccatgctggaggtgattttttaattaccattctg

SEQ ID NO: 172766 - DNA, 1566 bp, Artificial Sequence
  derived and/or modified sequence
ctctctcccggcctgcgggccgcttcccaccacagaccccgccccgcgccctacccatcacgcgtccccggtccggctccggcgctcacctacccccggcaggcgccgcccccgtgccgtccctcccggaagcgccggcggagcgtcctcgcatggagcgcgagcccagcgcctcggaggccgcccccgcggcggccgcgctcttcgcctggggtgcaaatagctatgggcaacttggcctcggccataaggaagatgtgctgttgccccagcaactgaatgacttctgtaaacccaggagtgtcaggaggatcacaggaggagggggccactctgcagttgtcacagatggaggagacctctttgtttgtggcctgaacaaagatgggcaactggggcttggtcacacagaggatatcccatattttaccccctgcaaatccctctttggctgtcccatccaacaggtggcctgtggctgggattttacgattatgctcacagaaaatggtcaagttctatcatgtggatccaactcctttggccagttaggagttcctcatggacctcgaagatgtgtggttccccaggccattgagctccataaagagaaggttgtttgtattgctgctggactgaggcatgcagtagctgctacagcgagtggcatcgtgttccagtgggggactggtttggcatcatgtggacgacggttgtgccctgggcagactcttccattgtttttcacagcaaaggaaccaagcagagtgacaggtctagagaattctaaagcaatgtgtgttcttgctggctcagaccactcagcttcattaacagatgcaggagaggtgtatgtttggggaagcaacaagcatgggcaactggctaatgaggctgctttccttcctgtgccccagaaaatagaagcacattgtttccagaatgaaaaggtcactgccatctggagtggatggacacacctggttgctcagacagaaactggcaagatgtttacctggggccgagcagactatggtcagctagggaggaagttggagacttatgaaggctggaaactagaaaagcaagattcatttctcccctgttcaagaccaccgaacagcatgccttcgtctccgcattgcttaactggagcaactgaggtctcttgtggctcagagcataatttggcaataattggtggagtgtgttactcttggggctggaatgagcatggcatgtgcggagatggcactgaagccaacgtctgggccccaaagccggtgcaggctctgctgtcatcgtcaggactccttgtgggctgtggggctggccactccttggccctctgccagctgccagctcaccctgcattggtccaggaccccaaggtcacctacctttccccagatgccatcgaggacactgaatctcagaaagccatggacaaagagagaaactggaaggaaagacaatcagaaacttcaacccaaagccaatctgactggtccagaaatgggggactgtgatagagaatctttaataaagtggcttttcccaccaaaa

SEQ ID NO: 172767 - DNA, 1377 bp, Artificial Sequence
  derived and/or modified sequence
atggagagagagcccagcgccagcgaggccgcccccgccgccgccgccctgttcgcctggggcgccaacagctacggccagctgggcctgggccacaaggaggacgtgctgctgccccagcagctgaacgacttctgcaagcccagaagcgtgagaagaatcaccggcggcggcggccacagcgccgtggtgaccgacggcggcgacctgttcgtgtgcggcctgaacaaggacggccagctgggcctgggccacaccgaggacatcccctacttcaccccctgcaagagcctgttcggctgccccatccagcaggtggcctgcggctgggacttcaccatcatgctgaccgagaacggccaggtgctgagctgcggcagcaacagcttcggccagctgggcgtgccccacggccccagaagatgcgtggtgccccaggccatcgagctgcacaaggagaaggtggtgtgcatcgccgccggcctgagacacgccgtggccgccaccgccagcggcatcgtgttccagtggggcaccggcctggccagctgcggcagaagactgtgccccggccagaccctgcccctgttcttcaccgccaaggagcccagcagagtgaccggcctggagaacagcaaggccatgtgcgtgctggccggcagcgaccacagcgccagcctgaccgacgccggcgaggtgtacgtgtggggcagcaacaagcacggccagctggccaacgaggccgccttcctgcccgtgccccagaagatcgaggcccactgcttccagaacgagaaggtgaccgccatctggagcggctggacccacctggtggcccagaccgagaccggcaagatgttcacctggggcagagccgactacggccagctgggcagaaagctggagacctacgagggctggaagctggagaagcaggacagcttcctgccctgcagcagaccccccaacagcatgcccagcagcccccactgcctgaccggcgccaccgaggtgagctgcggcagcgagcacaacctggccatcatcggcggcgtgtgctacagctggggctggaacgagcacggcatgtgcggcgacggcaccgaggccaacgtgtgggcccccaagcccgtgcaggccctgctgagcagcagcggcctgctggtgggctgcggcgccggccacagcctggccctgtgccagctgcccgcccaccccgccctggtgcaggaccccaaggtgacctacctgagccccgacgccatcgaggacaccgagagccagaaggccatggacaaggagagaaactggaaggagagacagagcgagaccagcacccagagccagagcgactggagcagaaacggcggcctgtag

SEQ ID NO: 172768 - protein, 287 aa, Artificial Sequence
  derived and/or modified sequence
MAAEARVSRWYFGGLASCGAACCTHPLDLLKVHLQTQQEVKLRMTGMALRVVRTDGILALYSGLSASLCRQMTYSLTRFAIYETVRDRVAKGSQGPLPFHEKVLLGSVSGLAGGFVGTPADLVNVRMQNDVKLPQGQRRNYAHALDGLYRVAREEGLRRLFSGATMASSRGALVTVGQLSCYDQAKQLVLSTGYLSDNIFTHFVASFIAGGCATFLCQPLDVLKTRLMNSKGEYQGVFHCAVETAKLGPLAFYKGLVPAGIRLIPHTVLTFVFLEQLRKNFGIKVPS

SEQ ID NO: 172769 - protein, 442 aa, Artificial Sequence
  derived and/or modified sequence
MLPAAARPLWGPCLGLRAAAFRLARRQVPCVCAVRHMRSSGHQRCEALAGAPLDNAPKEYPPKIQQLVQDIASLTLLEISDLNELLKKTLKIQDVGLVPMGGVMSGAVPAAAAQEAVEEDIPIAKERTHFTVRLTEAKPVDKVKLIKEIKNYIQGINLVQAKKLVESLPQEIKANVAKAEAEKIKAALEATQQEVKLRMTGMALRVVRTDGILALYSGLSASLCRQMTYSLTRFAIYETVRDRVAKGSQGPLPFHEKVLLGSVSGLAGGFVGTPADLVNVRMQNDVKLPQGQRRNYAHALDGLYRVAREEGLRRLFSGATMASSRGALVTVGQLSCYDQAKQLVLSTGYLSDNIFTHFVASFIAGGCATFLCQPLDVLKTRLMNSKGEYQGVFHCAVETAKLGPLAFYKGLVPAGIRLIPHTVLTFVFLEQLRKNFGIKVPS

SEQ ID NO: 172770 - DNA, 864 bp, Artificial Sequence
  derived and/or modified sequence
atggccgctgaggcacgagtcagcagatggtatttcgggggcctggcctcatgtggcgccgcatgctgcacccaccctctggacctactgaaagtgcatttgcagacgcagcaggaggtcaagttgcggatgaccggcatggctcttcgggtcgtgagaactgatggcattctggcgctgtatagcggcctgtctgcaagcctgtgccgccagatgacatattccctgactaggtttgctatttacgagacggtgcgggatagggtggccaagggtagtcaaggaccgctgcctttccatgagaaggtcctgctgggctcagtaagtggcctggctggaggctttgtagggacacccgctgacctagttaacgtgaggatgcagaatgatgtgaaactgccccaggggcaacggaggaactatgcccatgctttagatggcctgtacagagtcgcgcgcgaggaaggtctgaggaggctttttagcggcgcgacgatggcctcctcccgtggtgccctggtgacggtgggacagctgagctgctacgatcaggctaaacagttggtgctgtctactggctatctgtccgacaatatttttacccattttgtggcgtcttttatcgccggaggatgcgcaacttttctttgtcagccactcgacgtcctgaagacacggctgatgaattccaaaggtgaataccaaggcgtctttcactgcgctgtggagacagcgaagttgggacctcttgccttctataagggtctcgtgccggctgggattcggctgatccctcacacagtgctgactttcgtattcctcgagcaactccgaaagaatttcggcatcaaggttccctcatag

SEQ ID NO: 172771 - DNA, 1329 bp, Artificial Sequence
  derived and/or modified sequence
atgctccctgcagcagcccgcccactgtggggaccgtgtctaggcctgcgggcggctgccttcagactggctcgtcgccaagtgccctgcgtttgtgcagtgcgacacatgagatcgagtgggcaccaacgctgtgaggcactggctggcgctcctttggataatgccccgaaggagtacccccccaaaattcagcagcttgtgcaggacatcgccagtcttaccctgctggagatatccgatctgaacgagctgttgaagaaaacccttaagatccaggatgttggcctcgttcctatggggggggtcatgagcggtgcagttcccgcggcagcggcccaagaagccgtagaagaggatattcctatcgcaaaggagcggacccacttcaccgtgcgtctgaccgaggccaagccagttgacaaggtgaagctgataaaggaaatcaaaaactacatccagggaatcaacctggttcaggccaaaaagttagtggagtcattgccacaggaaatcaaagccaatgtggccaaggcggaagccgaaaagatcaaagcagcactggaggcgacacaacaggaagttaagctccgaatgacaggcatggcactgcgcgtcgtccggactgatggcattttggcactgtactcaggtctgtccgccagcctgtgccggcagatgacctactccctcacaagattcgctatttacgagacagtcagggacagggtcgcaaaaggcagccagggaccactgccgttccatgaaaaggtcctgctcgggtcagtcagcggcctggcaggagggtttgtcggcaccccagctgacttggtgaacgtcaggatgcagaatgacgtaaaattgccccagggacagcggcgtaactacgctcacgctcttgacggcctttatcgagttgcaagagaagaagggctgcggcgactgttttctggagccacaatggcaagcagtcgcggtgcactggttacggttggccagctgtcctgctatgaccaggcaaagcagctggtgctgagtacagggtacctgtccgataacatatttactcacttcgtggcctcattcatcgccgggggttgcgctactttcctttgtcagcccctggatgtgctcaagacaaggttgatgaactcaaagggggaatatcagggcgtatttcactgtgccgtggaaacagccaaattaggtcccctggcattttacaagggactggtgcctgctgggattagactgattccccacaccgttctcacgtttgtgtttcttgagcaactgcgcaaaaacttcggcatcaaggtcccctcctag

SEQ ID NO: 172772 - DNA, 864 bp, Artificial Sequence
  derived and/or modified sequence
atggctgctgaggcccgggtgagccgctggtactttggaggcctggccagctgtggggccgcctgctgcacccaccccctggacctgctgaaggtgcacctgcagacccagcaggaggtgaagctgaggatgacaggcatggccctgcgggtggtgaggacagatggcatcctggccctgtacagcggcctgagcgccagcctgtgccggcagatgacctacagcctgaccaggtttgccatctatgagaccgtgcgggacagagtggccaagggcagccagggccccctgcccttccacgagaaggtgctgctgggctctgtgtctggcctggccggcggctttgtgggcaccccagctgacctggtgaatgtgaggatgcagaatgatgtgaagctgccccagggccagaggagaaattatgcccacgccctggatggcctgtacagagtggcccgggaggagggcctgcggcggctcttcagcggggccaccatggccagcagcagaggagccctggtgacagtgggccagctgagctgctatgaccaggccaagcagctggtgctgagcacaggctacctgagtgacaacatcttcacccactttgtggccagcttcatcgccggcggctgtgccaccttcctgtgccagcccctggatgtgctgaagacccggctgatgaacagcaaaggagagtaccagggcgtcttccactgtgctgtggagacagccaagctgggccccctggccttctacaagggcctggtgcctgctggcatccgcctcatcccccacacagtgctgacctttgtgttcctggagcagctgaggaagaactttggcatcaaggtgcccagctag

SEQ ID NO: 172773 - DNA, 1329 bp, Artificial Sequence
  derived and/or modified sequence
atgctgcctgctgctgcccggcccctgtggggcccctgcctgggcctgcgggctgctgccttccggctggcccggcggcaggtgccctgtgtgtgtgctgtgcgccacatgaggagcagcggccaccagagatgtgaggccctggccggggcccccctggacaatgcccccaaggagtacccacccaagatccagcagctggtgcaggacatcgccagcctgaccctgctggagatcagtgacctgaatgagctgctgaagaagaccctgaagatccaggatgtgggcctggtgcccatgggcggcgtgatgtctggagctgtgcctgctgctgctgcccaggaggccgtggaggaggacatccccatcgccaaggagaggacccacttcaccgtgcggctgacagaggccaagcctgtggacaaggtgaagctgatcaaggagatcaagaactacatccagggcatcaacctggtgcaggccaagaagctggtggagagcctgccccaggagatcaaggccaacgtggccaaggccgaggccgagaagatcaaggccgccctggaggccacccagcaggaggtgaagctgaggatgacaggcatggccctgcgggtggtgaggacagatggcatcctggccctgtacagcggcctgagcgccagcctgtgccggcagatgacctacagcctgaccaggtttgccatctatgaaacagtgcgggacagagtggccaagggcagccagggccccctgcccttccacgagaaggtgctgctgggctctgtgtctggcctggccggcggctttgtgggcaccccagctgacctggtgaatgtgaggatgcagaatgatgtgaagctgccccagggccagaggaggaactatgcccacgccctggatggcctgtacagagtggcccgggaggagggcctgcggcggctcttcagcggggccaccatggccagcagcagaggagccctggtgacagtgggccagctgagctgctatgaccaggccaagcagctggtgctgagcacaggctacctgagtgacaacatcttcacccactttgtggccagcttcatcgccggcggctgtgccaccttcctgtgccagcccctggatgtgctgaagacccggctgatgaacagcaagggggagtaccagggcgtcttccactgtgctgtggagacagccaagctgggccccctggccttctacaagggcctggtgcctgctggcatccgcctcatcccccacacagtgctgacctttgtgttcctggagcagctgaggaagaactttggcatcaaggtgcccagctag

SEQ ID NO: 172774 - DNA, 1884 bp, Artificial Sequence
  derived and/or modified sequence
cggggcgcggggcgctgcggccggtacacgccggggtagggccggggtcgggttgtggtcgggccgggattgggctctcctgggccatggcagccgaggcgcgcgtgtcgcgctggtacttcggggggctggcctcctgcggggccgcctgctgcacgcacccgctggacctgctcaaggtgcatctgcagacgcagcaggaggtgaagctgcgcatgacgggcatggcgctgcgggtggtgcgtaccgacggcatcctggcactctacagcggcctgagcgcctcgctgtgcagacagatgacctactccctgactcggttcgccatctacgagactgtgcgggaccgtgtggccaagggcagccaggggcctctccccttccacgagaaggtgttgctgggctccgtcagcggtttagctggaggcttcgtggggacgcccgcagacttggtcaacgtcaggatgcagaacgacgtgaagctgccccagggtcagcggcgcaactacgcccatgcgctggatggcctgtaccgcgtagctcgtgaagagggtctcaggagactgttctcgggtgcaaccatggcatccagccgaggggccttagtcactgtgggccagctgtcctgctacgaccaggccaagcagctggtccttagcaccgggtacctctctgacaacatcttcactcactttgtcgccagctttattgcaggtggatgtgccacgttcctgtgccagcccctggatgtgctgaagactcgcctgatgaactccaagggggagtatcagggcgttttccactgcgccgtggagacagcgaagctcgggcctctggccttttacaagggcctcgtcccagctggcatccgcctcatcccccacaccgtgctcacttttgtgtttctggaacagctacgcaaaaactttggcatcaaagtgccatcctgaccagccgtgggaatggctgggctgccaggccagacacgctaggttcttccaaagagtcccaagcccagcacctgctcctggggccacgacctccctggccgtggccacccgtcctccgcagcaggcccctgctgtccccccacctgctggctgagctcctcctggcctcgtcccctctcagctgtagctgcaccacccccgctctggctaccaggctctcccggctgggcactgcgtggccttgcccctctcccgctggcagctcctcaggggaacaggggctaccagaggctgatttctcccctctcctgggccaggggaggggtattatccctgcctcctgcccccgatgcccaaagcagcatcttccagcactttccatcgaggacttgggtggcagagtgtgggtgcagcctggctgttgctcacccaagtgctagctctgcacttcgtgtctgctgagagcaaccagaccttccatgtcctcgggcagctgcaactccccgcgagaccccgcagctgggtgggatgaacaagcaacgcagaccacaagcgagtgcctgggagggagtggcccagggtggttctggagccattgtgggtgagggtcgagggccaccgaggtcccgcgcaccgctgcctgccctgcagtggctttaacagttagttttgccaaagcctctccactcaccagcaggcggtctctgtcttcagggattgtgcctgcgtccctcgggcacctgggcccccccgcttggctccctgggggaatggcccaggcgggccgcggttcctccttagggccttctccccgacaaggagtccgacggggcggatgctgcatcctctgcctccctggtcgctgggcttcaccccacctgggaagggcagtgtgctctgtgggggctgcaatcaataaatgccgggagctgcc

SEQ ID NO: 172775 - DNA, 1087 bp, Artificial Sequence
  derived and/or modified sequence
cagcagcctttgaggggactggctttactaatgagcaacaatgctggtcgctgcgtgaaggccaggtgcatctgcagacgcagcaggaggtgaagctgcgcatgacgggcatggcgctgcgggtggtgcgtaccgacggcatcctggcactctacagcggcctgagcgcctcgctgtgcagacagatgacctactccctgactcggttcgccatctacgagactgtgcgggaccgtgtggccaagggcagccaggggcctctccccttccacgagaaggtgttgctgggctccgtcagcggtttagctggaggcttcgtggggacgcccgcagacttggtcaacgtcaggatgcagaacgacgtgaagctgccccagggtcagcggcgcaactacgcccatgcgctggatggcctgtaccgcgtagctcgtgaagagggtctcaggagactgttctcgggtgcaaccatggcatccagccgaggggccttagtcactgtgggccagctgtcctgctacgaccaggccaagcagctggtccttagcaccgggtacctctctgacaacatcttcactcactttgtcgccagctttattgcaggtggatgtgccacgttcctgtgccagcccctggatgtgctgaagactcgcctgatgaactccaagggggagtatcagggcgttttccactgcgccgtggagacagcgaagctcgggcctctggccttttacaagggcctcgtcccagctggcatccgcctcatcccccacaccgtgctcacttttgtgtttctggaacagctacgcaaaaactttggcatcaaagtgccatcctgaccagccgtgggaatggctgggctgccaggccagacacgctaggttcttccaaagagtcccaagcccagcacctgctcctggggccacgacctccctggccgtggccacccgtcctccgcagcaggcccctgctgtccccccacctgctggctgagctcctcctggcctcgtcccctctcagctgtagctgcaccacccccgctctggctaccaggctctcccggctgggcactgcgtggccttgcccctct

SEQ ID NO: 172776 - DNA, 864 bp, Artificial Sequence
  derived and/or modified sequence
atggccgccgaggcccgggtgagccggtggtacttcggcggcctggcctcatgcggcgcagcctgttgcacccaccctttggacctgcttaaggttcaccttcaaacccaacaagaagtgaaactaaggatgacaggtatggctttgagggtagtaaggacagacgggattttagccctgtattctgggttatccgccagtctgtgcaggcagatgacttatagcttgactaggtttgcgatctacgagaccgttcgcgatagggtagcaaagggttcacagggtcccctgcccttccatgaaaaggtgcttctcggctcagtctcgggactggctggtggatttgtagggacaccggctgacttggtgaacgttcgcatgcagaacgatgtgaaacttcctcagggacagcgaaggaactacgcccacgccttggacgggctttatcgcgtggctagggaagaagggcttcggcgactcttttccggggccacgatggcatcttcccgcggggctctggtgacggtcggtcaattgtcatgctacgaccaggctaaacagttggtgctgagcacagggtatttgagtgataatatctttacacactttgtggcatcctttattgccggaggttgtgcgacttttttatgccagccgctggatgtcctcaagactcgactgatgaattccaaaggggagtatcagggcgttttccactgtgcagtggaaaccgcaaagctaggaccactggctttctataaagggctggtgcccgctggcatacgcttgattccacacaccgttctgacttttgtcttcctagagcagctgagaaaaaattttggaataaaagtgcctagctag

SEQ ID NO: 172777 - DNA, 1329 bp, Artificial Sequence
  derived and/or modified sequence
atgctgcccgccgccgcccggcccctgtggggcccctgcctgggcctccgtgctgcagccttccggcttgcaaggcgtcaggttccttgtgtgtgtgccgtgaggcacatgaggtcttcaggccaccagcggtgcgaagctttggccggcgcccccctcgataacgcccctaaggaataccctccaaagatccagcaactcgtgcaggatatcgctagtttaaccctcctcgagatcagtgatctcaatgaactcctcaaaaagaccctgaagatccaggacgtcgggctcgtccctatgggtggcgttatgtccggagccgtcccagccgctgccgcccaggaggccgtggaggaggatattccaatcgctaaagaacgcacgcacttcactgtacggctcaccgaagctaaacccgtggataaagtaaagctgattaaagagatcaaaaactacattcaggggataaatctggtgcaagctaagaaactggttgagtcactcccccaagagatcaaggccaacgtcgctaaggcagaagccgagaagatcaaggccgcactcgaagcgactcagcaagaggttaagctgcggatgacagggatggccctccgcgtggtaaggacggacgggatccttgcactgtattcaggcctgtctgcctccctgtgcagacagatgacttacagtctaaccaggttcgccatctacgagacggtcagggaccgcgtggctaaagggagtcaaggcccactgccgtttcatgagaaagtcctgctggggtcggtgtcaggactggctgggggttttgtaggcacccccgcggaccttgtgaacgttaggatgcagaacgacgtcaagcttccccaggggcagcgtcgcaattatgctcatgctttggacggactttatagggtggcccgagaagaaggcttaagacggctcttctctggcgccacgatggcctcgtcacgaggagcacttgtgacggtggggcagttgagctgctacgaccaggcaaaacaactggttctgagtactggatacctctccgacaacatcttcactcactttgttgcgagtttcatagccgggggatgtgccacattcttatgccaacctctggatgtattgaaaaccaggctgatgaattcaaagggggagtaccagggcgttttccattgtgcagtcgaaaccgcaaaactcggaccactggcattctacaagggcctggtgcctgcagggattagacttatccctcataccgtgctcaccttcgtttttctggagcaactgcgtaagaattttggaatcaaggtccccagctag

SEQ ID NO: 172778 - DNA, 864 bp, Artificial Sequence
  derived and/or modified sequence
atggcagccgaggcacgcgtgagccggtggtacttcgggggtctcgcgtcctgcggggctgcttgctgcacacaccctctggatcttctgaaagtccatttgcagacacagcaggaggtaaagctgaggatgactggcatggctctgcgcgtggtccggaccgacggtatcctcgctctctattcagggctgtcagcctctctgtgtaggcaaatgacttactcactcactagattcgcgatctatgaaaccgttcgggatcgcgtcgcgaagggctctcaaggaccgctgcccttccatgaaaaagtcctgctgggaagcgtgtctggactcgcaggcggtttcgttggcaccccagccgacttagtgaatgttaggatgcagaacgacgtcaaactgcctcaggggcagaggaggaattatgcccatgccctggatggcctttatagggtggctagagaagagggcctacgcaggcttttttccggggcaacaatggctagcagtaggggagcactggttaccgtaggccagctttcatgctacgatcaggccaagcagctggtgctctccaccggatacctgagcgacaacatttttactcacttcgtggcctccttcatcgccggaggatgcgcaacattcctgtgccagccactcgacgttcttaaaacaaggctgatgaattcgaaaggcgaataccaaggtgtgtttcattgcgctgttgagacggctaagctaggcccactggcattttataaagggctggtcccagccggaatcaggttgatcccgcataccgtcctgacatttgtgtttctggaacagctccggaaaaactttgggatcaaagtaccttcgtag

SEQ ID NO: 172779 - DNA, 1329 bp, Artificial Sequence
  derived and/or modified sequence
atgctgccagctgcagcccgtcctctctggggaccttgtctgggcctgagggccgctgcgttcagactggcaagacgccaagtgccttgtgtgtgtgctgtacggcatatgaggtcctctgggcaccaaaggtgcgaagctctcgctggcgcaccgctggataacgcacccaaagaatatcctccaaaaatccaacaattggtccaggacatagccagcttgacactgctggagatctccgatttgaacgagctcctgaagaaaaccctaaagatccaagacgttggtctcgtgcctatggggggagtcatgagcggggcagtgccagccgctgccgctcaggaggcagtggaagaggacatcccaatagcaaaggagagaacacactttactgtgcgccttacagaagccaagccagtagacaaagtgaagctaatcaaggaaattaaaaactatatccaggggatcaacctggtacaggctaaaaaacttgttgagagtctcccacaagaaattaaggccaacgtggctaaggcagaggcagaaaagattaaggccgcactcgaagccacccaacaggaagtgaaactccggatgacaggaatggccctcagggtcgtgcgcactgacggcattttggcactgtacagcggcctgtcagcatcactttgtcggcagatgacctattcacttacccggtttgccatctacgaaactgtgcgggatagggtggccaagggaagccagggaccactgccgtttcacgaaaaagtgctactgggctccgtgtcaggtttggctggtggattcgttggtacgcccgctgatctcgtgaatgtgcgcatgcaaaatgatgttaaactgccacaagggcagaggcgcaactacgcccatgctcttgatggcctctatcgggtcgcaagagaagaaggccttcgccgactcttcagcggcgctactatggcatcttcgaggggtgcactcgttaccgtaggccagctgagttgctatgatcaggccaaacaactagtgctctcaacaggctacctgtccgacaatatcttcacacactttgtcgcaagcttcatcgcgggagggtgcgccacatttctgtgccagccactggatgtgctaaagacacgcctcatgaacagtaagggagaataccagggagtgttccattgcgcagtggagaccgcaaagcttggccctcttgcattctataaaggtctggtcccagcgggaatccgcctgattccccacaccgtgctgacttttgtattcttggagcagctccgcaagaatttcggaattaaagttcctagttag

SEQ ID NO: 172780 - DNA, 864 bp, Artificial Sequence
  derived and/or modified sequence
atggccgccgaggccagagtgagcagatggtacttcggcggcctggccagctgcggcgccgcctgctgcacccaccccctggacctgctgaaggtgcacctgcagacccagcaggaggtgaagctgagaatgaccggcatggccctgagagtggtgagaaccgacggcatcctggccctgtacagcggcctgagcgccagcctgtgcagacagatgacctacagcctgaccagattcgccatctacgagaccgtgagagacagagtggccaagggcagccagggccccctgcccttccacgagaaggtgctgctgggcagcgtgagcggcctggccggcggcttcgtgggcacccccgccgacctggtgaacgtgagaatgcagaacgacgtgaagctgccccagggccagagaagaaactacgcccacgccctggacggcctgtacagagtggccagagaggagggcctgagaagactgttcagcggcgccaccatggccagcagcagaggcgccctggtgaccgtgggccagctgagctgctacgaccaggccaagcagctggtgctgagcaccggctacctgagcgacaacatcttcacccacttcgtggccagcttcatcgccggcggctgcgccaccttcctgtgccagcccctggacgtgctgaagaccagactgatgaacagcaagggcgagtaccagggcgtgttccactgcgccgtggagaccgccaagctgggccccctggccttctacaagggcctggtgcccgccggcatcagactgatcccccacaccgtgctgaccttcgtgttcctggagcagctgagaaagaacttcggcatcaaggtgcccagctag

SEQ ID NO: 172781 - DNA, 1329 bp, Artificial Sequence
  derived and/or modified sequence
atgctgcccgccgccgccagacccctgtggggcccctgcctgggcctgagagccgccgccttcagactggccagaagacaggtgccctgcgtgtgcgccgtgagacacatgagaagcagcggccaccagagatgcgaggccctggccggcgcccccctggacaacgcccccaaggagtacccccccaagatccagcagctggtgcaggacatcgccagcctgaccctgctggagatcagcgacctgaacgagctgctgaagaagaccctgaagatccaggacgtgggcctggtgcccatgggcggcgtgatgagcggcgccgtgcccgccgccgccgcccaggaggccgtggaggaggacatccccatcgccaaggagagaacccacttcaccgtgagactgaccgaggccaagcccgtggacaaggtgaagctgatcaaggagatcaagaactacatccagggcatcaacctggtgcaggccaagaagctggtggagagcctgccccaggagatcaaggccaacgtggccaaggccgaggccgagaagatcaaggccgccctggaggccacccagcaggaggtgaagctgagaatgaccggcatggccctgagagtggtgagaaccgacggcatcctggccctgtacagcggcctgagcgccagcctgtgcagacagatgacctacagcctgaccagattcgccatctacgagaccgtgagagacagagtggccaagggcagccagggccccctgcccttccacgagaaggtgctgctgggcagcgtgagcggcctggccggcggcttcgtgggcacccccgccgacctggtgaacgtgagaatgcagaacgacgtgaagctgccccagggccagagaagaaactacgcccacgccctggacggcctgtacagagtggccagagaggagggcctgagaagactgttcagcggcgccaccatggccagcagcagaggcgccctggtgaccgtgggccagctgagctgctacgaccaggccaagcagctggtgctgagcaccggctacctgagcgacaacatcttcacccacttcgtggccagcttcatcgccggcggctgcgccaccttcctgtgccagcccctggacgtgctgaagaccagactgatgaacagcaagggcgagtaccagggcgtgttccactgcgccgtggagaccgccaagctgggccccctggccttctacaagggcctggtgcccgccggcatcagactgatcccccacaccgtgctgaccttcgtgttcctggagcagctgagaaagaacttcggcatcaaggtgcccagctag

SEQ ID NO: 172782 - protein, 887 aa, Artificial Sequence
  derived and/or modified sequence
MPILLFLIDTSASMNQRSHLGTTYLDTAKGAVETFMKLRARDPASRGDRYMLVTFEEPPYAIKAGWKENHATFMNELKNLQAEGLTTLGQSLRTAFDLLNLNRLVTGIDNYGQGRNPFFLEPAIIITITDGSKLTTTSGVQDELHLPLNSPLPGSELTKEPFRWDQRLFALVLRLPGTMSVESEQLTGVPLDDSAITPMCEVTGGRSYSVCSPRMLNQCLESLVQKVQSGVVINFEKAGPDPSPVEDGQPDISRPFGSQPWHSCHKLIYVRPNPKTGVPIGHWPVPESFWPDQNSPTLPPRTSHPVVKFSCTDCEPMVIDKLPFDKYELEPSPLTQFILERKSPQTCWQVYVSNSAKYSELGHPFGYLKASTALNCVNLFVMPYNYPVLLPLLDDLFKVHKAKPTLKWRQSFESYLKTMPPYYLGPLKKAVRMMGAPNLIADSMEYGLSYSVISYLKKLSQQAKIESDRVIGSVGKKVVQETGIKVRSRSHGLSMAYRKDFQQLLQGISEDVPHRLLDLNMKEYTGFQVALLNKDLKPQTFRNAYDIPRRNLLDHLTRMRSNLLKSTRRFLKGQDEDQVHSVPIAQMGNYQEYLKQVPSPLRELDPDQPRRLHTFGNPFKLDKKGMMIDEADEFVAGPQNKHKRPGEPNMQGIPKRRRCMSPLLRGRQQNPVVNNHIGGKGPPAPTTQAQPDLIKPLPLHKISETTNDSIIHDVVENHVADQLSSDITPNAMDTEFSASSPASLLERPTNHMEALGHDHLGTNDLTVGGFLENHEEPRDKEQCAEENIPASSLNKGKKLMHCRSHEEVNTELKAQIMKEIRKPGRKYERIFTLLKHVQGSLQTRLIFLQNVIKEASRFKKRMLIEQLENFLDEIHRRANQINHINSN

SEQ ID NO: 172783 - protein, 874 aa, Artificial Sequence
  derived and/or modified sequence
MNQRSHLGTTYLDTAKGAVETFMKLRARDPASRGDRYMLVTFEEPPYAIKAGWKENHATFMNELKNLQAEGLTTLGQSLRTAFDLLNLNRLVTGIDNYGQGRNPFFLEPAIIITITDGSKLTTTSGVQDELHLPLNSPLPGSELTKEPFRWDQRLFALVLRLPGTMSVESEQLTGVPLDDSAITPMCEVTGGRSYSVCSPRMLNQCLESLVQKVQSGVVINFEKAGPDPSPVEDGQPDISRPFGSQPWHSCHKLIYVRPNPKTGVPIGHWPVPESFWPDQNSPTLPPRTSHPVVKFSCTDCEPMVIDKLPFDKYELEPSPLTQFILERKSPQTCWQVYVSNSAKYSELGHPFGYLKASTALNCVNLFVMPYNYPVLLPLLDDLFKVHKAKPTLKWRQSFESYLKTMPPYYLGPLKKAVRMMGAPNLIADSMEYGLSYSVISYLKKLSQQAKIESDRVIGSVGKKVVQETGIKVRSRSHGLSMAYRKDFQQLLQGISEDVPHRLLDLNMKEYTGFQVALLNKDLKPQTFRNAYDIPRRNLLDHLTRMRSNLLKSTRRFLKGQDEDQVHSVPIAQMGNYQEYLKQVPSPLRELDPDQPRRLHTFGNPFKLDKKGMMIDEADEFVAGPQNKHKRPGEPNMQGIPKRRRCMSPLLRGRQQNPVVNNHIGGKGPPAPTTQAQPDLIKPLPLHKISETTNDSIIHDVVENHVADQLSSDITPNAMDTEFSASSPASLLERPTNHMEALGHDHLGTNDLTVGGFLENHEEPRDKEQCAEENIPASSLNKGKKLMHCRSHEEVNTELKAQIMKEIRKPGRKYERIFTLLKHVQGSLQTRLIFLQNVIKEASRFKKRMLIEQLENFLDEIHRRANQINHINSN

SEQ ID NO: 172784 - protein, 170 aa, Artificial Sequence
  derived and/or modified sequence
MPILLFLIDTSASMNQRSHLGTTYLDTAKGAVETFMKLRARDPASRGDRYMLVTFEEPPYAIKAGWKENHATFMNELKNLQAEGLTTLGQSLRTAFDLLNLNRLVTGIDNYGQGRNPFFLEPAIIITITDGSKLTTTSGVQDEAVHILCVLQECLISVWSPWCRKYKVGW

SEQ ID NO: 172785 - protein, 455 aa, Artificial Sequence
  derived and/or modified sequence
MMGAPNLIADSMEYGLSYSVISYLKKLSQQAKIESDRVIGSVGKKVVQETGIKVRSRSHGLSMAYRKDFQQLLQGISEDVPHRLLDLNMKEYTGFQVALLNKDLKPQTFRNAYDIPRRNLLDHLTRMRSNLLKSTRRFLKGQDEDQVHSVPIAQMGNYQEYLKQVPSPLRELDPDQPRRLHTFGNPFKLDKKGMMIDEADEFVAGPQNKHKRPGEPNMQGIPKRRRCMSPLLRGRQQNPVVNNHIGGKGPPAPTTQAQPDLIKPLPLHKISETTNDSIIHDVVENHVADQLSSDITPNAMDTEFSASSPASLLERPTNHMEALGHDHLGTNDLTVGGFLENHEEPRDKEQCAEENIPASSLNKGKKLMHCRSHEEVNTELKAQIMKEIRKPGRKYERIFTLLKHVQGSLQTRLIFLQNVIKEASRFKKRMLIEQLENFLDEIHRRANQINHINSN

SEQ ID NO: 172786 - protein, 130 aa, Artificial Sequence
  derived and/or modified sequence
MNQRSHLGTTYLDTAKGAVETFMKLRARDPASRGDRYMLVTFEEPPYAIKAGWKENHATFMNELKNLQAEGLTTLGQSLRTAFDLLNLNRLVTGIDNYGQGRNPFFLEPAIIITITDGSKLTTTSGVQDE

SEQ ID NO: 172787 - DNA, 513 bp, Artificial Sequence
  derived and/or modified sequence
atgcccatcctgctgttcctgatcgacaccagcgccagcatgaaccagagaagccacctgggcaccacctacctggacaccgccaagggcgccgtggagaccttcatgaagctgagagccagagaccccgccagcagaggcgacagatacatgctggtgaccttcgaggagcccccctacgccatcaaggccggctggaaggagaaccacgccaccttcatgaacgagctgaagaacctgcaggccgagggcctgaccaccctgggccagagcctgagaaccgccttcgacctgctgaacctgaacagactggtgaccggcatcgacaactacggccagggcagaaaccccttcttcctggagcccgccatcatcatcaccatcaccgacggcagcaagctgaccaccaccagcggcgtgcaggacgaggccgtgcacatcctgtgcgtgctgcaggagtgcctgatcagcgtgtggagcccctggtgcagaaagtacaaggtgggctggtag

SEQ ID NO: 172788 - DNA, 2664 bp, Artificial Sequence
  derived and/or modified sequence
atgcccatacttttgttcctgatcgacacctcggcctccatgaatcagcgttctcatctcggcaccacgtatttggataccgccaaaggggcagttgagaccttcatgaaactacgtgctagggatcctgcttctaggggggaccgttacatgctcgttacatttgaggagccaccttatgccatcaaagccgggtggaaggagaaccacgccacgttcatgaatgagcttaagaatctgcaagcagaagggctcacaacactcggacaaagcctgcgcacagcttttgatctccttaatctcaatcgactcgtgactgggattgacaactacggacaggggcggaatcctttttttctggagccggctatcatcatcaccatcactgatgggagtaagttgactactacctcgggcgtgcaagatgagctccatctgcccctcaactcacccctgcctggctcggagttgaccaaagagccctttcgatgggatcagagactcttcgccttggtcttgcgtctccccgggacgatgagtgttgagagcgaacaattgacaggcgtgccattggacgactctgctattaccccgatgtgtgaggttaccgggggacgctcttactccgtctgctctcccaggatgctgaatcagtgcctcgaatccctggtgcagaaggtgcaaagtggcgtcgtgatcaattttgaaaaggcgggtccagacccttccccggtggaagatggtcagccagatatatccaggccattcgggtcccagccatggcatagctgccataaactgatctacgtgaggcccaatcctaagacaggtgtgccaatcgggcactggcccgtaccggaaagtttttggcccgaccaaaactcccctactctgccccctcggacttcgcatcctgttgtcaaattttcctgcactgattgcgagccaatggtgatcgacaaattgccattcgacaagtacgaacttgagccatcaccactcacacagttcattctggagaggaaatcgccacagacctgctggcaggtgtacgttagcaatagcgccaagtactccgagctgggacacccttttgggtacctcaaggctagcaccgctctgaattgcgtgaacttgttcgtgatgccttacaattacccagtgctgctgcctctccttgacgacttatttaaagtgcataaggcaaaaccaacactgaaatggaggcaaagctttgaaagttatcttaagacaatgcctccatattaccttggtccactgaagaaagccgttagaatgatgggtgctccaaatctgattgctgatagcatggagtacggcttatcttacagcgtcatcagttacttaaagaaattaagccaacaggctaaaatagagagcgaccgcgtgatcgggtctgtggggaagaaagtggtgcaggagacagggataaaagtacggtcaagatcccacgggttgagcatggcttatcgaaaagattttcagcagctgctgcagggaataagtgaagacgtccctcatcgcctgttagatctcaatatgaaggaatacacgggtttccaggtggcactcctaaacaaagacctgaaaccacagacattcagaaacgcatacgatatcccccgcaggaatctgctggatcatctgactcgcatgaggtcgaaccttctgaaaagcaccaggcggtttctaaaagggcaggacgaggatcaggtacactccgtgcctatcgcacagatgggtaattatcaggagtacttgaaacaggtgccttcaccactgcgcgagctggatcctgatcaacccaggcggttacacacttttggtaaccctttcaagttagacaagaaaggaatgatgattgacgaagctgatgagtttgttgccgggccccagaacaaacataaaagacccggcgaacctaatatgcaggggatccccaagcgccgacgctgtatgagcccactcctcaggggccgtcagcagaaccccgtggtcaacaatcatattggagggaaagggccccccgcccccacaacacaggctcaaccagatctgattaagcccctgccgctgcacaaaatctctgagactacaaatgactccatcattcatgatgtggtcgagaatcacgtcgcagaccaactgtctagcgacattacccctaatgctatggacaccgagttctcagcctctagcccggcctcacttttagaacggcctaccaatcacatggaagccctaggacacgatcatctggggacaaatgacttgacagtgggaggcttcttggagaatcacgaggaaccccgtgacaaagaacaatgcgcagaagaaaacatcccagcatcttcactcaacaagggcaaaaagcttatgcactgtcggtcacacgaggaagttaacactgaattaaaagcgcagatcatgaaggaaatccgcaagccgggtcggaaatacgagcgcatcttcacgcttctaaaacatgtgcagggcagtctgcagacccgactgatttttttacaaaatgtgattaaggaggcttcacgattcaagaagcgaatgctgattgaacagctggagaacttccttgatgaaattcacaggcgggccaaccaaattaaccatattaattccaactag

SEQ ID NO: 172789 - DNA, 513 bp, Artificial Sequence
  derived and/or modified sequence
atgcccattctcctcttcctcatcgatacctctgccagcatgaaccagaggtcgcatctcggcacaacatatttggatacagccaaaggcgccgtggaaactttcatgaagctacgcgcccgagacccagcctcccgtggcgatagatacatgttagttacgtttgaagagcccccatatgctattaaagctggatggaaggaaaaccatgccactttcatgaacgaactgaaaaatctgcaggccgagggactgacaacgcttggtcagtccctccggactgcctttgatctgttgaatcttaatcgcttggtgaccggtatagacaattacggtcagggacgcaatccattttttttagaaccagcaatcattataaccataaccgatgggtcaaagctaaccacaacaagcggcgtgcaggacgaagcagtgcacatcctttgcgtgttgcaggagtgcctgatctccgtgtggtctccatggtgccgtaaatataaagtgggctggtag

SEQ ID NO: 172790 - DNA, 2664 bp, Artificial Sequence
  derived and/or modified sequence
atgcccatcctgctcttcctgattgacaccagcgcctccatgaaccagaggagccacctgggcaccacctacctggacacagccaagggagctgtggagaccttcatgaagctgcgggcccgggaccctgccagcagaggagaccgctacatgctggtgacctttgaggagcccccctatgccatcaaggccggctggaaggagaaccacgccaccttcatgaatgagctgaagaacctgcaggccgagggcctgaccaccctgggccagagcctgaggacagcctttgacctgctgaacctgaaccggctggtgacaggcatcgacaactacggccagggcaggaaccccttcttcctggagcccgccatcatcatcaccatcacagatggcagcaagctgaccaccaccagcggcgtgcaggatgagctgcacctgcccctgaacagccccctgcccggcagcgagctgaccaaggagcccttccgctgggaccagaggctgtttgccctggtgctgcggctgcccggcaccatgtctgtggagagcgagcagctgactggagtgcccctggatgacagcgccatcacccccatgtgtgaggtgactggaggccgcagctacagcgtgtgcagccccaggatgctgaaccagtgcctggagagcctggtgcagaaggtgcagagcggcgtggtgatcaactttgagaaggccggccctgaccccagccctgtggaggatggccagcctgacatcagccggcccttcggcagccagccctggcacagctgccacaagctgatctacgtgcggcccaaccccaagacaggagtgcccatcggccactggcctgtgcctgagagcttctggccagaccagaacagccccaccctgccccccaggaccagccaccctgtggtgaagttcagctgcacagactgtgagcccatggtgattgacaagctgccctttgacaagtatgagctggagcccagccccctgacccagttcatcctggagaggaagagcccccagacctgctggcaggtgtatgtgagcaacagcgccaagtacagcgagctgggccaccccttcggctacctgaaggccagcacagccctgaactgtgtgaacctgtttgtgatgccctacaactaccctgtgctgctgcccctgctggatgacctcttcaaggtgcacaaggccaagcccaccctgaagtggaggcagagctttgagagctacctgaagaccatgccaccctactacctgggccccctgaagaaggctgtgaggatgatgggcgcccccaacctgattgctgacagcatggagtatggcctgagctacagcgtcatctcctacctgaagaagctgagccagcaggccaagattgaaagtgacagagtgattggctctgtgggcaagaaggtggtgcaggagaccggcatcaaggtgcgcagccgcagccacggcctgtccatggcctacaggaaggacttccagcagctgctgcagggcatcagtgaagatgtgccccaccggctgctggacctgaacatgaaggagtacacaggcttccaggtggccctgctgaacaaggacctgaagccccagaccttcagaaatgcctatgacatccccaggaggaacctgctggaccacctgaccaggatgaggagcaacctgctgaagagcacccggcgcttcctgaagggccaggatgaggaccaggtgcacagcgtgcccatcgcccagatgggcaactaccaggagtacctgaagcaggtgcccagccccctgcgggagctggaccctgaccagccccggcggctgcacacctttggaaaccccttcaagctggacaagaagggcatgatgattgatgaagcagatgaatttgtggccggcccccagaacaagcacaagaggcctggagagcccaacatgcagggcatccccaagagaagacgctgcatgagccccctgctgcggggccggcagcagaaccctgtggtgaacaaccacatcggcggcaagggccccccagcccccaccacccaggcccagcctgacctgatcaagcccctgcccctgcacaagatcagcgagaccaccaatgacagcatcatccatgatgtggtggagaaccacgtggccgaccagctgagcagtgacatcaccccaaatgccatggacacagagttcagcgccagcagccctgccagcctgctggagcggcccaccaaccacatggaggccctgggccatgaccacctgggcaccaatgacctgactgtgggcggcttcctggagaaccacgaggagccccgggacaaggagcagtgtgccgaggagaacatcccagccagcagcctgaacaagggcaagaagctgatgcactgccgcagccatgaggaggtgaacacagagctgaaggcccagatcatgaaggagatcaggaagccaggcaggaaatatgagcgcatcttcaccctgctgaagcacgtgcagggcagcctgcagaccaggctcatcttcctgcagaatgtcatcaaggaggccagccgcttcaagaagaggatgctgattgagcagctggagaacttcctggatgagatccaccggcgggccaaccagatcaaccacatcaacagcaactag

SEQ ID NO: 172791 - DNA, 513 bp, Artificial Sequence
  derived and/or modified sequence
atgcccatcctgctcttcctgattgacaccagcgcctccatgaaccagaggagccacctgggcaccacctacctggacacagccaagggagctgtggagaccttcatgaagctgcgggcccgggaccctgccagcagaggagaccgctacatgctggtgacctttgaggagcccccctatgccatcaaggccggctggaaggagaaccacgccaccttcatgaatgagctgaagaacctgcaggccgagggcctgaccaccctgggccagagcctgaggacagcctttgacctgctgaacctgaaccggctggtgacaggcatcgacaactacggccagggcaggaaccccttcttcctggagcccgccatcatcatcaccatcacagatggcagcaagctgaccaccaccagcggcgtgcaggatgaggccgtgcacatcctgtgtgtgctgcaggagtgcctgatctctgtgtggagcccctggtgcaggaagtacaaggtgggctggtag

SEQ ID NO: 172792 - DNA, 2664 bp, Artificial Sequence
  derived and/or modified sequence
atgcccatcctgctgttcctgatcgacaccagcgccagcatgaaccaacggtcacacctggggacaacttacttggatacagccaagggagcggttgagacattcatgaaacttagggcgagagatcctgcgtctagaggggatagatatatgcttgttaccttcgaagaaccaccatatgccattaaggctggctggaaggaaaaccacgccacgtttatgaacgaattgaaaaatctgcaggctgaaggactaactactctcggacagagcctgcgtactgcttttgatctactcaacttaaacaggctggtgacaggtattgataattatggccagggtaggaatccattcttcctcgagcctgccatcattattactattaccgacgggagcaagctcactacgacttcaggggttcaggacgaactccatctgcccctaaacagtccgctgcccggcagtgagctgactaaggagcctttccgctgggaccaacgcctcttcgctttggtcctccggctgccagggacaatgtcagttgaatccgaacaattgaccggtgtccctttggatgactccgccatcacacctatgtgtgaggtgaccggcgggagatcctactccgtttgctcacccagaatgttaaaccaatgtctcgaatccctggttcagaaagtgcagtctggtgtagtcatcaactttgaaaaggccgggccagaccctagccccgtggaagacggccagccagacatctcacgaccatttggaagtcagccttggcattcttgccacaaactgatctatgttaggcctaaccctaagaccggagttcccatcggccactggcccgtgccagagagcttctggccggaccagaatagtcccacactacctcctcgaacaagccatcccgtggtgaagttttcctgtacagattgcgagccaatggtgatagacaaactgccttttgacaagtatgagttggaacctagccctctgacccaattcattctggagagaaaatcaccccaaacatgttggcaggtctacgtgtcaaattccgccaagtattctgagctgggccatccctttgggtaccttaaggcatccaccgccctcaactgcgtgaacctgtttgtgatgccctacaactatccagtgctgctgcctcttctggacgacttatttaaagtgcataaggccaagccgactctgaaatggcgacaatcattcgagagctatctgaagacaatgcccccatactacctaggacctctgaagaaagccgtccgaatgatgggagcccccaatttgatagcagacagtatggagtacgggctcagctatagcgtgatctcataccttaagaagctgtctcagcaagccaagatcgaaagtgatagagtgatcgggagcgtcgggaaaaaagttgtgcaggagacaggtatcaaggttagatccaggtctcacggtctgtccatggcgtaccgtaaggactttcaacagctactacaagggattagcgaggacgtgcctcacaggctgcttgaccttaacatgaaggaatatactggtttccaggtggccctcctcaacaaagatcttaaaccccagacctttagaaacgcttatgacatcccccggcggaatttactagatcatctgaccagaatgaggtctaatttacttaaaagcacaagacggtttttaaaaggacaggacgaagaccaggtgcactctgtccccatcgctcagatggggaactatcaagaatacctaaagcaggtaccttctcctcttcgtgagctagatcctgaccagcctagacgtctgcacacctttgggaacccattcaaactggataaaaaaggtatgatgatcgacgaagcggatgaattcgtcgcgggaccccagaacaagcacaaaaggcctggcgagcctaatatgcaaggtatcccgaagaggcggaggtgcatgagccccctgctgcggggtcggcagcagaatccagtcgttaacaatcatatcgggggcaaaggcccgccagcacccacaactcaggctcagcctgacctgattaagccgctcccactgcacaagatatccgaaacaaccaacgacagtatcatccacgatgtggtagaaaaccacgtagctgaccagttgagcagcgatattactccaaacgccatggatacggaattcagtgctagtagccccgcatcgctgctggagcggccaaccaaccacatggaagctctcggacatgatcatctgggcacaaatgacctgacagtcggtgggtttttggagaatcatgaagaacccagagataaggagcaatgcgcggaggaaaatataccagcctcttccttaaacaagggcaagaaattgatgcactgccgttcccacgaagaagtcaacacagagctcaaagcgcagatcatgaaagaaatcagaaaaccgggtagaaaatatgagagaatcttcacactgttgaagcacgtgcaaggaagcctgcagacccgactgatatttctgcagaatgtgatcaaagaagcctcccggtttaagaagcgtatgctgatcgagcagctggagaacttcctggatgaaatacataggagggcaaaccaaatcaaccacattaactcaaactag

SEQ ID NO: 172793 - DNA, 3379 bp, Artificial Sequence
  derived and/or modified sequence
agccggcctacaagcttcccccgcccctgagctgtttaaatatgctaatgaaaggatagggcctgaccagtagaacggcgaggcggtgtatcacgtggctcggggacgtgtcaggggcggagcctccgcagcccctgcccgagttaaaaccggagtgtgagagagaaaagcgcttcagtagcgagaggggctgagaaagtggtgacaccgccgggacacgtctgcctctatgaaccagcgcagccatctgggcaccacctacctggacacggccaaaggcgcggtagagaccttcatgaagctccgtgcccgggaccctgccagcagaggagacaggtatatgctggtcactttcgaagagccgccctatgctatcaaggctggatggaaagaaaaccatgcaacgtttatgaatgaattgaaaaaccttcaggctgaaggacttacgactcttggccaatccctaaggacagcttttgatttattaaatttaaatagattagtaactggcatagacaactatgggcagggaagaaacccttttttcttggagccagcaataattatcacaattactgatgggagcaagttgactaccaccagtggagtccaggatgagcttcatttacctcttaattctcctttgcctggaagtgaattgaccaaggaaccttttcgttgggatcagagactctttgcattagtgttgcggttgcctggcaccatgtcagtagaatcagaacagttgacaggtgtgcctttagatgactctgcaatcacaccaatgtgtgaagtgacaggcggccgttcatattctgtgtgttctccaagaatgcttaatcagtgtctggagtccttggtgcagaaagtacaaagtggggtggtaataaactttgaaaaagcaggaccagatccttcccctgtagaagatgggcagccagatatatcaaggccttttggatctcagccttggcatagctgtcacaaactcatatatgtcagaccaaatcctaaaactggggttcctataggtcattggcctgttccagagtctttttggccagatcaaaattcgccaacactaccacctcgtacatctcatcctgtagtgaagttttcctgtacagactgtgaaccaatggttattgataaacttccttttgacaaatatgagttggaaccttcaccactgactcaatttatcctggaaaggaaatctcctcaaacatgttggcaggtgtacgtgagcaatagtgcaaaatacagtgaacttggtcatccttttggttacttgaaagccagtacagcactgaactgtgtcaacttatttgtgatgccttacaattatccagtccttcttcccctcttagatgacttgtttaaagtgcataaagcaaaaccaacattgaagtggagacagtcatttgaaagttatttgaagacaatgcctccctactatcttgggcccttgaagaaagctgttaggatgatgggagcacctaacctaatagcagacagtatggaatatggacttagttacagtgtcatttcatacctcaaaaaactgagtcaacaggccaaaatagaatctgatcgagtcattggatctgtaggcaaaaaagtagtacaggagactggaataaaagtccggagccgatcacatggtttatcaatggcatataggaaagattttcaacaactcctccagggaatttcagaggatgtccctcacagactgctagaccttaatatgaaggaatacactgggttccaagttgctttgctgaataaggatttgaagccacagacatttagaaatgcttatgacataccaagacgaaatcttttggatcacttaacaagaatgagatctaatcttttgaagagcactcgcagatttctgaaaggacaggacgaagatcaagtgcacagtgttcctatagcacaaatggggaactaccaggaatacctcaagcaagtaccttctccactaagagaacttgatcctgatcagccacgaaggttgcatacatttggcaacccctttaagctggataagaagggtatgatgatagatgaagcagatgaatttgtggctggacctcaaaataaacataaacgacccggagaaccaaatatgcaagggatccctaaaagacgtcggtgtatgtctccactactaagaggcagacagcagaatcctgttgtaaacaatcatattgggggaaaaggaccacctgcacctacaactcaagcacagccagatcttattaaacctcttcctcttcataaaatttcagaaaccactaatgattcgataatacatgatgtggttgaaaatcatgttgcagaccaactttcatcagacattacaccaaatgctatggatacggaattttcagcatcttctccagccagtttactggaacggccaaccaatcatatggaggctcttggtcatgaccatttaggaaccaatgacctcactgttggtggatttttagaaaatcatgaggagccaagagataaagaacaatgtgctgaagagaacataccagcatcttcactcaacaaaggaaagaaattgatgcattgcagaagccatgaagaggtcaatactgaactaaaagcacaaataatgaaagagatccgaaagccaggaagaaaatatgaaagaatcttcactttactgaagcatgtgcaaggcagtttacaaacaagactaatatttttacaaaatgtcattaaagaagcatcaaggtttaaaaaacgaatgctaatagaacaactggagaacttcttggatgaaattcatcgaagagccaatcagatcaaccatattaatagcaattaaaagaaaatagaatgtggccacttatttcactatcttcttcaaatacaaagtaaatacaagactgttgtgatcttgcattcattttctgacatgcattgttggctatttgaaatactaaaagcaaatctacagatcctttttccatcattttacagtgaccttttcttcattttggtttatttttgtaatgtgaaaagtatcactctaaaaaacatttttaatttaacaaactaaaaatattcctccaaatctcttgcttgtcattgactcttgcgtgtcaatttccctcaggttctattttcttaaaccaacctttaaaattgtcacctctgttaaggttgaactttgccaaaaaaaaaagaagttactttgtaatttttggggaaaaaagcacatacattaaaactaggtaatgttttgtatatacagttattttggatatattattgtaagttgtacaaatgtattttgaagaatatttaagaaaagcacttttgttattccatcaataaatgctctatttta

SEQ ID NO: 172794 - DNA, 513 bp, Artificial Sequence
  derived and/or modified sequence
atgcccatcctgctgttcctgatcgacaccagcgccagcatgaaccagagatcgcatttaggtactacttatctggacacagccaagggagccgtggaaacgtttatgaaattgcgggctagagatcccgctagtagaggcgaccggtacatgctggttacgttcgaggaacctccatatgccatcaaggcaggctggaaggaaaaccacgccactttcatgaacgaattgaagaaccttcaggccgaagggcttacaactctggggcagtctttgagaacagcatttgatctgctcaacttaaacaggctggtgactgggattgataactacggccagggtcggaacccatttttcctcgaacccgctatcatcatcacaattaccgacggatcgaaactgactaccaccagtggtgtccaagacgaagcggtccatatactatgcgtcttgcaagaatgcttgatctccgtttggtccccttggtgccgcaagtacaaagtggggtggtag

SEQ ID NO: 172795 - DNA, 2664 bp, Artificial Sequence
  derived and/or modified sequence
atgcccattcttttgtttctgattgacactagtgcttcaatgaaccagcgtagtcatctcggcacaacatacctggatacagctaagggcgctgtggagacattcatgaagctacgcgctagggatcctgcatccagaggggatcggtatatgctcgtgactttcgaagagccaccttacgctatcaaggccggttggaaggaaaaccacgccacctttatgaatgagctgaagaacctccaggccgaagggctgaccaccctgggccaaagcctacggaccgcttttgacttgcttaaccttaaccgtctcgtaaccggcatcgataattacggccaggggaggaatccctttttcctggaaccggcaatcatcataacaattaccgacgggtcaaaactgacaaccactagcggtgtacaggacgagttacacctccccctgaatagcccactgcctggaagcgagttaaccaaagagcctttccgctgggaccaacggttgttcgctcttgttctgagactccctgggacaatgtccgtggagtctgagcagctaactggggtgccccttgatgacagcgccattactccgatgtgtgaggtgaccggagggaggagttacagtgtgtgttctcctagaatgctcaatcagtgtctggaaagcctagtgcagaaggtccagtcgggcgtggtgataaattttgagaaggctgggcctgacccttctccagtagaggacggccaacccgatataagtcgtcccttcgggagtcagccatggcactcgtgccacaagctgatttacgtacgcccaaaccctaagaccggcgtgcccatcggtcactggccagtaccggagagcttctggccggaccaaaacagtcccaccctaccccctagaacaagccaccccgtggtcaagttcagctgtacagactgtgaaccaatggtgatcgacaagctcccttttgacaagtatgagctggagcctagtcctctgacccagtttattcttgaacggaagtcgcctcagacatgctggcaggtttacgtcagtaattccgccaagtatagtgagctgggccacccgtttggctacttgaaagccagcacagctctgaactgtgttaacctgtttgtgatgccttataattaccccgtgctgctgcccctcctggacgacctgtttaaggttcataaggcaaaaccaaccctgaagtggcgacagtcgttcgaaagctacctgaagaccatgcctccctattatctgggccctctcaaaaaggccgtaagaatgatgggtgcgccaaacttaatagcggatagcatggaatatggtctgtcctactcagtcatatcctatctaaaaaaattaagtcagcaggccaagattgagtcagaccgtgttatcggatctgtcgggaagaaagttgtgcaggaaaccggaatcaaggtcagatcaaggtcacacggcttatccatggcttacaggaaggactttcagcagttgctgcagggaattagcgaggacgtaccccacagactcttagacctgaatatgaaggagtataccggcttccaggtggccctgcttaataaggacctgaagccccagacgttccgtaacgcctatgacatcccacggcgtaacttacttgaccaccttacacgaatgcggagcaacctcttgaagagtacccgaaggtttctcaaaggtcaggacgaggaccaagtgcacagcgtgcccatcgctcagatgggaaactatcaggagtacctaaaacaagtcccttctccacttcgcgaactcgatccggaccaacccagacgccttcacactttcggcaatcctttcaaacttgataaaaagggaatgatgatcgatgaagccgatgagtttgttgccggacctcaaaataagcacaaaagaccgggtgaacccaacatgcagggcatacccaaaagacgcagatgcatgtcccccctcctacgaggaagacagcagaatccagtcgtgaataaccatatcggaggcaaggggcctccagctccgactacccaagctcagcccgatctgattaagccattgcctttgcataagatcagtgaaacaactaacgactccatcatccatgacgtggtcgagaatcacgtggctgatcagctcagtagcgacattacccctaacgctatggacaccgagttctccgcttcttccccggcttctctgctcgagagaccaactaatcacatggaagcactgggacacgatcacttggggaccaacgacctgaccgtgggcggtttcttggaaaaccatgaggagccgagagacaaggagcaatgtgctgaagagaacatccccgcaagcagcctgaataaagggaaaaagctgatgcactgtcgcagtcacgaagaggttaataccgagctcaaggcccagatcatgaaggaaattcgcaagcctgggcgtaagtatgagagaatcttcacattgctaaagcacgtccagggttccctacagacgagacttatattcctccagaacgttatcaaggaagcttctaggtttaaaaagagaatgctgatagaacagttggagaattttctggacgagatacaccggcgagccaatcagatcaaccacatcaatagcaactag

SEQ ID NO: 172796 - DNA, 903 bp, Artificial Sequence
  derived and/or modified sequence
gtgctcccccgccccgcgtagcggcggtcgccgccaccggcgcctccacctctaccatctcctctttctccaccacctcgggccccggtgtccccggccagcactatgcccatcttactgttcctgatagacacgtctgcctctatgaaccagcgcagccatctgggcaccacctacctggacacggccaaaggcgcggtagagaccttcatgaagctccgtgcccgggaccctgccagcagaggagacaggtatatgctggtcactttcgaagagccgccctatgctatcaaggctggatggaaagaaaaccatgcaacgtttatgaatgaattgaaaaaccttcaggctgaaggacttacgactcttggccaatccctaaggacagcttttgatttattaaatttaaatagattagtaactggcatagacaactatgggcagggaagaaacccttttttcttggagccagcaataattatcacaattactgatgggagcaagttgactaccaccagtggagtccaggatgaggccgttcatattctgtgtgttctccaagaatgcttaatcagtgtctggagtccttggtgcagaaagtacaaagtggggtggtaataaactttgaaaaagcaggaccagatccttcccctgtagaagatgggcagccagatatatcaaggccttttggatctcagccttggcatagctgtcacaaactcatatatgtcagaccaaatcctaaaactggggttcctataggtcattggcctgttccagagtctttttggccagatcaaaattcgccaacactaccacctcgtacatctcatcctgtagtgaagttttcctgtacagactgtgaaccaatggttattgataaacttccttttgacaaatatg

SEQ ID NO: 172797 - DNA, 513 bp, Artificial Sequence
  derived and/or modified sequence
atgccgatcctcctgttcctgattgacacctctgcatcgatgaaccaacggtcacacctcggtacaacatacttggacacggccaagggggcagtagaaacttttatgaaattgagagcacgggaccccgcttctaggggagacagatacatgctggttaccttcgaagaacccccttacgctatcaaggccggttggaaagagaatcatgcaacatttatgaacgaactaaaaaatctccaggccgaagggctcacgaccctgggtcaaagtctgagaactgcgttcgaccttttaaatctgaatcgtctagtaacgggaatcgacaattacgggcagggcaggaatcctttctttcttgaaccggctatcatcatcaccatcactgatgggagtaagttgaccactaccagcggcgtgcaggacgaggcagtgcatatcctatgtgtattgcaagaatgcctcatctcagtgtggagcccttggtgccggaagtataaagtgggctggtag

SEQ ID NO: 172798 - DNA, 597 bp, Artificial Sequence
  derived and/or modified sequence
aatgtgtttgagaaaactgttttcctcggacatgcaggcgtggactccttacttcaggtaaggtgacagcagcttgacagagagtgccttccctcccacggcatttgggacgaggctgaaggaaagacacaggcggggttacgggaaacccattctctgcgccatctgggcaagctgaagtcagtttttccgctttctcacgagacacgtctgcctctatgaaccagcgcagccatctgggcaccacctacctggacacggccaaaggcgcggtagagaccttcatgaagctccgtgcccgggaccctgccagcagaggagacaggtatatgctggtcactttcgaagagccgccctatgctatcaaggctggatggaaagaaaaccatgcaacgtttatgaatgaattgaaaaaccttcaggctgaaggacttacgactcttggccaatccctaaggacagcttttgatttattaaatttaaatagattagtaactggcatagacaactatgggcagggaagaaacccttttttcttggagccagcaataattatcacaattactgatgggagcaagttgactaccaccagtggag

SEQ ID NO: 172799 - DNA, 474 bp, Artificial Sequence
  derived and/or modified sequence
tccggcgcccgcgaggccccgagtcctcctccggagggcggctgcgggcctgccctcttctcctaaccagacacgtctgcctctatgaaccagcgcagccatctgggcaccacctacctggacacggccaaaggcgcggtagagaccttcatgaagctccgtgcccgggaccctgccagcagaggagacaggtatatgctggtcactttcgaagagccgccctatgctatcaaggctggatggaaagaaaaccatgcaacgtttatgaatgaattgaaaaaccttcaggctgaaggacttacgactcttggccaatccctaaggacagcttttgatttattaaatttaaatagattagtaactggcatagacaactatgggcagggaagaaacccttttttcttggagccagcaataattatcacaattactgatgggagcaagttgactaccaccagtggagtccaggatgag

SEQ ID NO: 172800 - DNA, 3662 bp, Artificial Sequence
  derived and/or modified sequence
gccggggtgcggagggagtccctgaaacttctcccaacagccccagggccaatcttccctcagcccactcccctcttcgccagctcccaggtccccactcctgtaccgggggtggggtggggagccaggcccgtctcccgctgggacacacacaggggccgggagcggggacgggacccccgaggcgggggggacgaaccgacagacagacggctgggcgcccgccccagcgggcaggcaggcaggaggaggcggaggcgggggtacgacggggagcactgggtctggggagtttcctctcaactatcgggggagaaactccccgcagccggaggaaagacccagacagtgttttcctcccgggggccgtgctcccccgccccgcgtagcggcggtcgccgccaccggcgcctccacctctaccatctcctctttctccaccacctcgggccccggtgtccccggccagcactatgcccatcttactgttcctgatagacacgtctgcctctatgaaccagcgcagccatctgggcaccacctacctggacacggccaaaggcgcggtagagaccttcatgaagctccgtgcccgggaccctgccagcagaggagacaggtatatgctggtcactttcgaagagccgccctatgctatcaaggctggatggaaagaaaaccatgcaacgtttatgaatgaattgaaaaaccttcaggctgaaggacttacgactcttggccaatccctaaggacagcttttgatttattaaatttaaatagattagtaactggcatagacaactatgggcagggaagaaacccttttttcttggagccagcaataattatcacaattactgatgggagcaagttgactaccaccagtggagtccaggatgagcttcatttacctcttaattctcctttgcctggaagtgaattgaccaaggaaccttttcgttgggatcagagactctttgcattagtgttgcggttgcctggcaccatgtcagtagaatcagaacagttgacaggtgtgcctttagatgactctgcaatcacaccaatgtgtgaagtgacaggcggccgttcatattctgtgtgttctccaagaatgcttaatcagtgtctggagtccttggtgcagaaagtacaaagtggggtggtaataaactttgaaaaagcaggaccagatccttcccctgtagaagatgggcagccagatatatcaaggccttttggatctcagccttggcatagctgtcacaaactcatatatgtcagaccaaatcctaaaactggggttcctataggtcattggcctgttccagagtctttttggccagatcaaaattcgccaacactaccacctcgtacatctcatcctgtagtgaagttttcctgtacagactgtgaaccaatggttattgataaacttccttttgacaaatatgagttggaaccttcaccactgactcaatttatcctggaaaggaaatctcctcaaacatgttggcaggtgtacgtgagcaatagtgcaaaatacagtgaacttggtcatccttttggttacttgaaagccagtacagcactgaactgtgtcaacttatttgtgatgccttacaattatccagtccttcttcccctcttagatgacttgtttaaagtgcataaagcaaaaccaacattgaagtggagacagtcatttgaaagttatttgaagacaatgcctccctactatcttgggcccttgaagaaagctgttaggatgatgggagcacctaacctaatagcagacagtatggaatatggacttagttacagtgtcatttcatacctcaaaaaactgagtcaacaggccaaaatagaatctgatcgagtcattggatctgtaggcaaaaaagtagtacaggagactggaataaaagtccggagccgatcacatggtttatcaatggcatataggaaagattttcaacaactcctccagggaatttcagaggatgtccctcacagactgctagaccttaatatgaaggaatacactgggttccaagttgctttgctgaataaggatttgaagccacagacatttagaaatgcttatgacataccaagacgaaatcttttggatcacttaacaagaatgagatctaatcttttgaagagcactcgcagatttctgaaaggacaggacgaagatcaagtgcacagtgttcctatagcacaaatggggaactaccaggaatacctcaagcaagtaccttctccactaagagaacttgatcctgatcagccacgaaggttgcatacatttggcaacccctttaagctggataagaagggtatgatgatagatgaagcagatgaatttgtggctggacctcaaaataaacataaacgacccggagaaccaaatatgcaagggatccctaaaagacgtcggtgtatgtctccactactaagaggcagacagcagaatcctgttgtaaacaatcatattgggggaaaaggaccacctgcacctacaactcaagcacagccagatcttattaaacctcttcctcttcataaaatttcagaaaccactaatgattcgataatacatgatgtggttgaaaatcatgttgcagaccaactttcatcagacattacaccaaatgctatggatacggaattttcagcatcttctccagccagtttactggaacggccaaccaatcatatggaggctcttggtcatgaccatttaggaaccaatgacctcactgttggtggatttttagaaaatcatgaggagccaagagataaagaacaatgtgctgaagagaacataccagcatcttcactcaacaaaggaaagaaattgatgcattgcagaagccatgaagaggtcaatactgaactaaaagcacaaataatgaaagagatccgaaagccaggaagaaaatatgaaagaatcttcactttactgaagcatgtgcaaggcagtttacaaacaagactaatatttttacaaaatgtcattaaagaagcatcaaggtttaaaaaacgaatgctaatagaacaactggagaacttcttggatgaaattcatcgaagagccaatcagatcaaccatattaatagcaattaaaagaaaatagaatgtggccacttatttcactatcttcttcaaatacaaagtaaatacaagactgttgtgatcttgcattcattttctgacatgcattgttggctatttgaaatactaaaagcaaatctacagatcctttttccatcattttacagtgaccttttcttcattttggtttatttttgtaatgtgaaaagtatcactctaaaaaacatttttaatttaacaaactaaaaatattcctccaaatctcttgcttgtcattgactcttgcgtgtcaatttccctcaggttctattttcttaaaccaacctttaaaattgtcacctctgttaaggttgaactttgccaaaaaaaaaagaagttactttgtaatttttggggaaaaaagcacatacattaaaactaggtaatgttttgtatatacagttattttggatatattattgtaagttgtacaaatgtattttgaagaatatttaagaaaagcacttttgttattccatcaataaatgctctatttta

SEQ ID NO: 172801 - DNA, 2664 bp, Artificial Sequence
  derived and/or modified sequence
atgcccatcctgctgttcctgatcgacaccagcgccagcatgaaccagagaagccacctgggcaccacctacctggacaccgccaagggcgccgtggagaccttcatgaagctgagagccagagaccccgccagcagaggcgacagatacatgctggtgaccttcgaggagcccccctacgccatcaaggccggctggaaggagaaccacgccaccttcatgaacgagctgaagaacctgcaggccgagggcctgaccaccctgggccagagcctgagaaccgccttcgacctgctgaacctgaacagactggtgaccggcatcgacaactacggccagggcagaaaccccttcttcctggagcccgccatcatcatcaccatcaccgacggcagcaagctgaccaccaccagcggcgtgcaggacgagctgcacctgcccctgaacagccccctgcccggcagcgagctgaccaaggagcccttcagatgggaccagagactgttcgccctggtgctgagactgcccggcaccatgagcgtggagagcgagcagctgaccggcgtgcccctggacgacagcgccatcacccccatgtgcgaggtgaccggcggcagaagctacagcgtgtgcagccccagaatgctgaaccagtgcctggagagcctggtgcagaaggtgcagagcggcgtggtgatcaacttcgagaaggccggccccgaccccagccccgtggaggacggccagcccgacatcagcagacccttcggcagccagccctggcacagctgccacaagctgatctacgtgagacccaaccccaagaccggcgtgcccatcggccactggcccgtgcccgagagcttctggcccgaccagaacagccccaccctgccccccagaaccagccaccccgtggtgaagttcagctgcaccgactgcgagcccatggtgatcgacaagctgcccttcgacaagtacgagctggagcccagccccctgacccagttcatcctggagagaaagagcccccagacctgctggcaggtgtacgtgagcaacagcgccaagtacagcgagctgggccaccccttcggctacctgaaggccagcaccgccctgaactgcgtgaacctgttcgtgatgccctacaactaccccgtgctgctgcccctgctggacgacctgttcaaggtgcacaaggccaagcccaccctgaagtggagacagagcttcgagagctacctgaagaccatgcccccctactacctgggccccctgaagaaggccgtgagaatgatgggcgcccccaacctgatcgccgacagcatggagtacggcctgagctacagcgtgatcagctacctgaagaagctgagccagcaggccaagatcgagagcgacagagtgatcggcagcgtgggcaagaaggtggtgcaggagaccggcatcaaggtgagaagcagaagccacggcctgagcatggcctacagaaaggacttccagcagctgctgcagggcatcagcgaggacgtgccccacagactgctggacctgaacatgaaggagtacaccggcttccaggtggccctgctgaacaaggacctgaagccccagaccttcagaaacgcctacgacatccccagaagaaacctgctggaccacctgaccagaatgagaagcaacctgctgaagagcaccagaagattcctgaagggccaggacgaggaccaggtgcacagcgtgcccatcgcccagatgggcaactaccaggagtacctgaagcaggtgcccagccccctgagagagctggaccccgaccagcccagaagactgcacaccttcggcaaccccttcaagctggacaagaagggcatgatgatcgacgaggccgacgagttcgtggccggcccccagaacaagcacaagagacccggcgagcccaacatgcagggcatccccaagagaagaagatgcatgagccccctgctgagaggcagacagcagaaccccgtggtgaacaaccacatcggcggcaagggcccccccgcccccaccacccaggcccagcccgacctgatcaagcccctgcccctgcacaagatcagcgagaccaccaacgacagcatcatccacgacgtggtggagaaccacgtggccgaccagctgagcagcgacatcacccccaacgccatggacaccgagttcagcgccagcagccccgccagcctgctggagagacccaccaaccacatggaggccctgggccacgaccacctgggcaccaacgacctgaccgtgggcggcttcctggagaaccacgaggagcccagagacaaggagcagtgcgccgaggagaacatccccgccagcagcctgaacaagggcaagaagctgatgcactgcagaagccacgaggaggtgaacaccgagctgaaggcccagatcatgaaggagatcagaaagcccggcagaaagtacgagagaatcttcaccctgctgaagcacgtgcagggcagcctgcagaccagactgatcttcctgcagaacgtgatcaaggaggccagcagattcaagaagagaatgctgatcgagcagctggagaacttcctggacgagatccacagaagagccaaccagatcaaccacatcaacagcaactag

SEQ ID NO: 172802 - protein, 360 aa, Artificial Sequence
  derived and/or modified sequence
MASATAPAAAVPTLASPLEQLRHLAEELRLLLPRVRVGEAQETTEEFNREMFWRRLNEAAVTVSREATTLTIVFSQLPLPSPQETQKFCEQVHAAIKAFIAVYYLLPKDQGITLRKLVRGATLDIVDGMAQLMEVLSVTPTQSPENNDLISYNSVWVACQQMPQIPRDNKAAALLMLTKNVDFVKDAHEEMEQAVEECDPYSGLLNDTEENNSDNHNHEDDVLGFPSNQDLYWSEDDQELIIPCLALVRASKACLKKIRMLVAENGKKDQVAQLDDIVDISDEISPSVDDLALSIYPPMCHLTVRINSAKLVSVLKKALEITKASHVTPQPEDSWIPLLINAIDHCMNRIKELTQSELEL

SEQ ID NO: 172803 - protein, 199 aa, Artificial Sequence
  derived and/or modified sequence
MPQIPRDNKAAALLMLTKNVDFVKDAHEEMEQAVEECDPYSGLLNDTEENNSDNHNHEDDVLGFPSNQDLYWSEDDQELIIPCLALVRASKACLKKIRMLVAENGKKDQVAQLDDIVDISDEISPSVDDLALSIYPPMCHLTVRINSAKLVSVLKKALEITKASHVTPQPEDSWIPLLINAIDHCMNRIKELTQSELEL

SEQ ID NO: 172804 - protein, 232 aa, Artificial Sequence
  derived and/or modified sequence
MAQLMEVLSVTPTQSPENNDLISYNSVWVACQQMPQIPRDNKAAALLMLTKNVDFVKDAHEEMEQAVEECDPYSGLLNDTEENNSDNHNHEDDVLGFPSNQDLYWSEDDQELIIPCLALVRASKACLKKIRMLVAENGKKDQVAQLDDIVDISDEISPSVDDLALSIYPPMCHLTVRINSAKLVSVLKKALEITKASHVTPQPEDSWIPLLINAIDHCMNRIKELTQSELEL

SEQ ID NO: 172805 - DNA, 1083 bp, Artificial Sequence
  derived and/or modified sequence
atggcctccgcaactgcaccggctgcggcagtcccgaccttggcctcacccctggagcagctgagacacctggctgaggagctcaggctgctgcttccccgcgttcgagtaggcgaggcccaggaaacaacagaggaattcaaccgcgaaatgttctggcgcaggctgaatgaggccgctgtgactgtgagccgggaagccaccactctgaccattgtgttcagccaactgcccctgcctagtcctcaggagacacagaagttctgtgaacaggttcacgcggccatcaaggccttcatcgccgtctattatcttcttcctaaggatcaagggatcacccttagaaagttggttaggggagccactttggatattgtggacggaatggcccagctcatggaggtattatcggttacgcccacacaatcccctgagaataacgatctgataagctataacagtgtctgggtggcgtgtcagcagatgccacagatccctcgggataacaaggccgctgccctgcttatgttgacaaagaatgtcgactttgtgaaggatgcccacgaggaaatggagcaggccgtcgaggaatgtgatccatacagcgggttactcaacgacactgaagagaacaacagcgataatcataatcacgaggatgacgtcttgggattcccatccaaccaggatctgtattggagcgaagatgaccaggaactgatcatcccatgcttggccctcgtacgggcaagcaaagcttgcttaaaaaagattagaatgttagtggccgagaacggcaaaaaggaccaggtcgcacagctggacgatattgtggatatctctgatgaaatctctccgtcagtcgatgaccttgccctctccatttaccctccaatgtgtcaccttacagtccgcatcaatagtgccaagctggtgagtgtgctgaagaaggccctcgaaatcaccaaggccagccacgtgacacctcagcccgaggatagttggattccgttactgatcaatgctattgatcattgtatgaatcggattaaggaactgacgcagagtgagttggaactgtag

SEQ ID NO: 172806 - DNA, 600 bp, Artificial Sequence
  derived and/or modified sequence
atgccccagatcccccgggacaataaagctgcagccctgctgatgttgacaaagaatgtggactttgtaaaagatgcccatgaggaaatggaacaggctgtcgaggagtgtgatccctactctggcctactgaacgataccgaggaaaacaattcagacaatcacaatcacgaagatgacgtgctggggttcccttctaatcaggacctctactggtcagaggatgaccaggagcttattatcccctgtctggcccttgttagagccagtaaagcatgtttgaagaagataagaatgttggtggcggaaaacggtaaaaaggatcaggttgcacagctggatgacatagtggacatttccgatgagatttccccaagtgtagacgatctggccctgtcaatttaccctccaatgtgccacttaacagtccggataaatagcgctaaactcgtgagcgtcctgaaaaaggccctggaaattactaaagcctctcatgtaacccctcagccggaagacagttggattccactgttgattaacgcaatcgatcactgcatgaatcgcatcaaggagcttacccaatctgaactcgagctatag

SEQ ID NO: 172807 - DNA, 699 bp, Artificial Sequence
  derived and/or modified sequence
atggcccagctgatggaggtcctgtccgtgacgccgacacagtctcccgagaacaatgaccttatcagttacaattccgtgtgggtcgcctgtcagcagatgccccaaattccacgcgacaataaggctgccgctctactcatgctgacgaagaatgtcgacttcgttaaggacgcacacgaggaaatggagcaggctgtagaagagtgcgacccctatagcggcctgctgaatgatactgaagagaacaacagtgacaaccacaaccatgaggacgacgttctcggcttccctagcaatcaggacctttactggtccgaggacgatcaagagctgatcattccttgcctggcactcgtccgggcttccaaggcgtgtctgaagaagatacgaatgctagtcgccgagaacggcaagaaagaccaggtcgcccagctggacgatattgtagacataagtgacgaaatttctcccagtgttgatgaccttgcccttagtatctacccacccatgtgtcacctaacagtgcgaatcaactctgccaagttagtcagcgtattaaagaaagccctggaaatcacgaaagcatctcatgtgaccccccagcccgaggatagctggatccccctcctaatcaacgccatcgaccattgtatgaacagaattaaagagctgacacagtccgagttagagctgtag

SEQ ID NO: 172808 - DNA, 1083 bp, Artificial Sequence
  derived and/or modified sequence
atggccagcgccacagccccagctgctgctgtgcccaccctggccagccccctggagcagctgcggcacctggccgaggagctgcggctgctgctgccccgggtgcgggtgggggaggcccaggagaccacagaggagttcaaccgggagatgttctggaggcggctgaatgaagctgctgtgacagtgtcccgggaggccaccaccctgaccatcgtgttcagccagctgcccctgcccagcccccaggagacccagaagttctgtgagcaggtgcacgccgccatcaaggccttcatcgctgtgtactacctgctgcccaaggaccagggcatcaccctgaggaagctggtgcggggggccaccctggacatcgtggatggcatggcccagctgatggaggtgctgtctgtgacccccacccagagcccagaaaataatgacctgatctcctacaacagcgtgtgggtggcctgccagcagatgccccagatcccccgggacaacaaggccgccgccctgctgatgctgaccaagaatgtggactttgtgaaggatgcccacgaggagatggagcaggccgtggaggagtgtgacccctacagcggcctgctgaatgacacagaggagaacaacagcgacaaccacaaccatgaagatgatgtgctgggcttccccagcaaccaggacctgtactggagcgaagatgaccaggagctgatcatcccctgcctggccctggtgcgggccagcaaggcctgcctgaagaagatccgcatgctggtggccgagaatggcaagaaggaccaggtggcccagctggatgacatcgtggacatcagtgatgagatcagccccagcgtggatgacctggccctgagcatctacccacccatgtgccacctgactgtgcgcatcaacagcgccaagctggtgtctgtgctgaagaaggccctggagatcaccaaggccagccacgtgaccccccagcctgaggacagctggatccccctgctgatcaatgccatcgaccactgcatgaaccgcatcaaggagctgacccagagcgagctggagctgtag

SEQ ID NO: 172809 - DNA, 600 bp, Artificial Sequence
  derived and/or modified sequence
atgccccagatcccccgggacaacaaggctgctgccctgctgatgctgaccaagaatgtggactttgtgaaggatgcccacgaggagatggagcaggccgtggaggagtgtgacccctacagcggcctgctgaatgacacagaggagaacaacagcgacaaccacaaccatgaagatgatgtgctgggcttccccagcaaccaggacctgtactggagcgaagatgaccaggagctgatcatcccctgcctggccctggtgcgggccagcaaggcctgcctgaagaagatccgcatgctggtggctgaaaatggcaagaaggaccaggtggcccagctggatgacatcgtggacatcagtgatgagatcagccccagcgtggatgacctggccctgagcatctacccacccatgtgccacctgactgtgcgcatcaacagcgccaagctggtgtctgtgctgaagaaggccctggagatcaccaaggccagccacgtgaccccccagccagaagattcctggatccccctgctgatcaatgccatcgaccactgcatgaaccgcatcaaggagctgacccagagcgagctggagctgtag

SEQ ID NO: 172810 - DNA, 699 bp, Artificial Sequence
  derived and/or modified sequence
atggcccagctgatggaggtgctgtctgtgacccccacccagagcccagaaaataatgacctgatctcctacaacagcgtgtgggtggcctgccagcagatgccccagatcccccgggacaacaaggccgccgccctgctgatgctgaccaagaatgtggactttgtgaaggatgcccacgaggagatggagcaggccgtggaggagtgtgacccctacagcggcctgctgaatgacacagaggagaacaacagcgacaaccacaaccatgaagatgatgtgctgggcttccccagcaaccaggacctgtactggagcgaagatgaccaggagctgatcatcccctgcctggccctggtgcgggccagcaaggcctgcctgaagaagatccgcatgctggtggccgagaatggcaagaaggaccaggtggcccagctggatgacatcgtggacatcagtgatgagatcagccccagcgtggatgacctggccctgagcatctacccacccatgtgccacctgactgtgcgcatcaacagcgccaagctggtgtctgtgctgaagaaggccctggagatcaccaaggccagccacgtgaccccccagcctgaggacagctggatccccctgctgatcaatgccatcgaccactgcatgaaccgcatcaaggagctgacccagagcgagctggagctgtag

SEQ ID NO: 172811 - DNA, 1083 bp, Artificial Sequence
  derived and/or modified sequence
atggccagcgccaccgcccccgccgccgccgtgcccaccctggccagtccattggagcagctccggcacctggctgaagagcttagactgctgctgccccgggttagggttggtgaagcccaagaaactacggaggagttcaacagagagatgttttggcgacgcctgaacgaggccgcggtgacggtgtctcgtgaagcaaccacgcttacaatcgtattcagccaactgccgctccctagtccccaggagactcagaagttttgtgaacaagtccatgctgctatcaaagcctttatcgccgtgtactatctccttcccaaagatcaaggcatcaccctgcgtaaattggtccgcggtgccacactggacatagtggatggtatggcccagctgatggaagtgttgagcgttactcctacccagagccccgaaaacaatgacctgatcagctacaactccgtttgggtggcctgccaacaaatgccccagattccaagagacaataaagcggccgccctcctgatgctgacaaaaaatgtggatttcgttaaagacgcgcatgaggagatggagcaggcagtcgaagagtgtgatccctatagcggtcttctcaacgataccgaagagaataattctgataaccacaaccatgaagacgacgtgttaggattcccttccaaccaggacttgtattggagcgaggatgaccaggaactgattatcccttgcttggcactcgtacgcgcctccaaagcctgcctgaaaaaaattcgtatgctcgtcgccgagaacggaaaaaaagatcaggtggctcagcttgatgatattgtcgacatttcggatgaaatctcaccaagcgtcgatgacctggctctgagcatctatccaccaatgtgccatttgactgtcagaatcaactccgctaaactcgtgtctgtcctcaagaaagccttagagatcaccaaggcaagtcacgtcacacctcagccggaagactcgtggatcccccttctgatcaatgctatcgaccactgtatgaaccgcatcaaggaactgacgcagtcggagttggaactttag

SEQ ID NO: 172812 - DNA, 600 bp, Artificial Sequence
  derived and/or modified sequence
atgccccagatcccccgggacaacaaggccgccgccctgctgatgctgacgaagaatgtggacttcgtcaaggatgcacacgaagagatggagcaggcggtagaggaatgcgatccgtattctggcttactgaatgacaccgaggaaaacaactccgataatcataaccacgaagacgatgtcctggggttcccatctaatcaggatttatactggtcagaggacgaccaggaactgattattccctgcctcgccttggtgcgcgcaagtaaggcttgtctcaagaagattcgcatgcttgtcgccgagaacggcaagaaggaccaagttgcccagctggacgatatcgtggacatcagcgacgagatctccccaagtgtcgatgacctagcgctgtctatctatccccccatgtgtcacctcacggtgcgtataaacagcgctaagctggtgagcgtcctgaagaaagccctggagatcacgaaagcatcccacgttaccccccaaccagaggactcctggatccctttgttaatcaacgccattgaccactgtatgaataggattaaagaattgacacagagtgaactcgaactatag

SEQ ID NO: 172813 - DNA, 699 bp, Artificial Sequence
  derived and/or modified sequence
atggcccagctgatggaggtgctgagcgtgacccccacccagagccctgagaacaatgacctgatttcatataacagcgtttgggtggcttgtcaacaaatgccacagatcccccgagacaacaaggctgctgccctcctcatgctgaccaaaaatgttgattttgttaaagatgcccacgaagagatggagcaggctgtcgaggaatgtgatccgtattcaggtctgctgaacgacactgaggagaacaactccgataatcacaaccacgaagatgatgtcttaggctttccctctaatcaagacctttactggtccgaagacgatcaggagctgatcatcccgtgcctagcactcgtgagggcgtccaaagcgtgtttgaaaaagattcgtatgctggtggcggaaaatggaaaaaaagaccaggtcgcccagctggatgacatcgtggatatctctgacgagatctcaccttctgttgatgacctggctctctctatttacccccccatgtgccacctcacagtccgaatcaacagcgccaaactcgtttccgtcctgaagaaggcgctggaaataaccaaggccagccacgtgacgccccagccggaggacagttggatcccgctgcttataaatgctattgatcactgtatgaataggatcaaggagctgacccagtctgaactggaactttag

SEQ ID NO: 172814 - DNA, 1083 bp, Artificial Sequence
  derived and/or modified sequence
atggctagcgcgactgcccctgctgcagcagtacccacactggctagccctctggagcagcttcgtcatttagctgaggaactccgccttctactgcctcgagtgcgcgtaggtgaggcacaagagaccaccgaggaatttaacagagagatgttttggcgtcggctaaatgaggctgcggtgactgtaagccgggaagctaccacacttaccatagtattcagtcaactcccactgccatcacctcaggagacccaaaaattctgtgaacaggtgcacgccgctatcaaagccttcatcgcggtctactacttgttgcctaaagatcagggaattaccctgaggaagcttgtccggggagccacactggatattgtggacggcatggcccagctgatggaagttctaagcgtgacgcccactcagagccccgaaaacaacgacctgatctcttacaatagtgtgtgggtggcctgtcagcagatgccccagatccccagggacaataaagcagctgctctactaatgttaacaaagaacgttgacttcgtcaaggatgcccacgaggaaatggagcaggccgtggaagaatgcgacccctacagcggcttactgaacgacaccgaggaaaacaactctgataatcacaaccatgaagacgacgttctggggttcccgtctaaccaagatctctattggagtgaagacgaccaggagctcatcataccttgccttgccttggtgcgtgcaagtaaagcttgcctgaagaagatccggatgcttgtggcagaaaatggcaagaaagaccaggtcgcacaactagatgacatcgtcgatataagcgacgagattagtccatctgtggacgacctggctcttagcatttaccccccaatgtgccacctgaccgtgagaatcaacagcgctaagctggttagtgtcctgaagaaggccctggagataactaaggcatcacatgtcactcctcaaccagaggattcgtggattccacttctgattaacgctattgaccactgtatgaaccgcattaaggagctgacacaatccgagctggaattgtag

SEQ ID NO: 172815 - DNA, 600 bp, Artificial Sequence
  derived and/or modified sequence
atgccccagatccccagggacaacaaggctgccgcactgctcatgttaaccaaaaacgtcgacttcgtgaaggacgctcatgaagaaatggagcaagccgtggaagagtgtgacccctattcgggtctgctcaatgatactgaagagaacaacagcgacaatcataaccatgaagatgacgtgcttgggttcccatccaaccaagatctttattggtctgaagatgatcaggagcttataattccttgcctcgccctggtgagggcctcaaaagcctgcctgaagaagattagaatgcttgtggccgagaatggaaaaaaggaccaggttgcacagctggatgatatcgtggatatttccgacgagatcagcccctcagttgatgatctggccctgtccatctacccacctatgtgccacctcacagtccggatcaacagcgcaaaactggtcagcgtgcttaaaaaggcactcgagatcaccaaagcgtcacatgtgaccccacaaccagaagattcttggattcctctgctgatcaatgctattgaccattgtatgaaccgcatcaaagagcttactcagagtgaattggaattgtag

SEQ ID NO: 172816 - DNA, 699 bp, Artificial Sequence
  derived and/or modified sequence
atggcccagctgatggaggttcttagtgtgacgccaacgcagagccctgagaacaatgacctaatctcctataattcagtgtgggtggcttgccaacagatgccccagattccacgcgataataaagctgcagccctgctcatgcttacaaagaacgttgactttgtgaaggacgcccacgaggagatggagcaggccgtcgaagagtgcgacccgtacagcggcctactgaacgatacagaggagaataattccgacaatcacaaccacgaggatgacgtgcttggcttcccatctaaccaagatttgtactggagtgaggatgatcaggagctgattattccctgcttggccctggtgcgggcttctaaagcctgtctgaagaaaattcgcatgctagtagccgaaaatggcaagaaagatcaagtggcacagctcgacgatattgtggatattagtgatgagatctcgcccagcgtggacgatctggcactctccatttaccccccaatgtgtcacctcacagttcggataaactctgctaaactggttagtgtgctgaagaaggctctggagatcaccaaagcctctcatgtgacgcctcagcccgaagacagttggattcccctcctcatcaacgcaatagatcactgtatgaacaggatcaaggaactcacgcagtcagaactggaactgtag

SEQ ID NO: 172817 - DNA, 1682 bp, Artificial Sequence
  derived and/or modified sequence
cggggcgggaggaggcggggccaggcctggtctctgataacgggatgggtggtgctggacctcgggcggggccgggcctcgtggcgggaggaggcagggcagggcctctgggacggggctggacggcttgttgacggaaacgagcccttgacgctgtggcccggaagtggagcggctgtcgcagtgcggctccggcagtggcagcggaggcctgtgtttgcggccttcggcaagcgactgagatggcgagcgcaactgcacctgcagccgcagtccccaccctggcttcgcctttggagcagctccggcacttggcggaggagctgcggttgctcctgcctcgagtgcgggtcggcgaagcccaggagaccaccgaggagtttaatcgagagatgttctggagaagactcaatgaggcagctgtgactgtgtcaagggaagccacgactctgaccatagtcttctctcagcttccactgccgtctccacaggaaacccagaagttctgtgaacaagtccatgctgccatcaaggcatttattgcagtgtactatttgcttccaaaggatcaggggatcaccctgagaaagctggtacggggcgccaccctggacatcgtggatggcatggctcagctcatggaagtactttccgtcactccaactcagagccctgagaacaatgaccttatttcctacaacagtgtctgggttgcgtgccagcagatgcctcagataccaagagataacaaagctgcagctcttttgatgctgaccaagaatgtggattttgtgaaggatgcacatgaagaaatggagcaggctgtggaagaatgtgacccttactctggcctcttgaatgatactgaggagaacaactctgacaaccacaatcatgaggatgatgtgttggggtttcccagcaatcaggacttgtattggtcagaggacgatcaagagctcataatcccatgccttgcgctggtgagagcatccaaagcctgcctgaagaaaattcggatgttagtggcagagaatgggaagaaggatcaggtggcacagctggatgacattgtggatatttctgatgaaatcagccctagtgtggatgatttggctctgagcatatatccacctatgtgtcacctgaccgtgcgaatcaattctgcgaaacttgtatctgttttaaagaaggcacttgaaattacaaaagcaagtcatgtgacccctcagccagaagatagttggatccctttacttattaatgccattgatcattgcatgaatagaatcaaggagctcactcagagtgaacttgaattatgacttttcaggctcatttgtactctcttcccctctcatcgtcatggtcaggctctgatacctgcttttaaaatggagctagaatgcttgctggattgaaagggagtgcctatctatatttagcaagagacactattaccaaagattgttggttaggccagattgacacctatttataaaccatatgcgtatatttttctgtgctatatatgaaaaataattgcatgatttctcattcctgagtcatttctcagagattcctaggaaagctgccttattctctttttgcagtaaagtatgttgttttcattgtaaagatgttgatggtctcaataaaatgctaacttgccagtgattaaa

SEQ ID NO: 172818 - DNA, 1385 bp, Artificial Sequence
  derived and/or modified sequence
agtgcggctccggcagtggcagcggaggcctgtgtttgcggccttcggcaagcgactgagatggcgagcgcaactgcacctgcagccgcagtccccaccctggcttcgcctttggagcagctccggcacttggcggaggagctgcggttgctcctgcctcgagtgcgggtcggcgaagcccaggagaccaccgaggagtttaatcgagagatgttctggagaagactcaatgaggcagctgtgactgtgtcaagggaagccacgactctgaccatagtcttctctcagcttccactgccgtctccacaggaaacccagaagttctgtgaacaagtccatgctgccatcaaggcatttattgcagtgtactatttgcttccaaaggatcaggccctgagaacaatgaccttatttcctacaacagtgtctgggttgcgtgccagcagatgcctcagataccaagagataacaaagctgcagctcttttgatgctgaccaagaatgtggattttgtgaaggatgcacatgaagaaatggagcaggctgtggaagaatgtgacccttactctggcctcttgaatgatactgaggagaacaactctgacaaccacaatcatgaggatgatgtgttggggtttcccagcaatcaggacttgtattggtcagaggacgatcaagagctcataatcccatgccttgcgctggtgagagcatccaaagcctgcctgaagaaaattcggatgttagtggcagagaatgggaagaaggatcaggtggcacagctggatgacattgtggatatttctgatgaaatcagccctagtgtggatgatttggctctgagcatatatccacctatgtgtcacctgaccgtgcgaatcaattctgcgaaacttgtatctgttttaaagaaggcacttgaaattacaaaagcaagtcatgtgacccctcagccagaagatagttggatccctttacttattaatgccattgatcattgcatgaatagaatcaaggagctcactcagagtgaacttgaattatgacttttcaggctcatttgtactctcttcccctctcatcgtcatggtcaggctctgatacctgcttttaaaatggagctagaatgcttgctggattgaaagggagtgcctatctatatttagcaagagacactattaccaaagattgttggttaggccagattgacacctatttataaaccatatgcgtatatttttctgtgctatatatgaaaaataattgcatgatttctcattcctgagtcatttctcagagattcctaggaaagctgccttattctctttttgcagtaaagtatgttgttttcattgtaaagatgttgatggtctcaataaaatgct

SEQ ID NO: 172819 - DNA, 2317 bp, Artificial Sequence
  derived and/or modified sequence
tcctcccgctgtcccccacggaggggactgctctcccccgctgcatcctttctgtgaggtaccttacccacctcagcacctgagagggtgaaatagaattctaacctcgacattcgggaagtgtttttgagaagtctcggtcggtaagggaagtcttccaagtccgtgcagcactaacgtattggcacctgcctcctcttcggccaccccccagatgaggcagctgtgactgtgtcaagggaagccacgactctgaccatagtcttctctcagcttccactgccgtctccacaggaaacccagaagttctgtgaacaagtccatgctgccatcaaggcatttattgcagtgtactatttgcttccaaaggatcaggggatcaccctgagaaagctggtacggggcgccaccctggacatcgtggatggcatggctcagctcatggaagtactttccgtcactccaactcagagccctgagaacaatgaccttatttcctacaacagtgtctgggttgcgtgccagcagatgcctcagataccaagagataacaaagctgcagctcttttgatgctgaccaagaatgtggattttgtgaaggatgcacatgaagaaatggagcaggctgtggaagaatgtgacccttactctggcctcttgaatgatactgaggagaacaactctgacaaccacaatcatgaggatgatgtgttggggtttcccagcaatcaggacttgtattggtcagaggacgatcaagagctcataatcccatgccttgcgctggtgagagcatccaaagcctgcctgaagaaaattcggatgttagtggcagagaatgggaagaaggatcaggtggcacagctggatgacattgtggatatttctgatgaaatcagccctagtgtggatgatttggctctgagcatatatccacctatgtgtcacctgaccgtgcgaatcaattctgcgaaacttgtatctgttttaaagaaggcacttgaaattacaaaagcaagtcatgtgacccctcagccagaagatagttggatccctttacttattaatgccattgatcattgcatgaatagaatcaaggagctcactcagagtgaacttgaattatgacttttcaggctcatttgtactctcttcccctctcatcgtcatggtcaggctctgatacctgcttttaaaatggagctagaatgcttgctggattgaaagggagtgcctatctatatttagcaagagacactattaccaaagattgttggttaggccagattgacacctatttataaaccatatgcgtatatttttctgtgctatatatgaaaaataattgcatgatttctcattcctgagtcatttctcagagattcctaggaaagctgccttattctctttttgcagtaaagtatgttgttttcattgtaaagatgttgatggtctcaataaaatgctaacttgccagtgattaaatgagtgcccttccaaagtttctttttaccagaaatacagtggattgagactagaacattgctttcatttgggtttgtaggtttaaaaatctgattctaatcagaagtatatttagaacaaaacactttatttataaaagatgactccaaaattcatcttagtatttcaccatgttatatattattatcagcaagtccttctgaatattatcacagattactccatgtctctaaaatatattggcattgagctcatttgttaggtttgcccaccttattgaacagatttattttccttatacatacttgtgttgtccttggttacgtgtgtccccaaatgtaaataccaaatttttataaatcaaaaattttttagtgtgtaagagattttatgtaattttaagggccttttcagttcatccttttgcaaaaccatcaccacttaattatacttttgcatcagtctagaagactgcatattggaaagcagtgtaaatctataatgatgtatattctggtgagctgaatagggcattatgcatgtcctacaggtctccgccacctctcatgcccatcatcttccttttgtaggtgtaattcataacatatgcctttctgctgtctttaggtataatcagcaacagcagtcattctttgagtgactaatgtatacttggggttggggttgaaattccttaagccaaatgagttttagcttactgttttgaagtgccattttgtattgttaacaagtgtcatgaagggaaggaactaaaatcaaactgacagagtgtcaaggcaacaaaataacataaacaaaataataacattgt

SEQ ID NO: 172820 - DNA, 1083 bp, Artificial Sequence
  derived and/or modified sequence
atggccagcgccaccgcccccgccgccgccgtgcccaccctggccagccccctggagcagctgagacacctggccgaggagctgagactgctgctgcccagagtgagagtgggcgaggcccaggagaccaccgaggagttcaacagagagatgttctggagaagactgaacgaggccgccgtgaccgtgagcagagaggccaccaccctgaccatcgtgttcagccagctgcccctgcccagcccccaggagacccagaagttctgcgagcaggtgcacgccgccatcaaggccttcatcgccgtgtactacctgctgcccaaggaccagggcatcaccctgagaaagctggtgagaggcgccaccctggacatcgtggacggcatggcccagctgatggaggtgctgagcgtgacccccacccagagccccgagaacaacgacctgatcagctacaacagcgtgtgggtggcctgccagcagatgccccagatccccagagacaacaaggccgccgccctgctgatgctgaccaagaacgtggacttcgtgaaggacgcccacgaggagatggagcaggccgtggaggagtgcgacccctacagcggcctgctgaacgacaccgaggagaacaacagcgacaaccacaaccacgaggacgacgtgctgggcttccccagcaaccaggacctgtactggagcgaggacgaccaggagctgatcatcccctgcctggccctggtgagagccagcaaggcctgcctgaagaagatcagaatgctggtggccgagaacggcaagaaggaccaggtggcccagctggacgacatcgtggacatcagcgacgagatcagccccagcgtggacgacctggccctgagcatctacccccccatgtgccacctgaccgtgagaatcaacagcgccaagctggtgagcgtgctgaagaaggccctggagatcaccaaggccagccacgtgaccccccagcccgaggacagctggatccccctgctgatcaacgccatcgaccactgcatgaacagaatcaaggagctgacccagagcgagctggagctgtag

SEQ ID NO: 172821 - DNA, 600 bp, Artificial Sequence
  derived and/or modified sequence
atgccccagatccccagagacaacaaggccgccgccctgctgatgctgaccaagaacgtggacttcgtgaaggacgcccacgaggagatggagcaggccgtggaggagtgcgacccctacagcggcctgctgaacgacaccgaggagaacaacagcgacaaccacaaccacgaggacgacgtgctgggcttccccagcaaccaggacctgtactggagcgaggacgaccaggagctgatcatcccctgcctggccctggtgagagccagcaaggcctgcctgaagaagatcagaatgctggtggccgagaacggcaagaaggaccaggtggcccagctggacgacatcgtggacatcagcgacgagatcagccccagcgtggacgacctggccctgagcatctacccccccatgtgccacctgaccgtgagaatcaacagcgccaagctggtgagcgtgctgaagaaggccctggagatcaccaaggccagccacgtgaccccccagcccgaggacagctggatccccctgctgatcaacgccatcgaccactgcatgaacagaatcaaggagctgacccagagcgagctggagctgtag

SEQ ID NO: 172822 - DNA, 699 bp, Artificial Sequence
  derived and/or modified sequence
atggcccagctgatggaggtgctgagcgtgacccccacccagagccccgagaacaacgacctgatcagctacaacagcgtgtgggtggcctgccagcagatgccccagatccccagagacaacaaggccgccgccctgctgatgctgaccaagaacgtggacttcgtgaaggacgcccacgaggagatggagcaggccgtggaggagtgcgacccctacagcggcctgctgaacgacaccgaggagaacaacagcgacaaccacaaccacgaggacgacgtgctgggcttccccagcaaccaggacctgtactggagcgaggacgaccaggagctgatcatcccctgcctggccctggtgagagccagcaaggcctgcctgaagaagatcagaatgctggtggccgagaacggcaagaaggaccaggtggcccagctggacgacatcgtggacatcagcgacgagatcagccccagcgtggacgacctggccctgagcatctacccccccatgtgccacctgaccgtgagaatcaacagcgccaagctggtgagcgtgctgaagaaggccctggagatcaccaaggccagccacgtgaccccccagcccgaggacagctggatccccctgctgatcaacgccatcgaccactgcatgaacagaatcaaggagctgacccagagcgagctggagctgtag

SEQ ID NO: 172823 - protein, 699 aa, Artificial Sequence
  derived and/or modified sequence
MIPASAKAPHKQPHKQSISIGRGTRKRDEDSGTEVGEGTDEWAQSKATVRPPDQLELTDAELKEEFTRILTANNPHAPQNIVRYSFKEGTYKPIGFVNQLAVHYTQVGNLIPKDSDEGRRQHYRDELVAGSQESVKVISETGNLEEDEEPKELETEPGSQTDVPAAGAAEKVTEEELMTPKQPKERKLTNQFNFSERASQTYNNPVRDRECQTEPPPRTNFSATANQWEIYDAYVEELEKQEKTKEKEKAKTPVAKKSGKMAMRKLTSMESQTDDLIKLSQAAKIMERMVNQNTYDDIAQDFKYYDDAADEYRDQVGTLLPLWKFQNDKAKRLSVTALCWNPKYRDLFAVGYGSYDFMKQSRGMLLLYSLKNPSFPEYMFSSNSGVMCLDIHVDHPYLVAVGHYDGNVAIYNLKKPHSQPSFCSSAKSGKHSDPVWQVKWQKDDMDQNLNFFSVSSDGRIVSWTLVKRKLVHIDVIKLKVEGSTTEVPEGLQLHPVGCGTAFDFHKEIDYMFLVGTEEGKIYKCSKSYSSQFLDTYDAHNMSVDTVSWNPYHTKVFMSCSSDWTVKIWDHTIKTPMFIYDLNSAVGDVAWAPYSSTVFAAVTTDGKAHIFDLAINKYEAICNQPVAAKKNRLTHVQFNLIHPIIIVGDDRGHIISLKLSPNLRKMPKEKKGQEVQKGPAVEIAKLDKLLNLVREVKIKT

SEQ ID NO: 172824 - protein, 289 aa, Artificial Sequence
  derived and/or modified sequence
MIPASAKAPHKQPHKQDEDSGTEVGEGTDEWAQSKATVRPPDQLELTDAELKEEFTRILTANNPHAPQNIVRYSFKEGTYKPIGFVNQLAVHYTQVGNLIPKDSDEGRRQHYRDELVAGSQESVKVISETGNLEEDEEPKELETEPGSQTDVPAAGAAEKVTEEELMTPKQPKERKLTNQFNFSERASQTYNNPVRDRECQTEPPPRTNFSATANQWEIYDAYVEELEKQEKTKEKEKAKTPVAKKSGKMAMRKLTSMESQTDDLIKLSQAAKIMERMVNQNTYDDIAQ

SEQ ID NO: 172825 - DNA, 2100 bp, Artificial Sequence
  derived and/or modified sequence
atgatccctgcaagcgccaaggctccccataaacaaccccacaagcaaagcattagcattggccgtgggacgagaaaacgtgatgaagactctggtacagaggtcggagaaggcacagacgagtgggcacagagtaaggctaccgtccgacccccagaccagctggaactgacagatgccgagctgaaggaggaattcaccagaattcttactgcgaacaaccctcacgctcctcagaatattgtgaggtacagctttaaagagggcacatacaagcctatcggcttcgttaatcaactggcagttcactacacccaagtcggcaaccttattcccaaggattctgatgagggaagacggcaacattatagagatgaactggtagcggggagtcaggaaagtgtaaaggtcattagcgagaccgggaacctggaggaagatgaagagcccaaggagctcgaaaccgaaccaggttcacagacagacgtgcctgccgctggcgctgccgaaaaagtgacagaagaggagcttatgactccaaagcagcccaaggagcgcaagttgaccaaccagttcaatttctccgagcgtgctagtcaaacctataataatccagttcgcgacagggagtgtcagaccgaacccccgcccaggactaacttttcggccaccgcaaaccaatgggagatctacgacgcatacgtggaggagctcgagaagcaggagaagaccaaagaaaaagaaaaggcaaaaactcccgtcgcaaagaagagtggtaagatggccatgaggaagctgacatcaatggaatctcaaacggacgatctcattaagttaagccaggcggcaaagatcatggagcgaatggtcaaccaaaatacttacgacgacattgctcaggactttaaatactacgatgacgccgccgatgagtatcgggatcaggtggggactctcctgccgttgtggaagtttcaaaatgataaagcgaagcgcctgtcggttacggccctgtgctggaaccccaaatacagggacctatttgccgtgggttacggcagttatgatttcatgaaacagtccagaggaatgttgcttctgtattccctcaagaatccttccttccctgaatatatgttttctagcaacagcggggtgatgtgtctggacattcacgtggatcatccttacctggtcgcagtggggcactatgacgggaatgtggccatttacaacttgaagaagccccactcgcaaccatcattctgtagtagtgccaaatcaggcaagcatagtgaccccgtttggcaagtcaagtggcaaaaagatgacatggatcagaacctgaacttcttctctgtctcgtccgatggacgaattgtgtcctggacccttgtgaagcgtaaactggttcatatcgacgtgattaaactcaaggtggaggggtctaccactgaagtgcccgaggggctccagctgcatcccgtggggtgtggcacagccttcgactttcataaggagattgattacatgtttctggtgggtaccgaagaggggaaaatttataagtgctcaaagtcttattcaagtcaatttctggacacctatgatgctcataatatgtccgtggataccgtctcgtggaatccctaccatactaaggttttcatgagttgcagctctgattggaccgtgaagatctgggaccataccatcaagactcccatgttcatatatgatctcaattctgcagtaggcgacgtggcctgggcaccctacagctccaccgtcttcgctgctgttactaccgatgggaaggctcacattttcgaccttgccataaataagtacgaggccatttgcaaccagcccgtagcagccaagaagaatcgccttacacatgtgcagttcaacctgatccaccctattattattgtgggcgatgatagaggccacattatctccctgaaactgagcccaaaccttaggaagatgcctaaggagaagaaagggcaagaggtccagaagggaccggcagtggaaattgccaaactggacaagctgctgaacctggttagggaagttaagataaaaacctag

SEQ ID NO: 172826 - DNA, 2100 bp, Artificial Sequence
  derived and/or modified sequence
atgatcccagccagcgccaaggccccccacaagcagccccacaagcagagcatcagcatcggccggggcaccaggaagagagatgaagattctggaacagaggtgggggagggcacagatgagtgggcccagagcaaggccaccgtgcggcccccagaccagctggagctgacagatgctgagctgaaggaggagttcacccgcatcctgacagccaacaacccccacgccccccagaacatcgtgcgctacagcttcaaggagggcacctacaagcccatcggctttgtgaaccagctggccgtgcactacacccaggtgggcaacctgatccccaaggacagtgatgagggccggcggcagcactacagagatgagctggtggccggcagccaggagagcgtgaaggtgatcagcgagactggaaacctggaggaggatgaggagcccaaggagctggagacagagcccggcagccagacagatgtgcctgctgctggagctgctgagaaggtgacagaggaggagctgatgacccccaagcagcccaaggagaggaagctgaccaaccagttcaacttcagcgagcgggccagccagacctacaacaaccctgtgcgggaccgggagtgccagacagagcccccacccaggaccaacttcagcgccacagccaaccagtgggagatctatgatgcctacgtggaggagctggagaagcaggagaagaccaaggagaaggagaaggccaagacccctgtggccaagaagagcggcaagatggccatgaggaagctgacctccatggagagccagacagatgacctgatcaagctgagccaggccgccaagatcatggagaggatggtgaaccagaacacctatgatgacatcgcccaggacttcaagtactatgatgatgctgctgatgagtacagagaccaggtgggcaccctgctgcccctgtggaagttccagaatgacaaggccaagaggctgtctgtgacagccctgtgctggaaccccaagtacagagacctgtttgctgtgggctacggcagctatgacttcatgaagcagagccggggcatgctgctgctgtacagcctgaagaaccccagcttccctgagtacatgttcagcagcaacagcggcgtgatgtgcctggacatccacgtggaccacccctacctggtggccgtgggccactatgatggaaatgtggccatctacaacctgaagaagccccacagccagcccagcttctgcagcagcgccaagagcggcaagcacagcgaccctgtgtggcaggtgaagtggcagaaggatgacatggaccagaacctgaacttcttctctgtgtccagtgatggccgcatcgtgtcctggaccctggtgaagaggaagctggtgcacattgatgtgatcaagctgaaggtggagggcagcaccacagaggtgcctgagggcctgcagctgcaccctgtgggctgcggcacagcctttgacttccacaaggagattgactacatgttcctggtgggcacagaggagggcaagatctacaagtgcagcaagagctacagcagccagttcctggacacctatgatgcccacaacatgtctgtggacacagtgtcctggaacccctaccacaccaaggtgttcatgagctgcagcagtgactggacagtgaagatctgggaccacaccatcaagacccccatgttcatctatgacctgaacagcgctgtgggagatgtggcctgggccccctacagcagcacagtgtttgctgctgtgaccacagatggcaaggcccacatctttgacctggccatcaacaagtatgaggccatctgcaaccagcctgtggccgccaagaagaaccggctgacccacgtgcagttcaacctgatccaccccatcatcatcgtgggagatgaccggggccacatcatcagcctgaagctgagccccaacctgaggaagatgcccaaggagaagaagggccaggaggtgcagaagggccctgctgtggagatcgccaagctggacaagctgctgaacctggtgcgggaggtgaagatcaagacctag

SEQ ID NO: 172827 - DNA, 2100 bp, Artificial Sequence
  derived and/or modified sequence
atgatccccgccagcgccaaggccccccacaagcagccccacaagcagagcatcagcatcgggagagggacacgtaagagagacgaagattcagggactgaagttggggagggcactgacgaatgggctcagagcaaagcaaccgtgcggccccctgatcagttggaattgaccgacgccgaattgaaagaagaattcacaagaatattgacagctaataatccccacgccccccaaaacatagtccggtactcctttaaggaaggaacttataagcctattggctttgtcaatcagcttgctgtccattacacccaagtggggaacctcattccgaaagattctgatgaaggacgacgacaacattacagagatgagctggtcgccggctcccaagaaagcgtcaaggtcatttctgaaaccggtaacctcgaagaagatgaggaacccaaggaactggagactgagccagggtcacagactgatgttccagcggcaggagccgccgagaaagttaccgaagaggagctgatgacaccgaagcagcctaaggagcggaagctgactaatcagttcaatttttctgaacgggcgtcccagacctacaataaccccgttagagatcgggaatgccaaacagagcctcctcccaggactaacttctctgccactgctaatcaatgggagatctacgacgcgtacgtcgaagagctggagaaacaggaaaaaactaaggaaaaggaaaaggccaaaacgcctgttgccaaaaaatccggcaaaatggctatgaggaagctgacctcaatggagtcccaaacggatgacctgatcaagctttcgcaggccgcgaagataatggaacggatggtcaaccagaacacctatgacgacatcgcgcaggactttaagtactacgatgacgccgctgatgagtacagagaccaggtgggcaccctcctgcccctgtggaaattccaaaacgacaaggcaaaacggctttcagttactgcattgtgctggaaccctaaatatcgagatttgtttgccgtgggctatggatcttatgacttcatgaagcaaagcaggggcatgttgctcctgtattctctgaaaaatccctccttccccgagtacatgtttagctcaaatagcggcgttatgtgtctggacatccatgtagaccatccatacctggttgcagtgggtcattacgatggaaatgtagccatctacaatctgaagaagccgcacagtcaaccctccttttgctcatctgccaagtcagggaagcatagtgaccccgtttggcaggttaagtggcagaaggacgacatggatcagaacctgaacttttttagcgtgtcatctgacggtagaatcgtaagctggacattagtgaagaggaaactggtacatattgacgtaattaagcttaaagtggagggatctaccacagaggtgcccgagggacttcagttgcaccccgttggttgcggcacagctttcgacttccataaggagatcgactacatgttccttgtcggcactgaggaggggaaaatctataagtgctccaagtcctattcatctcagttcctggatacttatgatgctcacaacatgtccgtcgataccgtctcctggaacccttaccacacaaaagtgtttatgagctgttcaagcgattggaccgttaaaatctgggaccacaccatcaagacccccatgttcatatacgacctcaactccgccgtgggcgacgtggcctgggccccttattcttctacagtctttgccgccgtgaccactgatggtaaggcgcacatctttgacttggccataaataagtacgaggctatctgtaatcagcctgtagcagccaagaagaaccggctgacccacgtccagttcaacttgatccaccccataatcattgttggcgatgatcgggggcacatcattagcctgaagttgtcgcctaatctgcgcaaaatgccgaaggaaaagaaaggacaggaggtgcagaagggccctgcagtagaaatagctaaactggacaaactcctgaacctcgtgagggaagtgaaaatcaaaacttag

SEQ ID NO: 172828 - DNA, 2100 bp, Artificial Sequence
  derived and/or modified sequence
atgatacccgctagcgccaaagctccacataagcagccccacaaacagtctatttccatcggtaggggaaccaggaagcgggatgaggattcaggcactgaggtaggcgagggtactgacgagtgggcgcagagcaaggcaaccgtgcgtcctccggatcagctcgagctcacggacgccgagttgaaggaagagttcacacgtatcttgacggctaacaatccacatgcccctcaaaatattgttaggtattcatttaaggaaggaacttataaacctatcggttttgttaaccaactggcagttcactatactcaggtaggaaacctcatccccaaggattctgacgagggacgacggcagcattatagagatgagttggtggctggctcacaggagtccgtcaaagttattagcgagaccggtaatctggaagaggacgaggagcctaaggagctggaaaccgaacctgggagccagaccgatgtcccagccgctggcgctgctgagaaagtgactgaggaggagctaatgaccccaaagcagcccaaagaacgtaaactcactaaccagttcaatttctctgagagagcatcccagacttacaataatccagtacgggacagagagtgccagactgaacccccaccaaggactaacttttctgcaaccgctaatcagtgggaaatctatgacgcctacgtcgaggagctggagaagcaggagaagactaaagagaaggagaaggcaaagactcccgtcgcaaagaaatctgggaaaatggcaatgcgcaagttgaccagcatggagtcacaaactgacgacttgatcaagctgtctcaggccgctaagatcatggaacgcatggtgaaccaaaatacctacgatgatattgctcaggactttaagtactatgacgatgcagctgatgagtatagggatcaagtgggaaccctgctgcctttatggaaatttcagaacgacaaggctaagagactgtctgtcaccgcgctttgctggaaccctaagtacagggatttgtttgctgtcggctatggatcttatgacttcatgaagcaatcccggggaatgttgctgctgtacagcctgaaaaatccaagcttcccagaatatatgttttccagcaactccggtgtcatgtgtctggacatacacgtggatcatccctaccttgtcgctgttggacactatgacggtaacgtcgctatctataatctgaaaaagcctcattcacagcccagtttttgctcctccgctaaatcaggaaaacattccgaccctgtctggcaggttaagtggcaaaaagatgacatggaccaaaacctgaacttcttttctgttagcagcgatggcaggattgtctcttggacactagtcaaaagaaagctagttcatatcgacgtaattaagctcaaggtggagggctcaacaactgaagtacccgaggggctccagttgcaccccgtgggctgcggcacggcatttgattttcataaggaaattgattatatgtttttggttggcaccgaagagggtaaaatctataagtgctctaaaagttattcttcccagtttttggatacttacgatgcccataatatgagcgtggataccgtctcatggaacccttaccatacaaaagtctttatgtcatgctcctctgattggaccgttaaaatatgggatcacacaattaagacacctatgttcatttacgacctaaatagcgctgtcggggacgtggcctgggctccctactcctcaactgtgttcgccgctgtgaccaccgatggaaaggcccacattttcgatctggctatcaataaatacgaggcaatctgtaatcagccagtggcagccaaaaagaatcggcttacgcacgtgcagttcaatctgatccatccaatcattatcgtcggggatgacagggggcacataatctctctgaaactgagtccgaacctacggaaaatgcccaaagagaaaaagggtcaagaggtgcaaaagggtccggcagttgaaatagcaaagctggacaagctgcttaacctcgtcagggaggttaagattaaaacctag

SEQ ID NO: 172829 - DNA, 2100 bp, Artificial Sequence
  derived and/or modified sequence
atgatccccgccagcgccaaggccccccacaagcagccccacaagcagagcatcagcatcggcagaggcaccagaaagagagacgaggacagcggcaccgaggtgggcgagggcaccgacgagtgggcccagagcaaggccaccgtgagaccccccgaccagctggagctgaccgacgccgagctgaaggaggagttcaccagaatcctgaccgccaacaacccccacgccccccagaacatcgtgagatacagcttcaaggagggcacctacaagcccatcggcttcgtgaaccagctggccgtgcactacacccaggtgggcaacctgatccccaaggacagcgacgagggcagaagacagcactacagagacgagctggtggccggcagccaggagagcgtgaaggtgatcagcgagaccggcaacctggaggaggacgaggagcccaaggagctggagaccgagcccggcagccagaccgacgtgcccgccgccggcgccgccgagaaggtgaccgaggaggagctgatgacccccaagcagcccaaggagagaaagctgaccaaccagttcaacttcagcgagagagccagccagacctacaacaaccccgtgagagacagagagtgccagaccgagcccccccccagaaccaacttcagcgccaccgccaaccagtgggagatctacgacgcctacgtggaggagctggagaagcaggagaagaccaaggagaaggagaaggccaagacccccgtggccaagaagagcggcaagatggccatgagaaagctgaccagcatggagagccagaccgacgacctgatcaagctgagccaggccgccaagatcatggagagaatggtgaaccagaacacctacgacgacatcgcccaggacttcaagtactacgacgacgccgccgacgagtacagagaccaggtgggcaccctgctgcccctgtggaagttccagaacgacaaggccaagagactgagcgtgaccgccctgtgctggaaccccaagtacagagacctgttcgccgtgggctacggcagctacgacttcatgaagcagagcagaggcatgctgctgctgtacagcctgaagaaccccagcttccccgagtacatgttcagcagcaacagcggcgtgatgtgcctggacatccacgtggaccacccctacctggtggccgtgggccactacgacggcaacgtggccatctacaacctgaagaagccccacagccagcccagcttctgcagcagcgccaagagcggcaagcacagcgaccccgtgtggcaggtgaagtggcagaaggacgacatggaccagaacctgaacttcttcagcgtgagcagcgacggcagaatcgtgagctggaccctggtgaagagaaagctggtgcacatcgacgtgatcaagctgaaggtggagggcagcaccaccgaggtgcccgagggcctgcagctgcaccccgtgggctgcggcaccgccttcgacttccacaaggagatcgactacatgttcctggtgggcaccgaggagggcaagatctacaagtgcagcaagagctacagcagccagttcctggacacctacgacgcccacaacatgagcgtggacaccgtgagctggaacccctaccacaccaaggtgttcatgagctgcagcagcgactggaccgtgaagatctgggaccacaccatcaagacccccatgttcatctacgacctgaacagcgccgtgggcgacgtggcctgggccccctacagcagcaccgtgttcgccgccgtgaccaccgacggcaaggcccacatcttcgacctggccatcaacaagtacgaggccatctgcaaccagcccgtggccgccaagaagaacagactgacccacgtgcagttcaacctgatccaccccatcatcatcgtgggcgacgacagaggccacatcatcagcctgaagctgagccccaacctgagaaagatgcccaaggagaagaagggccaggaggtgcagaagggccccgccgtggagatcgccaagctggacaagctgctgaacctggtgagagaggtgaagatcaagacctag

SEQ ID NO: 172830 - DNA, 2499 bp, Artificial Sequence
  derived and/or modified sequence
attctatcctgcaagggcacggggacccacaacgacggctgtccctaaagaaccgttgcgactggtaactgaagtggaagagagtccagatttcttgtgtgtggtcaaggagacggacaaactttttgtcttcagacgagggagcgttttgtaggctctccaggggttgagatgattcctgcttctgcgaaggctccccataaacagcctcataagcagagcatcagcataggcagaggaaccaggaagagagatgaagattcagggactgaagtgggagaaggcacagatgaatgggcccaatccaaagccacagttagaccccctgaccagctggagttgaccgatgcggagttaaaggaggagttcactcggattttgacagccaacaacccacacgcaccccagaacattgtcaggtacagcttcaaagaaggcacatataagcctattggctttgtgaaccaactggcagttcactacacccaggttgggaacctgatccccaaagactcagatgaaggacggcggcagcattaccgcgatgaattagtggcaggttctcaggagtctgtcaaggtgatttcagaaacaggaaacctcgaagaagacgaagagcccaaggagttagaaactgagcctgggagtcaaacagatgtgcctgcagctggggcagctgaaaaagtgactgaagaagaattgatgactcctaagcagcccaaggagagaaagctcactaaccagttcaacttcagtgagagggcctcacagacctacaacaaccctgtccgggatcgagaatgccagacggagcctcctcccaggacaaacttttcagccacagccaatcagtgggagatctatgatgcctatgtagaggaacttgagaagcaggaaaagaccaaagagaaggagaaggcaaagaccccagtggctaaaaaatcagggaagatggccatgaggaagctgacatctatggagtctcagactgatgatctcatcaaattgtcccaagctgctaagatcatggagcggatggtcaaccagaatacatatgatgacattgctcaagattttaagtactatgacgatgctgctgatgaataccgggaccaggtgggtaccctgctgccgctctggaagttccaaaatgacaaagccaagcgcctgtccgtcactgccctctgctggaatccaaagtacagggatctgtttgcagtgggatatggctcttatgacttcatgaagcagagccggggcatgctgctgctctacagcctgaagaaccccagcttccctgagtacatgttcagcagcaacagcggcgtcatgtgtctcgacatccacgtggaccacccctacctggtggcagtaggccactatgacggcaacgtggccatttacaacctcaagaagccccactcccagccctccttctgcagctcagccaagtctggcaagcactcagaccctgtgtggcaggtcaagtggcagaaggatgacatggaccaaaaccttaacttcttctctgtgtcatctgacggcaggattgtgtcttggactctcgtgaagagaaagctggttcacatagatgtcatcaagctgaaggtggaaggcagcaccacggaagttcctgaggggttgcagctgcacccagtgggttgtggcactgcctttgacttccacaaagagattgactacatgttcctagtgggcacagaggagggaaaaatctacaagtgctctaaatcctactccagccaattcctcgacacctatgacgcccacaacatgtcagtggacactgtgtcctggaacccataccacaccaaggtcttcatgtcctgcagctccgactggacagtgaagatctgggaccacaccatcaagaccccgatgttcatctatgacctgaactcagccgtgggtgatgtggcctgggcgccatactcttctactgtgttcgcagcagtcaccacagatgggaaggcccacatatttgacttagccatcaacaagtatgaggccatctgcaaccagcctgtggcggccaaaaagaacaggctcacccacgtgcagttcaatctcatccaccccatcatcattgtgggcgatgaccgtgggcacatcatcagcctcaagctctcacccaatttgcgcaagatgccaaaggaaaagaaggggcaggaggtgcagaagggtccagctgtggagattgcgaaactggacaaactgctgaacctggtgagggaagtgaaaatcaagacctgaggggctggcctcagtctctgtcccatcgcttgaatacagtactcctagggcttgaccctggtacccagcccagccttagcacccagcatgtgaccccactcctgatcaggtcccagcatcttcccttcttgttctgttccttaaggtcccagcaccttaccccaggacttggtcttcaaccaccattacccctctaactttgcacaaataaacctgtgtagaaaccca

SEQ ID NO: 172831 - DNA, 2337 bp, Artificial Sequence
  derived and/or modified sequence
ggtaaccgcgtcagggagttggattctatcctgcaagggcacggggacccacaacgacggctgtccctaaagaaccgttgcgactggtaactgaagtggaagagagtccagatttcttgtgtgtggtcaaggagacggacaaactttttgtcttcagacgagggagcgttttgtaggctctccaggggttgagatgattcctgcttctgcgaaggctccccataaacagcctcataagcagagcatcagcataggcagaggaaccaggaagagagatgaagattcagggactgaagtgggagaaggcacagatgaatgggcccaatccaaagccacagttagaccccctgaccagctggagttgaccgatgcggagttaaaggaggagttcactcggattttgacagccaacaacccacacgcaccccagaacattgtcaggtacagcttcaaagaaggcacatataagcctattggctttgtgaaccaactggcagttcactacacccaggttgggaacctgatccccaaagactcagatgaaggacggcggcagcattaccgcgatgaattagtggcaggttctcaggagtctgtcaaggtgatttcagaaacaggaaacctcgaagaagacgaagagcccaaggagttagaaactgagcctgggagtcaaacagatgtgcctgcagctggggcagctgaaaaagtgactgaagaagaattgatgactcctaagcagcccaaggagagaaagctcactaaccagttcaacttcagtgagagggcctcacagacctacaacaaccctgtccgggatcgagaatgccagacggagcctcctcccaggacaaacttttcagccacagccaatcagtgggagatctatgatgcctatgtagaggaacttgagaagcaggaaaagaccaaagagaaggagaaggcaaagaccccagtggctaaaaaatcagggaagatggccatgaggaagctgacatctatggagtctcagactgatgatctcatcaaattgtcccaagctgctaagatcatggagcggatggtcaaccagaatacatatgatgacattgctcaagattttaagtactatgacgatgctgctgatgaataccgggaccaggtgggtaccctgctgccgctctggaagttccaaaatgacaaagccaagcgcctgtccgtcactgccctctgctggaatccaaagtacagggatctgtttgcagtgggatatggctcttatgacttcatgaagcagagccggggcatgctgctgctctacagcctgaagaaccccagcttccctgagtacatgttcagcagcaacagcggcgtcatgtgtctcgacatccacgtggaccacccctacctggtggcagtaggccactatgacggcaacgtggccatttacaacctcaagaagccccactcccagccctccttctgcagctcagccaagtctggcaagcactcagaccctgtgtggcaggtcaagtggcagaaggatgacatggaccaaaaccttaacttcttctctgtgtcatctgacggcaggattgtgtcttggactctcgtgaagagaaagctggttcacatagatgtcatcaagctgaaggtggaaggcagcaccacggaagttcctgaggggttgcagctgcacccagtgggttgtggcactgcctttgacttccacaaagagattgactacatgttcctagtgggcacagaggagggaaaaatctacaagtgctctaaatcctactccagccaattcctcgacacctatgacgcccacaacatgtcagtggacactgtgtcctggaacccataccacaccaaggtcttcatgtcctgcagctccgactggacagtgaagatctgggaccacaccatcaagaccccgatgttcatctatgacctgaactcagccgtgggtgatgtggcctgggcgccatactcttctactgtgttcgcagcagtcaccacagatgggaaggaaaagaaggggcaggaggtgcagaagggtccagctgtggagattgcgaaactggacaaactgctgaacctggtgagggaagtgaaaatcaagacctgaggggctggcctcagtctctgtcccatcgcttgaatacagtactcctagggcttgaccctggtacccagcccagccttagcacccagcatgtgaccccactcctgatcaggtcccagcatcttcccttcttgttctgttccttaaggtcccagcaccttaccccaggacttggtcttcaaccaccattacccctctaactttgcacaaataaacctgtgtagaaaccc

SEQ ID NO: 172832 - DNA, 2487 bp, Artificial Sequence
  derived and/or modified sequence
ggtaaccgcgtcagggagttggattctatcctgcaagggcacggggacccacaacgacggctgtccctaaagaaccgttgcgactggtaactgaagtggaagagagtccagatttcttgtgtgtggtcaaggagacggacaaactttttgtcttcagacgagggagcgttttgtaggctctccaggggttgagatgattcctgcttctgcgaaggctccccataaacagcctcataagcaggatgaagattcagggactgaagtgggagaaggcacagatgaatgggcccaatccaaagccacagttagaccccctgaccagctggagttgaccgatgcggagttaaaggaggagttcactcggattttgacagccaacaacccacacgcaccccagaacattgtcaggtacagcttcaaagaaggcacatataagcctattggctttgtgaaccaactggcagttcactacacccaggttgggaacctgatccccaaagactcagatgaaggacggcggcagcattaccgcgatgaattagtggcaggttctcaggagtctgtcaaggtgatttcagaaacaggaaacctcgaagaagacgaagagcccaaggagttagaaactgagcctgggagtcaaacagatgtgcctgcagctggggcagctgaaaaagtgactgaagaagaattgatgactcctaagcagcccaaggagagaaagctcactaaccagttcaacttcagtgagagggcctcacagacctacaacaaccctgtccgggatcgagaatgccagacggagcctcctcccaggacaaacttttcagccacagccaatcagtgggagatctatgatgcctatgtagaggaacttgagaagcaggaaaagaccaaagagaaggagaaggcaaagaccccagtggctaaaaaatcagggaagatggccatgaggaagctgacatctatggagtctcagactgatgatctcatcaaattgtcccaagctgctaagatcatggagcggatggtcaaccagaatacatatgatgacattgctcaagattttaagtactatgacgatgctgctgatgaataccgggaccaggtgggtaccctgctgccgctctggaagttccaaaatgacaaagccaagcgcctgtccgtcactgccctctgctggaatccaaagtacagggatctgtttgcagtgggatatggctcttatgacttcatgaagcagagccggggcatgctgctgctctacagcctgaagaaccccagcttccctgagtacatgttcagcagcaacagcggcgtcatgtgtctcgacatccacgtggaccacccctacctggtggcagtaggccactatgacggcaacgtggccatttacaacctcaagaagccccactcccagccctccttctgcagctcagccaagtctggcaagcactcagaccctgtgtggcaggtcaagtggcagaaggatgacatggaccaaaaccttaacttcttctctgtgtcatctgacggcaggattgtgtcttggactctcgtgaagagaaagctggttcacatagatgtcatcaagctgaaggtggaaggcagcaccacggaagttcctgaggggttgcagctgcacccagtgggttgtggcactgcctttgacttccacaaagagattgactacatgttcctagtgggcacagaggagggaaaaatctacaagtgctctaaatcctactccagccaattcctcgacacctatgacgcccacaacatgtcagtggacactgtgtcctggaacccataccacaccaaggtcttcatgtcctgcagctccgactggacagtgaagatctgggaccacaccatcaagaccccgatgttcatctatgacctgaactcagccgtgggtgatgtggcctgggcgccatactcttctactgtgttcgcagcagtcaccacagatgggaaggcccacatatttgacttagccatcaacaagtatgaggccatctgcaaccagcctgtggcggccaaaaagaacaggctcacccacgtgcagttcaatctcatccaccccatcatcattgtgggcgatgaccgtgggcacatcatcagcctcaagctctcacccaatttgcgcaagatgccaaaggaaaagaaggggcaggaggtgcagaagggtccagctgtggagattgcgaaactggacaaactgctgaacctggtgagggaagtgaaaatcaagacctgaggggctggcctcagtctctgtcccatcgcttgaatacagtactcctagggcttgaccctggtacccagcccagccttagcacccagcatgtgaccccactcctgatcaggtcccagcatcttcccttcttgttctgttccttaaggtcccagcaccttaccccaggacttggtcttcaaccaccattacccctctaactttgcacaaataaacctgtgtagaaaccc

SEQ ID NO: 172833 - protein, 212 aa, Artificial Sequence
  derived and/or modified sequence
MAARRGALIVLEGVDRAGKSTQSRKLVEALCAAGHRAELLRFPERSTEIGKLLSSYLQKKSDVEDHSVHLLFSANRWEQVPLIKEKLSQGVTLVVDRYAFSGVAFTGAKENFSLDWCKQPDVGLPKPDLVLFLQLQLADAAKRGAFGHERYENGAFQERALRCFHQLMKDTTLNWKMVDASKSIEAVHEDIRVLSEDAIRTATEKPLGELWK

SEQ ID NO: 172834 - DNA, 639 bp, Artificial Sequence
  derived and/or modified sequence
atggctgcgagacggggtgcactcatagttctggaaggtgtggacagagcagggaagtcaacacaatcaaggaaacttgtggaggccttgtgtgcggctgggcaccgagcagagttgctcaggtttccagaacgctctactgagatcggaaagctgttgtcgagctacttacagaagaagtccgacgtggaagaccactcagtgcacttgctcttttcggcaaacaggtgggaacaggtccccctgatcaaggaaaaactgtcacagggcgtcactctggttgtggacaggtatgccttctcaggggttgccttcaccggggcaaaggaaaatttctcacttgattggtgcaagcagcccgacgttggactgccgaaaccagacctggtgctctttttgcagctgcagctagctgacgccgcgaagcgtggagccttcgggcacgagcggtatgaaaatggcgccttccaggagcgggctctgcgctgcttccatcagctgatgaaagacaccactctgaactggaaaatggtggacgcctccaagagcatagaagccgtccacgaagatatccgggtccttagcgaagacgcaatccgaacggcaaccgagaagccactcggggagttgtggaaatag

SEQ ID NO: 172835 - DNA, 639 bp, Artificial Sequence
  derived and/or modified sequence
atggccgcccggcggggggccctgattgtgctggagggcgtggacagagctgggaagagcacccagagcaggaagctggtggaggccctgtgtgccgccggccacagagctgagctgctgcgcttccctgagaggagcacagaaattggcaagctgctgagcagctacctgcagaagaagagtgatgtggaggaccacagcgtgcacctgctcttcagcgccaaccgctgggagcaggtgcccctcatcaaggagaagctgagccagggcgtgaccctggtggtggacagatatgccttctctggagtggccttcaccggggccaaggagaacttcagcctggactggtgcaagcagccagatgtgggcctgcccaagccagacctggtgctcttcctgcagctgcagctggctgatgctgccaagagaggagccttcggccacgagagatatgaaaatggagccttccaggagcgggccctgcgctgcttccaccagctgatgaaggacaccaccctgaactggaagatggtggatgccagcaagagcattgaggccgtgcatgaggacatccgggtgctgtctgaagatgccatcagaacagccacagagaagcccctgggggagctgtggaagtag

SEQ ID NO: 172836 - DNA, 639 bp, Artificial Sequence
  derived and/or modified sequence
atggccgcccggcggggcgccctgatcgtgctggagggcgtggacagggccggcaaatccacacagtcacggaaacttgtggaggctctgtgtgctgctggtcaccgcgccgagctcctgaggtttcctgagcggagcacagagatcgggaagctcctctcaagctatctgcagaaaaagagtgatgttgaggatcacagtgtgcacctgcttttttccgcaaacaggtgggaacaagtccctctgattaaggaaaaacttagccagggcgttactctggtggtagacaggtatgccttcagcggcgtcgccttcacaggcgccaaggaaaatttctcactcgactggtgcaaacagccagacgtgggtcttccaaaacctgaccttgtactgttcctgcaactgcagcttgctgacgccgccaaaagaggggctttcgggcacgaaagatacgagaatggggcattccaggagagagcgctgaggtgttttcaccagttgatgaaggacacaacattgaactggaaaatggtcgacgcaagcaaaagcattgaggctgtgcacgaagatatccgcgtgctgtctgaagacgctatccgaacagctaccgagaaaccgctcggtgaattgtggaagtag

SEQ ID NO: 172837 - DNA, 639 bp, Artificial Sequence
  derived and/or modified sequence
atggcggctcgaaggggggctcttatagtactggagggcgttgaccgagcgggaaagtcaacacagtctcgaaaacttgttgaggccttatgtgccgctggtcatagggctgagctcctccgcttcccagaacgctctacagagattgggaagctgctaagcagctacctccagaaaaaatcggacgtcgaggaccattccgtgcacctccttttttcagcaaacaggtgggaacaggtgcctcttattaaagaaaaattaagtcaaggcgtgacactggtggtggaccgttacgcgttttcaggggtggcgttcacaggcgcaaaagagaacttctcccttgattggtgcaagcagcccgacgtcggcttgcctaagcctgacctggtgctcttcctgcagctgcagttggctgacgcggctaaacgaggtgcttttggccacgaaagatatgaaaatggcgcatttcaggagcgtgcgctgcggtgttttcaccagctcatgaaagacacaacgctgaactggaaaatggtcgacgcatccaaatccattgaggcagttcatgaggacatcagagtcttgagcgaggacgccattcggaccgcgacagaaaagcctcttggtgagctatggaaatag

SEQ ID NO: 172838 - DNA, 1232 bp, Artificial Sequence
  derived and/or modified sequence
aggacacggctccagtggcggcgcggcccagggcgcaggcgcgggtgtcggtcccaccgcgcgtcgtcctcgccccggccccggccaatcccttcgaatttggccgaggccgggaaatactagctaatcacggcgcgcgctgttgacgccggccaatgggagctccggaaggctgcgtggagacgccagcggcgggcggtggacagtcatggcggcccggcgcggggctctcatagtgctggagggcgtggaccgcgccgggaagagcacgcagagccgcaagctggtggaagcgctgtgcgccgcgggccaccgcgccgaactgctccggttcccggaaagatcaactgaaatcggcaaacttctgagttcctacttgcaaaagaaaagtgacgtggaggatcactcggtgcacctgcttttttctgcaaatcgctgggaacaagtgccgttaattaaggaaaagttgagccagggcgtgaccctcgtcgtggacagatacgcattttctggtgtggccttcaccggtgccaaggagaatttttccctagattggtgtaaacagccagacgtgggccttcccaaacccgacctggtcctgttcctccagttacagctggcggatgctgccaagcggggagcgtttggccatgagcgctatgagaacggggctttccaggagcgggcgctccggtgtttccaccagctcatgaaagacacgactttgaactggaagatggtggatgcttccaaaagcatcgaagctgtccatgaggacatccgcgtgctctctgaggacgccatccgcactgccacagagaagccgctgggggagctatggaagtgacccaaggctgcccactggagacgcctctccctgcagtcccccgagaggtgggagactcgcggaaggccccgtccccagcagagtccagaccccacaacttcaggagctctttcccggcagcagagatctgcaggctgcctcttctgccccggagctggggtgcactggggacccccgtggtggggaccttggcagtgtggacatgagcagagcgatggagcagtctcctgccctctcccctgtcctgatggcactctgttgtattttcttactgaagttcagtgataactctgagcagtttcattgtgatcactgtaaatggtaatcagttggaattctcctaaatgtcttccagacactagtaaaaaacgacctgaaaattgtt

SEQ ID NO: 172839 - DNA, 639 bp, Artificial Sequence
  derived and/or modified sequence
atggccgccagaagaggcgccctgatcgtgctggagggcgtggacagagccggcaagagcacccagagcagaaagctggtggaggccctgtgcgccgccggccacagagccgagctgctgagattccccgagagaagcaccgagatcggcaagctgctgagcagctacctgcagaagaagagcgacgtggaggaccacagcgtgcacctgctgttcagcgccaacagatgggagcaggtgcccctgatcaaggagaagctgagccagggcgtgaccctggtggtggacagatacgccttcagcggcgtggccttcaccggcgccaaggagaacttcagcctggactggtgcaagcagcccgacgtgggcctgcccaagcccgacctggtgctgttcctgcagctgcagctggccgacgccgccaagagaggcgccttcggccacgagagatacgagaacggcgccttccaggagagagccctgagatgcttccaccagctgatgaaggacaccaccctgaactggaagatggtggacgccagcaagagcatcgaggccgtgcacgaggacatcagagtgctgagcgaggacgccatcagaaccgccaccgagaagcccctgggcgagctgtggaagtag

SEQ ID NO: 172840 - protein, 859 aa, Artificial Sequence
  derived and/or modified sequence
MYSGAGPALAPPAPPPPIQGYAFKPPPRPDFGTSGRTIKLQANFFEMDIPKIDIYHYELDIKPEKCPRRVNREIVEHMVQHFKTQIFGDRKPVFDGRKNLYTAMPLPIGRDKVELEVTLPGEGKDRIFKVSIKWVSCVSLQALHDALSGRLPSVPFETIQALDVVMRHLPSMRYTPVGRSFFTASEGCSNPLGGGREVWFGFHQSVRPSLWKMMLNIDVSATAFYKAQPVIEFVCEVLDFKSIEEQQKPLTDSQRVKFTKEIKGLKVEITHCGQMKRKYRVCNVTRRPASHQTFPLQQESGQTVECTVAQYFKDRHKLVLRYPHLPCLQVGQEQKHTYLPLEVCNIVAGQRCIKKLTDNQTSTMIRATARSAPDRQEEISKLMRSASFNTDPYVREFGIMVKDEMTDVTGRVLQPPSILYGGRNKAIATPVQGVWDMRNKQFHTGIEIKVWAIACFAPQRQCTEVHLKSFTEQLRKISRDAGMPIQGQPCFCKYAQGADSVEPMFRHLKNTYAGLQLVVVILPGKTPVYAEVKRVGDTVLGMATQCVQMKNVQRTTPQTLSNLCLKINVKLGGVNNILLPQGRPPVFQQPVIFLGADVTHPPAGDGKKPSIAAVVGSMDAHPNRYCATVRVQQHRQEIIQDLAAMVRELLIQFYKSTRFKPTRIIFYRDGVSEGQFQQVLHHELLAIREACIKLEKDYQPGITFIVVQKRHHTRLFCTDKNERVGKSGNIPAGTTVDTKITHPTEFDFYLCSHAGIQGTSRPSHYHVLWDDNRFSSDELQILTYQLCHTYVRCTRSVSIPAPAYYAHLVAFRARYHLVDKEHDSAEGSHTSGQSNGRDHQALAKAVQVHQDTLRTMYFA

SEQ ID NO: 172841 - DNA, 2580 bp, Artificial Sequence
  derived and/or modified sequence
atgtacagcggcgccggccccgccctggccccccccgccccccccccccccatccagggctacgccttcaagcccccccccagacccgacttcggcaccagcggcagaaccatcaagctgcaggccaacttcttcgagatggacatccccaagatcgacatctaccactacgagctggacatcaagcccgagaagtgccccagaagagtgaacagagagatcgtggagcacatggtgcagcacttcaagacccagatcttcggcgacagaaagcccgtgttcgacggcagaaagaacctgtacaccgccatgcccctgcccatcggcagagacaaggtggagctggaggtgaccctgcccggcgagggcaaggacagaatcttcaaggtgagcatcaagtgggtgagctgcgtgagcctgcaggccctgcacgacgccctgagcggcagactgcccagcgtgcccttcgagaccatccaggccctggacgtggtgatgagacacctgcccagcatgagatacacccccgtgggcagaagcttcttcaccgccagcgagggctgcagcaaccccctgggcggcggcagagaggtgtggttcggcttccaccagagcgtgagacccagcctgtggaagatgatgctgaacatcgacgtgagcgccaccgccttctacaaggcccagcccgtgatcgagttcgtgtgcgaggtgctggacttcaagagcatcgaggagcagcagaagcccctgaccgacagccagagagtgaagttcaccaaggagatcaagggcctgaaggtggagatcacccactgcggccagatgaagagaaagtacagagtgtgcaacgtgaccagaagacccgccagccaccagaccttccccctgcagcaggagagcggccagaccgtggagtgcaccgtggcccagtacttcaaggacagacacaagctggtgctgagatacccccacctgccctgcctgcaggtgggccaggagcagaagcacacctacctgcccctggaggtgtgcaacatcgtggccggccagagatgcatcaagaagctgaccgacaaccagaccagcaccatgatcagagccaccgccagaagcgcccccgacagacaggaggagatcagcaagctgatgagaagcgccagcttcaacaccgacccctacgtgagagagttcggcatcatggtgaaggacgagatgaccgacgtgaccggcagagtgctgcagccccccagcatcctgtacggcggcagaaacaaggccatcgccacccccgtgcagggcgtgtgggacatgagaaacaagcagttccacaccggcatcgagatcaaggtgtgggccatcgcctgcttcgccccccagagacagtgcaccgaggtgcacctgaagagcttcaccgagcagctgagaaagatcagcagagacgccggcatgcccatccagggccagccctgcttctgcaagtacgcccagggcgccgacagcgtggagcccatgttcagacacctgaagaacacctacgccggcctgcagctggtggtggtgatcctgcccggcaagacccccgtgtacgccgaggtgaagagagtgggcgacaccgtgctgggcatggccacccagtgcgtgcagatgaagaacgtgcagagaaccaccccccagaccctgagcaacctgtgcctgaagatcaacgtgaagctgggcggcgtgaacaacatcctgctgccccagggcagaccccccgtgttccagcagcccgtgatcttcctgggcgccgacgtgacccacccccccgccggcgacggcaagaagcccagcatcgccgccgtggtgggcagcatggacgcccaccccaacagatactgcgccaccgtgagagtgcagcagcacagacaggagatcatccaggacctggccgccatggtgagagagctgctgatccagttctacaagagcaccagattcaagcccaccagaatcatcttctacagagacggcgtgagcgagggccagttccagcaggtgctgcaccacgagctgctggccatcagagaggcctgcatcaagctggagaaggactaccagcccggcatcaccttcatcgtggtgcagaagagacaccacaccagactgttctgcaccgacaagaacgagagagtgggcaagagcggcaacatccccgccggcaccaccgtggacaccaagatcacccaccccaccgagttcgacttctacctgtgcagccacgccggcatccagggcaccagcagacccagccactaccacgtgctgtgggacgacaacagattcagcagcgacgagctgcagatcctgacctaccagctgtgccacacctacgtgagatgcaccagaagcgtgagcatccccgcccccgcctactacgcccacctggtggccttcagagccagataccacctggtggacaaggagcacgacagcgccgagggcagccacaccagcggccagagcaacggcagagaccaccaggccctggccaaggccgtgcaggtgcaccaggacaccctgagaaccatgtacttcgcctag

SEQ ID NO: 172842 - DNA, 2580 bp, Artificial Sequence
  derived and/or modified sequence
atgtactccggtgcagggcctgctcttgccccacctgctcccccaccccccatccagggctatgcttttaagccaccaccccgccctgattttggcacatctggcagaacaatcaagttgcaggccaatttcttcgaaatggatattcctaagatagatatctaccattacgagcttgatatcaaacccgagaagtgcccaagacgcgttaatcgagaaatagtggaacacatggtccaacatttcaagactcaaatttttggtgaccgaaaacccgtgtttgacggccgaaagaacttgtataccgccatgccattgccaatcggcagggataaagtcgaactagaagtgaccctccctggcgaggggaaggatcggatcttcaaggtgtccattaagtgggtgtcatgtgtgagccttcaggctctacatgatgctttgagtggccgtctccctagcgtgcccttcgagacaatccaggccctggatgtggttatgcgtcacttgccctccatgcgatatactcccgtgggaagatcttttttcaccgctagcgaaggctgctcgaatcccctaggcggtggccgggaggtgtggtttgggttccaccaatctgtgagaccctcgctgtggaagatgatgcttaacatcgacgtctctgcaactgccttctataaggcccagcctgtcattgaatttgtgtgtgaggtgttggattttaagtcaattgaggaacaacagaagccactgacggatagccagcgcgtgaagtttaccaaggaaataaaggggctaaaggtggagattacccactgtgggcaaatgaaaagaaaataccgagtatgcaatgttacccggaggcctgcctcccatcaaacatttcctctgcagcaggaaagcggccaaacggtagaatgtactgttgcccaatactttaaagacagacataaactcgtgctccgataccctcacctgccgtgccttcaggtgggtcaggaacagaaacatacctacctccctctcgaggtgtgcaacatcgtcgcagggcaacgatgtatcaagaaacttaccgataaccagacatctactatgatccgggctacggcccgcagcgcacccgatagacaggaggagattagcaaattgatgagatcggcctcttttaacactgacccttacgtgcgggaattcgggataatggtcaaggacgagatgactgatgtgaccgggagggtgctgcagcccccatctatcttgtacggggggagaaataaggccatcgctacacccgtccagggagtgtgggatatgaggaataaacagttccatacggggattgagattaaagtctgggcgatcgcctgcttcgcccctcagcgtcaatgcactgaggtccacctgaagtccttcaccgagcagcttaggaagatctctcgggacgcgggtatgcccatccagggtcaaccttgtttctgcaagtacgctcagggggcagatagtgtggaacccatgttccgtcacctgaaaaatacctacgcgggtctccagttggtggtcgttatcctgccaggcaaaactcccgtgtacgccgaggttaagcgtgttggcgatacagtcctggggatggctactcagtgtgtccagatgaagaatgtccaacgcacaactccacagaccttgtccaacctctgccttaagattaacgtgaagcttggcggagtaaacaatatcctgctgccccagggtcgacctcccgtgtttcagcaacccgttatatttttgggagctgatgtcacacaccctcccgcaggggacggcaagaaaccttccattgccgcggtggtcggctcaatggatgcccatccgaaccgctactgcgccacagtgagagtccaacagcaccgccaagagattattcaggacctggcggccatggtgagggagctgctgatacagttctacaaatccaccaggttcaaacctacacgtatcatcttttatcgagatggcgtctccgagggccagttccagcaggtgttgcatcatgaactgctggccatcagagaagcatgcataaagctggaaaaggactaccaaccgggcatcacttttatagtcgtgcaaaagcgacaccatactcgcttgttctgtactgacaaaaatgaaagagtcggaaaatcggggaatatccctgccggcacgactgtcgacacaaagatcacccaccctacggagtttgacttttatctgtgttcccacgcggggatccaggggacttcccgcccctcccattaccacgtgctctgggatgataacagatttagttccgacgaactccagatcctgacgtatcaattatgccacacttatgtgagatgcacccggtcagtgtcaatccctgccccagcatattatgctcacctcgtggcctttcgcgcacgctaccacctggtagataaagaacacgactcagccgagggatcgcatacctccggacaatctaacggccgagaccaccaggccctcgctaaggcagtgcaggttcaccaggatacgctcaggactatgtattttgcttag

SEQ ID NO: 172843 - DNA, 2580 bp, Artificial Sequence
  derived and/or modified sequence
atgtacagcggggccggccctgccctggcccccccagcccctcctccacccatccagggctacgccttcaagcccccacccaggccagactttggcaccagcggccgcaccatcaagctgcaggccaacttctttgagatggacatccccaagattgacatctaccactatgagctggacatcaagccagagaagtgcccccggcgggtgaaccgggagatcgtggagcacatggtgcagcacttcaagacccagatctttggagacaggaagcctgtgtttgatggcaggaagaacctgtacacagccatgcccctgcccatcggccgggacaaggtggagctggaggtgaccctgcccggggagggcaaggaccgcatcttcaaggtgtccatcaagtgggtgtcctgtgtgtccctgcaggccctgcatgatgccctgagcggccgcctgcccagcgtgccctttgagaccatccaggccctggatgtggtgatgaggcacctgcccagcatgagatacacccctgtgggccgctccttcttcaccgccagcgagggctgcagcaaccccctgggcggcggccgggaggtgtggtttggcttccaccagagcgtgcggcccagcctgtggaagatgatgctgaacattgatgtgtctgccacagccttctacaaggcccagcctgtgattgaatttgtgtgtgaggtgctggacttcaagagcattgaggagcagcagaagcccctgacagacagccagagggtgaagttcaccaaggagatcaagggcctgaaggtggagatcacccactgcggccagatgaagaggaagtacagagtgtgcaatgtgacccggcggcctgccagccaccagaccttccccctgcagcaggagagcggccagacagtggagtgcaccgtggcccagtacttcaaggacagacacaagctggtgctgcgctacccccacctgccctgcctgcaggtgggccaggagcagaagcacacctacctgcccctggaggtgtgcaacatcgtggccggccagcgctgcatcaagaagctgacagacaaccagaccagcaccatgatccgggccacagcccggagcgccccagaccggcaggaggagatcagcaagctgatgaggtctgccagcttcaacacagacccctacgtgcgggagtttggcatcatggtgaaggatgagatgacagatgtgacaggccgggtgctgcagcccccatccatcctgtatggaggaagaaacaaggccatcgccacccctgtgcagggcgtgtgggacatgaggaacaagcagttccacacaggcatcgagatcaaggtgtgggccatcgcctgctttgccccccagaggcagtgcacagaggtgcacctgaagagcttcacagagcagctgaggaagatcagcagagatgctggcatgcccatccagggccagccctgcttctgcaagtatgcccagggcgctgacagcgtggagcccatgttccgccacctgaagaacacctacgccggcctgcagctggtggtggtgatcctgcccgggaagacccctgtgtatgcagaggtgaagagggtgggggacacagtgctgggcatggccacccagtgtgtgcagatgaagaatgtgcagaggaccaccccccagaccctgagcaacctgtgcctgaagatcaacgtgaagctgggcggcgtgaacaacatcctgctgccccagggccggccccctgtgttccagcagcccgtcatcttcctgggcgcagatgtgacccaccccccagctggagatggcaagaagcccagcattgctgctgtggtgggctccatggatgcccaccccaaccgctactgtgccaccgtgcgggtgcagcagcaccggcaggagatcatccaggacctggccgccatggtgcgggagctgctgatccagttctacaagagcacccgcttcaagcccacccgcatcatcttctacagagatggagtgtctgagggccagttccagcaggtgctgcaccacgagctgctggccatccgggaggcctgcatcaagctggagaaggactaccagcccggcatcaccttcatcgtggtgcagaagaggcaccacaccaggctcttctgcacagacaagaatgaaagagtgggcaagagcggcaacatcccagctggcaccaccgtggacaccaagatcacccaccccacagaatttgacttctacctgtgcagccacgccggcatccagggcaccagccggcccagccactaccacgtgctgtgggatgacaaccgcttcagcagtgatgagctgcagatcctgacctaccagctgtgccacacctacgtgcgctgcaccaggtctgtgtccatcccagccccagcctactatgcccacctggtggccttccgggcccgctaccacctggtggacaaggagcatgacagcgctgagggcagccacaccagcggccagagcaatggccgggaccaccaggccctggccaaggctgtgcaggtgcaccaggacaccctgcggaccatgtactttgcctag

SEQ ID NO: 172844 - DNA, 2580 bp, Artificial Sequence
  derived and/or modified sequence
atgtacagcggcgccggccccgccctggccccccccgcccccccccctccaattcagggctatgcatttaaacccccgccccgcccagacttcggtacttctgggcgaactataaagctccaggccaactttttcgagatggacattcccaaaatagacatttatcattacgaactcgacattaagcccgaaaaatgcccccgccgcgtgaatcgagagattgttgaacacatggtgcagcattttaagactcaaattttcggagatcgtaagccagtctttgatggccgcaagaatctatacacagccatgcctttgcctatcgggagagataaagtcgaactcgaggtgacattacctggcgagggcaaggatagaatttttaaggtctccattaagtgggtgtcgtgcgttagtctgcaggcgttacacgacgcactgtcagggagactccccagcgtcccctttgagactatccaggctctcgatgtcgtgatgcggcacctgccatcaatgcggtacacccccgtggggcgctccttttttacagctagtgaggggtgttccaaccccctgggagggggacgtgaagtctggtttggttttcaccagtcagtccgccccagtctctggaaaatgatgctgaacattgacgtgagtgctaccgcattctacaaagctcagcccgtcatagagtttgtgtgcgaagtgctcgatttcaagagcatagaggagcagcagaaacccctgactgactcccagagggtgaagttcacaaaggaaatcaaaggattgaaggtggaaatcacacactgcggtcagatgaaaagaaaataccgcgtgtgcaacgtaaccaggcggcctgcctctcaccagacgttccctttacaacaagagtccgggcagacagttgagtgcaccgtggcccagtatttcaaggataggcacaagctcgtcttgagatacccccatctcccttgtttacaagttggccaggaacaaaaacacacatacctcccattggaagtatgcaacatcgtcgccggccagaggtgcatcaagaagctgactgataatcagacttccacgatgattcgtgctaccgctcgatccgccccagaccgccaggaggagatctcaaaactgatgagatctgcatccttcaatacagatccgtatgtcagagagtttggtattatggtgaaggacgaaatgacagatgtgacgggccgtgttcttcagcctccctcaatcctatacggcggtagaaataaggccatagctacccccgtgcagggggtgtgggatatgagaaacaagcagtttcacaccggaattgaaattaaagtgtgggcgatcgcttgcttcgcacctcagagacagtgtacagaagtccacttaaagagcttcaccgaacagctgagaaagatcagcagagatgccggcatgccaattcaaggacagccctgtttttgcaaatatgcccagggagctgatagtgtggaaccaatgttccggcacctgaaaaatacctatgctggacttcagctggtggtcgtgattctgccaggcaagactccagtgtacgctgaggttaagcgtgtgggcgacaccgtcctaggaatggcaactcagtgtgtgcagatgaagaacgtccaaagaaccacaccccagacactttcaaatctttgcttgaaaattaacgtcaaactgggtggagtgaacaatattttgttaccccagggaagacccccggtcttccagcagcccgtcatctttttaggggcagacgttacccatccaccagcaggggacggtaaaaagccctccatagccgccgtagtgggtagcatggatgcccacccaaaccgatactgtgcaacagtaagggttcaacagcaccgccaagaaatcattcaggatttggcagccatggtcagggaacttttaatccagttttacaaaagtactcgctttaagcctactagaatcatcttctatagggacggggtgtcagagggccagtttcaacaggtcttgcatcacgagctgttagccatacgggaggcttgtattaagctcgagaaagactatcagcccggcatcacattcatcgtggttcaaaaacggcatcacacacgactgttttgtactgataagaatgagcgggtcggcaagtctggcaacattccggcagggacaaccgtagacacaaaaatcacgcaccccaccgagttcgatttctatctgtgttcccatgcaggcatacaagggacgagcagaccgtcccactatcatgtactgtgggacgacaatagattcagctcagacgagttgcaaatcctgacctatcagctgtgtcacacatatgtgcgatgcacacgaagcgtttccatccccgccccggcctattatgcccacctggtcgcctttcgggctcggtatcatctggtggacaaggagcatgatagcgcggaaggatcccatacatccgggcagtctaatggccgcgaccaccaggccctagccaaggctgtgcaagttcaccaggatacgctccgcacaatgtacttcgcatag

SEQ ID NO: 172845 - DNA, 2580 bp, Artificial Sequence
  derived and/or modified sequence
atgtacagtggagctgggccagccctcgctccgcctgcaccccctccgcctatacagggctacgcttttaaaccgccaccaagacctgattttggaacaagcggtcggacaattaaacttcaagccaatttctttgagatggatattcctaaaattgacatctaccactatgagctggatataaagcccgagaagtgtcctcgtagggtgaatagggagatcgtcgagcatatggtgcagcattttaagacacagattttcggagatagaaaaccagtcttcgatggacgcaagaatctctacaccgcaatgcctctacccatcgggagggacaaagttgagctggaagtgaccctcccgggagaaggcaaggacagaattttcaaggtttctattaaatgggtgtcctgtgtgagcctgcaggcattgcatgatgctttaagcggcaggttgccctccgtgccattcgagacgatccaggctttggatgttgtgatgcgacatctgcccagtatgcggtacacccccgtggggcgtagcttttttaccgcttcagaggggtgctcaaacccattaggaggcggacgggaggtctggttcggcttccaccagagcgtgcggcctagtctctggaaaatgatgcttaacatagatgtttcggctacagccttttacaaggcccaacctgtaattgaatttgtctgtgaggtgcttgatttcaagtctatcgaagaacaacagaaacctctgactgattcccagcgtgtgaaattcacgaaggagattaaaggtctgaaggtggaaatcacccattgtggacaaatgaagcggaagtacagggtctgcaacgtcactcgtaggccagccagtcaccagacctttccgttgcagcaggaatcaggccagaccgtggaatgcacggtggcccagtacttcaaggaccgccataaactcgtcctgcgttacccacatctgccttgccttcaggttggccaggaacagaagcatacttacctccctcttgaagtttgcaacattgtggcgggacagcgctgtatcaagaagctcacggataaccagacatccacaatgatcagagccaccgctcggtccgcccctgacaggcaggaagagatttccaaacttatgaggagtgcctcattcaacactgacccctacgtccgcgaatttggcataatggtgaaagacgagatgacagatgtgacaggccgtgtactccaacctcccagcatcctctatggcggaaggaataaggctatcgccacaccggtgcagggcgtgtgggacatgaggaataaacagtttcacactggtattgagattaaggtctgggcaattgcctgttttgcccctcaacgacagtgtactgaggttcatctcaaaagcttcacggagcagctccggaagatctctcgagacgctggcatgcctatacaagggcagccctgcttttgcaagtatgctcaaggggcagacagcgtcgagcccatgttccgccacctgaagaacacgtacgcaggtctgcagcttgtggtggtgatacttcctggcaagaccccggtctatgccgaggttaagagggtgggtgacacggtgctgggcatggctacccagtgtgtccagatgaagaatgtacagcgcaccaccccccagacgctgagtaacctctgtctgaagattaatgtcaaactagggggagtgaataacatcctcttgccgcagggacgtccacccgtctttcaacagccagtgatattcctgggcgcagacgtcacccacccacccgcaggagacggaaaaaaaccttcgatagctgcagtagtaggcagtatggatgcccaccccaacagatattgtgcaaccgttcgggtccagcagcacagacaggagattatacaagacctcgctgccatggtcagggaattgcttattcagttttacaaatctactagatttaaacctactcgcattattttctacagagatggggtaagcgaaggacagtttcagcaggtactgcaccacgagctcctagctattcgcgaagcctgcattaagctggaaaaagattaccagcccggaataacctttatcgtggtgcaaaaacgacaccacactaggctgttttgtacagataagaatgagagagtgggtaaaagcggcaacattcctgccggaacaacagtggatacaaaaattacacaccctaccgaatttgacttttacctgtgctctcatgcgggaatacagggaaccagtcggccttcccactatcacgtgctctgggacgacaatcgcttctcatcggacgagttgcagattctgacataccaactgtgtcacacttacgttcgttgtacaagatctgtaagtatccctgctcctgcctactacgcccatctcgtggcgtttagggctcgttaccacctggtcgataaagagcacgattctgcggagggttcacatactagcggtcagtctaatggtagagaccaccaggctcttgccaaagccgtgcaggtccatcaggacaccctgaggacaatgtattttgcttag

SEQ ID NO: 172846 - DNA, 3572 bp, Artificial Sequence
  derived and/or modified sequence
ggccgcgccggggcggatcgtgcggccggcggctccctcgcggctcgcggcgtcggggcccgtggcgcgcgcgcggccgcccctcggccccggagcccctcggcggcgccaccatgtactcgggagccggccccgcacttgcacctcctgcgccgccgccccccatccaaggatatgccttcaagcctccacctagacccgactttgggacctccgggagaacaatcaaattacaggccaatttcttcgaaatggacatccccaaaattgacatctatcattatgaattggatatcaagccagagaagtgcccgaggagagttaacagggaaatcgtggaacacatggtccagcactttaaaacacagatctttggggatcggaagcccgtgtttgacggcaggaagaatctatacacagccatgccccttccgattgggagggacaaggtggagctggaggtcacgctgccaggagaaggcaaggatcgcatcttcaaggtgtccatcaagtgggtgtcctgcgtgagcttgcaggcgttacacgatgcactttcagggcggctgcccagcgtcccttttgagacgatccaggccctggacgtggtcatgaggcacttgccatccatgaggtacacccccgtgggccgctccttcttcaccgcgtccgaaggctgctctaaccctcttggcgggggccgagaagtgtggtttggcttccatcagtccgtccggccttctctctggaaaatgatgctgaatattgatgtgtcagcaacagcgttttacaaggcacagccagtaatcgagtttgtttgtgaagttttggattttaaaagtattgaagaacaacaaaaacctctgacagattcccaaagggtaaagtttaccaaagaaattaaaggtctaaaggtggagataacgcactgtgggcagatgaagaggaagtaccgcgtctgcaatgtgacccggcggcccgccagtcaccaaacattcccgctgcagcaggagagcgggcagacggtggagtgcacggtggcccagtatttcaaggacaggcacaagttggttctgcgctacccccacctcccatgtttacaagtcggacaggagcagaaacacacctaccttcccctggaggtctgtaacattgtggcaggacaaagatgtattaaaaaattaacggacaatcagacctcaaccatgatcagagcgactgctaggtcggcgcccgatcggcaagaagagattagcaaattgatgcgaagtgcaagtttcaacacagatccatacgtccgtgaatttggaatcatggtcaaagatgagatgacagacgtgactgggcgggtgctgcagccgccctccatcctctacgggggcaggaataaagctattgcgacccctgtccagggcgtctgggacatgcggaacaagcagttccacacgggcatcgagatcaaggtgtgggccattgcgtgcttcgccccccagcgccagtgcacggaagtccatctgaagtccttcacagagcagctcagaaagatctcgagagacgccggcatgcccatccagggccagccgtgcttctgcaaatacgcgcagggggcggacagcgtggagcccatgttccggcacctgaagaacacgtatgcgggcctgcagctggtggtggtcatcctgcccggcaagacgcccgtgtacgccgaggtcaagcgcgtgggagacacggtgctggggatggccacgcagtgcgtgcagatgaagaacgtgcagaggaccacgccacagaccctgtccaacctctgcctgaagatcaacgtcaagctgggaggcgtgaacaacatcctgctgccccagggcaggccgccggtgttccagcagcccgtcatctttctgggagcagacgtcactcacccccccgccggggatgggaagaagccctccattgccgccgtggtgggcagcatggacgcccaccccaatcgctactgcgccaccgtgcgcgtgcagcagcaccggcaggagatcatacaagacctggccgccatggtccgcgagctcctcatccagttctacaagtccacgcgcttcaagcccacccgcatcatcttctaccgcgacggtgtctctgaaggccagttccagcaggttctccaccacgagttgctggccatccgtgaggcctgtatcaagctagaaaaagactaccagcccgggatcaccttcatcgtggtgcagaagaggcaccacacccggctcttctgcactgacaagaacgagcgggttgggaaaagtggaaacattccagcaggcacgactgtggacacgaaaatcacccaccccaccgagttcgacttctacctgtgtagtcacgctggcatccaggggacaagcaggccttcgcactatcacgtcctctgggacgacaatcgtttctcctctgatgagctgcagatcctaacctaccagctgtgtcacacctacgtgcgctgcacacgctccgtgtccatcccagcgccagcatactacgctcacctggtggccttccgggccaggtaccacctggtggataaggaacatgacagtgctgaaggaagccatacctctgggcagagtaacgggcgagaccaccaagcactggccaaggcggtccaggttcaccaagacactctgcgcaccatgtactttgcttgacatgttttagtgtttagcgattgtgtaccgagtgggattcacgagaccagctacactcagaccaacagatggccagcccttccgtgacagccagcatcgaacatgagacgtcattgattttattagattctccgttttccagaatgccttccgtcccagatttcaaacttggattttgaactgcagacctgtatgagaacccaatgtcataggaaatatggtttgctaaaatctataagctgcttattaaaacagagtcccgtgtgtcctaaaaatctcctaaaaccagtctatgaactcagggctttaaaacatttttaatttatttggtcattcaatttacttgtttttaatacatgattctctatgaaattgatgggctcaaactagctgtgaatcttctgagagtgaaagcaacacaaaacacaagtgtggttttaaagccttgaacattctgatgttgtcactaaagttgatttccaggcgatgctcgtgtgcccctggcgtggctcacccaagttcctcgactgagggccggtggccatgcagaggcgtccgcaggtgccgtgttctgccagcaccgcccttcacccggcctgaactaaggagcagtggcagaaggtgggccccgtgtgtttacagcatttccaggtccagagaggttggcagacaagtgccattttaataaaaaatgtatttaaaaaaagaaaaaagacaatatactgacagtctaatcatcagatttgtcctataggactgtgacatttattttccaaagtttttaaagaatacgggtctgtggtgataaatacagtacaatcctttttcactgttatgtctttaatgtaagagaagaatatatatatctggtttgcagta

SEQ ID NO: 172847 - protein, 649 aa, Artificial Sequence
  derived and/or modified sequence
MSSFGAGKTKEVIFSVEDGSVKMFLRGRPVPMMIPDELAPTYSLDTRSELPSCRLKLEWVYGYRGRDCRANLYLLPTGEIVYFVASVAVLYSVEEQRQRHYLGHNDDIKCLAIHPDMVTIATGQVAGTTKEGKPLPPHVRIWDSVSLSTLHVLGLGVFDRAVCCVGFSKSNGGNLLCAVDESNDHMLSVWDWAKETKVVDVKCSNEAVLVATFHPTDPTVLITCGKSHIYFWTLEGGSLSKRQGLFEKHEKPKYVLCVTFLEGGDVVTGDSGGNLYVWGKGGNRITQAVLGAHDGGVFGLCALRDGTLVSGGGRDRRVVLWGSDYSKLQEVEVPEDFGPVRTVAEGHGDTLYVGTTRNSILQGSVHTGFSLLVQGHVEELWGLATHPSRAQFVTCGQDKLVHLWSSDSHQPLWSRIIEDPARSAGFHPSGSVLAVGTVTGRWLLLDTETHDLVAIHTDGNEQISVVSFSPDGAYLAVGSHDNLVYVYTVDQGGRKVSRLGKCSGHSSFITHLDWAQDSSCFVTNSGDYEILYWDPATCKQITSADAVRNMEWATATCVLGFGVFGIWSEGADGTDINAVARSHDGKLLASADDFGKVHLFSYPCCQPRALSHKYGGHSSHVTNVAFLWDDSMALTTGGKDTSVLQWRVV

SEQ ID NO: 172848 - DNA, 1950 bp, Artificial Sequence
  derived and/or modified sequence
atgtcttcattcggagccggcaaaaccaaggaagttatcttctctgttgaagatggaagtgtgaaaatgttcctgaggggccgcccagttccaatgatgatccctgacgagctcgcacccacttactcactggacacaagatctgaactgccatcttgtcgccttaaattggagtgggtctatgggtaccgtgggcgagattgccgcgccaacctgtacctgctgcccaccggtgaaattgtgtactttgtcgcttccgttgccgtgttgtactcagtggaggagcagcgccaacggcattatctgggccacaatgacgacattaaatgtttggccatccatccagacatggtgaccatcgccaccggccaggtggccggaacaactaaggaaggtaagcccctccctccgcatgtgcgcatctgggactctgtctctttatccacccttcatgtgctgggcctcggcgtgtttgacagagccgtgtgctgcgttggtttcagtaagagtaatgggggcaacctcctctgcgcagtggatgaatccaacgaccacatgctcagcgtgtgggattgggcaaaggagactaaagtcgtggacgtgaaatgctctaacgaggccgtgttagtcgccacttttcatccaaccgatccgaccgtgctgatcacatgcggaaagagccatatctatttttggacactggaggggggttcgttgagcaagaggcaaggactcttcgaaaagcacgagaaaccaaagtacgtcctgtgtgtcacctttctggaggggggtgacgtcgtgacaggggacagcggcggtaacctatatgtgtgggggaaggggggtaacaggatcactcaggccgtcctgggcgcacatgacggaggtgttttcggtttatgcgctctgagagacggcacacttgttagcggcggcgggcgcgacaggcgtgtggtgctctgggggtccgattactcaaaactgcaagaggttgaagtgcccgaggacttcgggcctgtaaggaccgtggccgaggggcatggagacacactgtatgtggggacaaccagaaactcaattttgcagggatctgtgcacactgggttctcccttctggttcaaggtcacgtagaggagttgtgggggcttgccacacacccaagtagagcgcagtttgtgacatgcgggcaggataagctggtgcacctgtggagtagtgactcccaccaaccactatggtctcgcattatcgaagaccctgcccgttctgcaggctttcaccctagcggttcggtgttggctgtgggcacggtgacgggcagatggttgctgcttgatacggagacccatgacctagtcgcgatccacacagatggaaatgagcagatctcggtcgtgtctttttcgcctgacggggcttacctcgccgtcggaagtcatgacaatctagtctacgtctacacagtcgatcaaggcgggaggaaagtgagcaggctggggaaatgctcaggccattcctccttcattacacacttggattgggcacaggacagctcgtgtttcgtgaccaacagtggggactatgagatcctttattgggaccccgctacttgcaaacagatcactagtgccgacgcagtaaggaatatggaatgggccaccgccacatgcgtactcggatttggggtgttcgggatatggtcagaaggcgccgatggaaccgacattaatgctgtggcccgtagtcacgatgggaagttattagctagcgctgacgactttggcaaggtacacttgttttcttatccatgctgtcaaccacgcgcactgtcgcataagtacggagggcattccagccacgtaacgaacgtcgccttcctgtgggatgattctatggcgttgacaacaggcggtaaagatacctccgtccttcagtggagggtggtctag

SEQ ID NO: 172849 - DNA, 1950 bp, Artificial Sequence
  derived and/or modified sequence
atgagcagctttggagctgggaagaccaaggaggtgatcttctctgtggaggatggctctgtgaagatgttcctgcggggccggcctgtgcccatgatgatcccagatgagctggcccccacctacagcctggacaccaggtctgagctgcccagctgccgcctgaagctggagtgggtgtatggctaccggggccgggactgccgggccaacctgtacctgctgcccactggagagatcgtgtactttgtggcctctgtggccgtgctgtacagcgtggaggagcagaggcagaggcactacctgggccacaatgatgacatcaagtgcctggccatccacccagacatggtgaccatcgccaccggccaggtggccggcaccaccaaggagggcaagcccctgcccccccacgtgcgcatctgggacagcgtgtccctgagcaccctgcacgtgctgggcctgggcgtgtttgacagagctgtgtgctgcgtgggcttcagcaagagcaatggaggcaacctgctgtgtgctgtggatgagagcaatgaccacatgctgtctgtgtgggactgggccaaggagaccaaggtggtggatgtgaagtgcagcaatgaagctgtgctggtggccaccttccaccccacagaccccaccgtgctgatcacctgtgggaagagccacatctacttctggaccctggagggcggcagcctgagcaagaggcagggcctgtttgagaagcatgagaagcccaagtatgtgctgtgtgtgaccttcctggagggcggagatgtggtgactggagacagcggcggcaacctgtatgtgtggggcaagggcggcaaccgcatcacccaggccgtgctgggcgcccatgatggcggcgtgtttggcctgtgtgccctgagagatggcaccctggtgtctgggggcggccgggaccggcgggtggtgctgtggggcagtgactacagcaagctgcaggaggtggaggtgcctgaagattttggacctgtgaggacagtggccgagggccatggagacaccctgtatgtgggcaccaccagaaattccatcctgcagggctctgtgcacacaggcttcagcctgctggtgcagggccacgtggaggagctgtggggcctggccacccaccccagccgggcccagtttgtgacctgtggccaggacaagctggtgcacctgtggagcagtgacagccaccagcccctgtggagccgcatcatcgaggaccctgcccggtctgctggcttccaccccagcggctctgtgctggccgtgggcaccgtgacaggccgctggctgctgctggacacagagacccatgacctggtggccatccacacagatggaaatgagcagatctctgtggtgtccttctccccagatggagcctacctggccgtgggcagccatgacaacctggtgtatgtgtacacagtggaccagggcggcaggaaggtgtcccggctgggcaaatgttctggccacagcagcttcatcacccacctggactgggcccaggacagcagctgctttgtgaccaacagcggggactatgagatcctgtactgggaccctgccacctgcaagcagatcaccagcgcagatgctgtgaggaacatggagtgggccacagccacctgtgtgctgggctttggagtgtttggcatctggagcgagggcgcagatggaacagacatcaatgctgtggcccggagccatgatggcaagctgctggccagcgcagatgactttgggaaggtgcacctgttctcctacccctgctgccagccccgggccctgagccacaagtatggaggccacagcagccacgtgaccaacgtggccttcctgtgggatgacagcatggccctgaccaccggcggcaaggacacctctgtgctgcagtggagggtggtgtag

SEQ ID NO: 172850 - DNA, 1950 bp, Artificial Sequence
  derived and/or modified sequence
atgagcagcttcggcgccggcaagaccaaggaggtgatcttcagcgtggaggatggatctgtcaagatgtttcttaggggacgacctgttcctatgatgatccctgacgagctcgcacccacatatagcctcgatactcggtctgaactcccttcctgccgattgaagctagagtgggtttacggctaccgcggtcgcgactgtcgagccaacctctaccttttacccaccggagagatcgtgtactttgttgcctcggtcgccgttttgtatagtgtggaagagcaaaggcagagacactacttaggtcataacgatgacattaaatgtctcgctatccaccctgacatggttaccatcgccaccggccaagtggcagggacaaccaaggagggtaagcccttgcctccacacgtaagaatctgggactcggttagtctctccacactgcatgtgctgggcctcggagtttttgaccgcgcggtgtgttgcgtgggattttcaaagagcaatggcggcaatctcctgtgcgccgtggacgagtctaacgatcacatgctgtcagtatgggactgggccaaagaaacaaaagtggtggatgtgaaatgtagcaatgaggccgttctggttgccactttccacccaactgatcctacagtcctgataacttgtggcaagtcacatatatatttctggacactggagggtggcagcctctccaaaagacagggcctttttgaaaagcatgaaaagcccaagtacgtcctctgcgtgacattccttgagggtggggatgtcgtgactggcgattctggtggcaacctttatgtgtggggtaagggaggaaatcgcatcacacaggccgtgctgggtgcccacgacggaggtgtgttcggcttgtgcgccctgcgggatggaacattggtgagcggaggcgggcgcgatcgtcgtgtggtactttggggttctgactatagtaagttgcaggaggtcgaagtgcccgaggattttggccccgttcggacagtggctgaaggccatggcgacacgctctatgtgggcaccacacgcaactctattctccaggggagtgtacacactgggtttagcctgctggtccaggggcacgtggaggaattgtggggcctggctacccacccatctagagcccagttcgtgacatgcgggcaggacaagctggtgcatctttggagctctgacagtcatcagccactgtggagccggattatcgaggaccccgcaagatccgcaggctttcatcctagcggtagtgtcctggccgtaggcaccgtaacgggtcggtggttgctgctcgacacagagacccatgacctggtcgcaatccacaccgacggaaacgagcagatttccgtagtcagcttctcccctgacggtgcttatttggcggtcggtagtcatgacaatctggtgtacgtctatactgttgatcagggggggcggaaagtctcccgcctcggcaaatgtagtggtcattcttcattcattacacacctagactgggcacaggatagcagctgcttcgttacgaacagtggcgactacgaaatactttattgggatccagccacatgtaagcaaataacatcagcagacgctgttcggaatatggaatgggccacagctacatgtgttctgggttttggcgtgtttggcatatggagtgagggcgccgatggaacagatattaacgccgtggcacgctcgcacgacggtaaattactagcctctgctgacgacttcggtaaagtccatctctttagctacccatgctgccagccacgggcactgtcccataagtatggcggtcattcctcacacgttactaacgttgcttttctatgggacgattccatggcacttacaaccggcggtaaagatacatctgtccttcagtggagagtggtgtag

SEQ ID NO: 172851 - DNA, 1950 bp, Artificial Sequence
  derived and/or modified sequence
atgagcagttttggcgctggcaaaaccaaggaagtgatcttttccgtggaagacgggtctgttaaaatgtttcttagaggtcggcctgttcctatgatgattcctgatgagcttgctcccacgtatagcttagacacacgtagtgaattaccatcctgcaggctcaaactcgagtgggtatacggttaccggggacgcgactgcagagctaatctatatctcctccccaccggagagattgtctacttcgttgccagcgtcgctgtgctttattcagttgaggagcagcgacagcggcactatcttgggcacaatgatgacataaagtgcctagccattcatcccgacatggtgactatcgccactggccaggttgccggaacaacgaaagagggcaagccgttaccacctcatgtacgtatctgggactcagtctccctgtccacactgcacgtgctgggcttaggagtgtttgatcgggctgtctgctgcgtgggcttttcaaaatctaacggaggaaacctgctgtgcgctgtcgacgaaagtaatgaccatatgctatccgtctgggactgggctaaggaaactaaagtagttgacgttaagtgtagcaatgaagcggtgctcgtcgcaacttttcaccccacagacccaacagtcctgattacatgtggcaaatcacatatctatttctggaccttggaggggggatcccttagcaaacgccagggattgtttgagaagcacgaaaaaccaaagtatgttctttgtgtgacatttttagaagggggtgacgttgtcaccggggattccgggggaaacctatacgtgtggggcaagggcggtaatcggatcactcaggcagttctgggcgcacacgacggtggtgtgttcggtttatgtgctctgcgcgacggcaccttagttagcggcggaggcagagaccgccgagtggtgctctggggctccgattattcaaaactgcaagaagtggaggttcccgaagactttggacctgtgcggacagtggctgaagggcacggcgacactctttacgtaggcaccacccgtaatagcattctgcagggatcggtgcataccggattctccctgttagtgcagggtcatgtcgaggaactatggggactggccactcacccgagcagagcacaatttgtgacatgcggccaggacaagctcgtccatttgtggtcatcagacagccaccaacctttgtggagccgtatcatcgaggatcccgcacggtccgccggattccatccctcaggtagtgttctggccgttggaacggttactggcaggtggttgcttttggatactgaaactcatgaccttgtagccatccacaccgacggcaatgagcaaatctctgttgtgtcgttcagcccagatggagcctatctggccgtcggatcccacgacaatctcgtttatgtctacaccgttgatcagggcggtcggaaagtttcccgactcggaaagtgcagcggccactcgagttttattacccacctggactgggcccaggattcatcctgtttcgtcacaaattctggcgactacgaaattctctattgggatcccgcaacctgtaagcagattacgtcagctgacgctgtgcgcaacatggagtgggccacagcgacatgcgtgctggggtttggtgtgtttggcatctggagcgagggtgctgacgggactgatattaatgctgttgcccgatcacatgatggaaagctgctcgcttccgccgacgatttcggcaaggtacacctattttcatatccatgctgtcagcctcgggctttgagccataagtatgggggacatagttcccatgtgaccaacgtggccttcctatgggatgattcaatggccctgaccacaggcggtaaggatacttccgtgctgcagtggcgcgttgtttag

SEQ ID NO: 172852 - DNA, 2246 bp, Artificial Sequence
  derived and/or modified sequence
ccacccccggccccgaagctccgccacccgccgccatgagtagctttggagctggcaaaaccaaagaagttatcttcagtgtggaggatggctccgtgaaaatgttcctgaggggccgccctgtgcccatgatgatcccagacgagctggcacccacctacagcctggacacacgctcggagctgccttcttgccggctcaagctggagtgggtctatggctaccgtggccgagactgccgggccaacctttatttgctgcccaccggggagatagtgtactttgtggcctccgtagccgtgctatacagcgtggaggagcagaggcagcgacactacctgggacacaacgatgacatcaaatgcttggccatccacccagatatggtcaccatcgccacgggacaggtggcgggaaccactaaggaagggaagccgctgccgccccacgtgcgcatctgggactcagtttccctctccaccttacacgtgctgggcttgggggtgtttgacagagccgtgtgctgtgtgggcttctccaaatctaatggaggcaacctgctgtgtgcagtggatgaatccaatgatcacatgctctcggtgtgggactgggccaaggagaccaaggtggtggatgtcaagtgctccaatgaggctgtattggtggccaccttccaccccacggaccccactgtgcttatcacctgcgggaaatctcacatctacttctggaccttggaggggggcagcttgagcaagcggcaaggcctctttgagaaacatgagaaaccgaagtatgtgctgtgtgtgacctttttggaaggtggcgacgtggtcacgggggactctggggggaacctctatgtttggggcaaaggtgggaaccgtatcacacaggcggtgctgggcgcccacgacggcggcgtgtttgggctctgcgccctgcgggacgggacgctggtgtctggagggggccgtgatcggcgggtggtcctctggggttctgactacagcaagctgcaggaagtggaggtccctgaggactttggccctgtgcgcaccgtggcagagggccacggagacacactgtacgtggggaccacccgcaattccatcctgcagggctccgtgcacacaggcttctcactgctggtccagggccatgtggaagagctgtggggcctggccacacaccccagtcgggcccagtttgtgacctgcgggcaggataagctggtgcatctatggagctcagattcccaccagcccctgtggagcaggatcatcgaggaccctgcccgctcagccggcttccaccccagtggctctgtcctggctgtgggtacagtgactggcagatggctgctgctggacacggagacccatgacctggtggctatccacacagacggcaatgaacagatctcagtggtcagcttctccccagacggggcgtacctggccgtgggctcccacgacaacttggtgtacgtgtacacggtggaccagggcggccgcaaggtcagccgcctgggcaagtgctcgggccattccagttttatcacccacctggattgggcccaggacagcagctgctttgtcaccaactccggggactatgagattctgtactgggacccggctacctgtaagcagatcaccagtgcggatgctgtgaggaacatggaatgggccacagctacttgtgtcctagggtttggggtgtttgggatctggtctgagggggcggacggcactgatatcaacgctgtggcccgctctcatgatgggaagttgctggcttcagctgatgactttggcaaagttcacctgtttagctacccctgctgtcagcctcgagccctcagccacaagtacggtggacacagcagccatgtgacaaatgtggccttcttgtgggatgacagcatggccctgaccacagggggcaaggacaccagtgtgctacagtggcgggtggtctgatgcggccagggaagagtcaggtgtcagggcaggaattctattttcgggagatgtctattgccgagtagagtaatatatacccagagtatgtctatagcagagggggttatgggggcgggagggtagactgacatacagaagtctctatttatccgggtgggaagagggagtcacatcgctttggggatccattggtgtttggtttggggtgttttttaagttttttcttttatatcatccagaaataaagacacgtacact

SEQ ID NO: 172853 - DNA, 1950 bp, Artificial Sequence
  derived and/or modified sequence
atgagcagcttcggcgccggcaagaccaaggaggtgatcttcagcgtggaggacggcagcgtgaagatgttcctgagaggcagacccgtgcccatgatgatccccgacgagctggcccccacctacagcctggacaccagaagcgagctgcccagctgcagactgaagctggagtgggtgtacggctacagaggcagagactgcagagccaacctgtacctgctgcccaccggcgagatcgtgtacttcgtggccagcgtggccgtgctgtacagcgtggaggagcagagacagagacactacctgggccacaacgacgacatcaagtgcctggccatccaccccgacatggtgaccatcgccaccggccaggtggccggcaccaccaaggagggcaagcccctgcccccccacgtgagaatctgggacagcgtgagcctgagcaccctgcacgtgctgggcctgggcgtgttcgacagagccgtgtgctgcgtgggcttcagcaagagcaacggcggcaacctgctgtgcgccgtggacgagagcaacgaccacatgctgagcgtgtgggactgggccaaggagaccaaggtggtggacgtgaagtgcagcaacgaggccgtgctggtggccaccttccaccccaccgaccccaccgtgctgatcacctgcggcaagagccacatctacttctggaccctggagggcggcagcctgagcaagagacagggcctgttcgagaagcacgagaagcccaagtacgtgctgtgcgtgaccttcctggagggcggcgacgtggtgaccggcgacagcggcggcaacctgtacgtgtggggcaagggcggcaacagaatcacccaggccgtgctgggcgcccacgacggcggcgtgttcggcctgtgcgccctgagagacggcaccctggtgagcggcggcggcagagacagaagagtggtgctgtggggcagcgactacagcaagctgcaggaggtggaggtgcccgaggacttcggccccgtgagaaccgtggccgagggccacggcgacaccctgtacgtgggcaccaccagaaacagcatcctgcagggcagcgtgcacaccggcttcagcctgctggtgcagggccacgtggaggagctgtggggcctggccacccaccccagcagagcccagttcgtgacctgcggccaggacaagctggtgcacctgtggagcagcgacagccaccagcccctgtggagcagaatcatcgaggaccccgccagaagcgccggcttccaccccagcggcagcgtgctggccgtgggcaccgtgaccggcagatggctgctgctggacaccgagacccacgacctggtggccatccacaccgacggcaacgagcagatcagcgtggtgagcttcagccccgacggcgcctacctggccgtgggcagccacgacaacctggtgtacgtgtacaccgtggaccagggcggcagaaaggtgagcagactgggcaagtgcagcggccacagcagcttcatcacccacctggactgggcccaggacagcagctgcttcgtgaccaacagcggcgactacgagatcctgtactgggaccccgccacctgcaagcagatcaccagcgccgacgccgtgagaaacatggagtgggccaccgccacctgcgtgctgggcttcggcgtgttcggcatctggagcgagggcgccgacggcaccgacatcaacgccgtggccagaagccacgacggcaagctgctggccagcgccgacgacttcggcaaggtgcacctgttcagctacccctgctgccagcccagagccctgagccacaagtacggcggccacagcagccacgtgaccaacgtggccttcctgtgggacgacagcatggccctgaccaccggcggcaaggacaccagcgtgctgcagtggagagtggtgtag

SEQ ID NO: 172854 - protein, 881 aa, Artificial Sequence
  derived and/or modified sequence
MTTETGPDSEVKKAQEEAPQQPEAAAAVTTPVTPAGHGHPEANSNEKHPSQQDTRPAEQSLDMEEKDYSEADGLSERTTPSKAQKSPQKIAKKYKSAICRVTLLDASEYECEVEKHGRGQVLFDLVCEHLNLLEKDYFGLTFCDADSQKNWLDPSKEIKKQIRSSPWNFAFTVKFYPPDPAQLTEDITRYYLCLQLRADIITGRLPCSFVTHALLGSYAVQAELGDYDAEEHVGNYVSELRFAPNQTRELEERIMELHKTYRGMTPGEAEIHFLENAKKLSMYGVDLHHAKDSEGIDIMLGVCANGLLIYRDRLRINRFAWPKILKISYKRSNFYIKIRPGEYEQFESTIGFKLPNHRSAKRLWKVCIEHHTFFRLVSPEPPPKGFLVMGSKFRYSGRTQAQTRQASALIDRPAPFFERSSSKRYTMSRSLDGAEFSRPASVSENHDAGPDGDKRDEDGESGGQRSEAEEGEVRTPTKIKELKPEQETTPRHKQEFLDKPEDVLLKHQASINELKRTLKEPNSKLIHRDRDWERERRLPSSPASPSPKGTPEKANERAGLREGSEEKVKPPRPRAPESDTGDEDQDQERDTVFLKDNHLAIERKCSSITVSSTSSLEAEVDFTVIGDYHGSAFEDFSRSLPELDRDKSDSDTEGLLFSRDLNKGAPSQDDESGGIEDSPDRGACSTPDMPQFEPVKTETMTVSSLAIRKKIEPEAVLQTRVSAMDNTQQVDGSASVGREFIATTPSITTETISTTMENSLKSGKGAAAMIPGPQTVATEIRSLSPIIGKDVLTSTYGATAETLSTSTTTHVTKTVKGGFSETRIEKRIIITGDEDVDQDQALALAIKEAKLQHPDMLVTKAVVYRETDPSPEERDKKPQES

SEQ ID NO: 172855 - DNA, 2646 bp, Artificial Sequence
  derived and/or modified sequence
atgaccaccgagaccggtcctgatagcgaggtgaaaaaggcacaggaagaagcaccacagcagcctgaggctgccgctgcagttacaacacctgtgacccctgccggacacggacacccagaggccaacagcaatgaaaagcatccttctcagcaggatactcgacctgccgagcagtcccttgacatggaagagaaagattactctgaggccgatgggttgagcgagaggaccaccccctctaaagcacagaagtctccccaaaagatagccaaaaagtacaaaagtgctatctgtagggtgacattgttagatgcgtccgagtatgaatgcgaagtggaaaaacacgggcgaggacaagtcctgttcgacctcgtctgcgagcatctaaatctgctggaaaaggactactttggcttgaccttttgcgatgcggacagccaaaaaaactggcttgatccgagcaaagaaatcaaaaagcaaattaggagcagtccctggaacttcgcattcacagtaaagttttacccccccgatccggcccagttaaccgaagatattacacgatattacctgtgcctgcagcttagagccgatattattacgggacgccttccatgcagcttcgtgacacatgcattactgggatcttacgccgtgcaagccgaactcggcgattacgatgcagaagagcacgttggcaactatgtgtctgaactgagattcgctcccaatcaaacacgcgagctggaagagcgcataatggaactccataaaacatacagggggatgacacctggggaggccgagatccatttcctggaaaatgcaaaaaaactttccatgtacggcgtcgaccttcatcatgccaaggactcggaagggattgacattatgttgggagtgtgtgccaatgggctgcttatctaccgggaccggctgcggatcaatcggtttgcctggcctaagatactgaagatctcctataaaaggtccaatttctatatcaaaattagacccggagagtacgagcaatttgaatctaccattggatttaaattgcccaaccaccggtccgctaagcgactgtggaaagtgtgcatagaacatcacaccttctttagactcgtcagtccagagccccccccaaaagggttcctcgtgatgggaagcaagtttcgttactccggtaggacacaggctcagacacggcaggcctccgccttgatcgatcggcccgcacctttttttgagcggtcttcaagcaaaagatacactatgtcccggtcgcttgacggggccgaattttcccggcccgcaagtgtttcggagaatcatgatgcaggaccggacggggataagcgtgatgaggatggggaaagtgggggccagcggtccgaggctgaagagggcgaggttcgtacccctaccaagattaaggaactcaagcctgaacaagagacgaccccccgacacaagcaggagttcctggataaaccagaagacgtactcctgaagcaccaggcatctattaatgaacttaaacgcacgctgaaagagcccaattcgaagttgattcatcgagatagagactgggagagggaacgcagattaccaagcagccctgctagtccatccccgaaggggacccctgaaaaggcaaacgagcgtgccggcctccgcgaaggatcagaagaaaaagttaagcctccccgacctcgagcgcccgaaagcgacacaggagatgaggaccaggatcaggaaagagacaccgtctttctgaaagataatcacctggcgatagaaagaaaatgcagtagtatcactgtgtctagtacttcatcgcttgaagctgaggtagacttcaccgtgatcggtgattatcacgggtctgcatttgaagacttctctcgctccctgccagagctggatagagacaagagcgacagcgatactgagggactcttattttcccgcgatttaaacaagggcgcccctagccaagacgatgagtccggtgggattgaagatagccccgaccgcggagcatgctccacaccagatatgccccaattcgagcctgtgaagaccgagacgatgacagtgtcatctcttgcgatcaggaaaaagatcgaaccagaggctgttctgcagaccagagtgagcgctatggacaacacccagcaggtggacggatccgcgtctgtcggcagggaattcattgcaactacaccctcaatcaccaccgaaacgatatccacgaccatggagaatagccttaaaagcgggaaaggtgccgcagccatgatccccgggccacagacagtggccactgagatccggtcccttagcccgattatcgggaaagatgttctgacgagtacttacggggctaccgctgagaccctgtccacctcaacgaccactcatgtgactaagactgtgaaaggcggatttagcgagactcggatagaaaagcgtatcattattacaggagatgaggatgtggaccaggaccaggccttagccctagcaattaaggaagcaaaactgcagcatccagacatgctggtgaccaaggccgtcgtctaccgggagactgatccaagccccgaggagagggacaaaaagccacaggagagctag

SEQ ID NO: 172856 - DNA, 2646 bp, Artificial Sequence
  derived and/or modified sequence
atgaccacagaaacaggcccagattctgaggtgaagaaggcccaggaggaggccccccagcagcctgaggccgctgctgctgtgaccacccctgtgaccccagctggccacggccaccctgaggccaacagcaatgagaagcaccccagccagcaggacaccaggcctgctgagcagagcctggacatggaggagaaggactacagcgaggctgatggcctgtctgagaggaccacccccagcaaggcccagaagagcccccagaagatcgccaagaagtacaagagcgccatctgccgggtgaccctgctggatgcctctgaatatgaatgtgaggtggagaagcacggccggggccaggtgctgtttgacctggtgtgtgagcacctgaacctgctggagaaggactacttcggcctgaccttctgtgatgctgacagccagaagaactggctggaccccagcaaggagatcaagaagcagatccgcagcagcccctggaactttgccttcaccgtgaagttctaccccccagaccctgcccagctgacagaggacatcacccgctactacctgtgcctgcagctgcgggctgacatcatcaccggccgcctgccctgcagctttgtgacccacgccctgctgggcagctatgctgtgcaggccgagctgggggactatgatgctgaggagcacgtgggcaactacgtgtctgagctgcgctttgcccccaaccagacccgggagctggaggagcgcatcatggagctgcacaagacctaccggggcatgaccccaggagaggccgagatccacttcctggagaatgccaagaagctgtccatgtatggagtggacctgcaccacgccaaggacagcgagggcatcgacatcatgctgggcgtgtgtgccaacggcctgctgatctacagagaccggctgcgcatcaacagatttgcctggcccaagatcctgaagatctcctacaagaggagcaacttctacatcaagatccggcctggagaatatgagcagtttgagagcaccatcggcttcaagctgcccaaccacaggtctgccaagaggctgtggaaggtgtgcatcgagcaccacaccttcttccggctggtgtccccagagcccccacccaagggcttcctggtgatgggcagcaagttccgctacagcggccgcacccaggcccagacccggcaggccagcgccctgattgacaggcctgcccccttctttgagaggagcagcagcaagcgctacaccatgagccgcagcctggatggagctgagttcagcaggcctgcctctgtgtctgagaaccatgatgctggcccagatggagacaagagagatgaagatggagagagcggcggccagaggtctgaggccgaggagggggaggtgaggacccccaccaagatcaaggagctgaagccagagcaggagaccacccccaggcacaagcaggagttcctggacaagccagaagatgtgctgctgaagcaccaggccagcatcaatgagctgaagaggaccctgaaggagcccaacagcaagctgatccaccgggaccgggactgggagcgggagcggcggctgcccagcagccctgccagccccagccccaagggcaccccagagaaggccaatgaaagagctggcctgcgggagggcagcgaggagaaggtgaagccaccccggccccgggcccctgagagtgacacaggagatgaggaccaggaccaggagcgggacacagtgttcctgaaggacaaccacctggccattgaaaggaagtgcagcagcatcaccgtgagcagcaccagcagcctggaggccgaggtggacttcaccgtgattggagactaccacggcagcgcctttgaggacttcagccgcagcctgcctgagctggaccgggacaagagtgacagcgacacagagggcctgctcttcagccgggacctgaacaagggggcccccagccaggatgatgagagcggcggcatcgaggacagcccagacagaggagcctgcagcaccccagacatgccccagtttgagcctgtgaagacagagaccatgacagtgagcagcctggccatcaggaagaagattgagcctgaggccgtgctgcagaccagggtgtctgccatggacaacacccagcaggtggatggcagcgcctctgtgggccgggagttcatcgccaccacccccagcatcaccacagagaccatcagcaccaccatggagaacagcctgaagagcgggaaaggagctgctgccatgatccctggcccccagacagtggccacagagatccgcagcctgagccccatcatcggcaaggatgtgctgaccagcacctacggggccacagctgagaccctgagcaccagcaccaccacccacgtgaccaagacagtgaagggcggcttcagcgagacccgcatcgagaagaggatcatcatcactggagatgaagatgtggaccaggaccaggccctggccctggccatcaaggaggccaagctgcagcacccagacatgctggtgaccaaggctgtggtgtaccgggagacagaccccagccctgaggagcgggacaagaagccccaggagagctag

SEQ ID NO: 172857 - DNA, 2646 bp, Artificial Sequence
  derived and/or modified sequence
atgaccaccgagaccggccccgacagcgaggtgaagaaggcccaggaggaggcccctcagcagccagaggcagcagccgctgtgactactcctgtgaccccagcgggccacggccacccagaagcaaattctaatgagaagcaccctagccagcaggatacccggcccgcagagcagtccttggacatggaggagaaggactatagcgaggctgacgggctcagtgagcgcacaactcccagcaaagcccagaaaagtcctcagaagatagcaaaaaagtacaaatccgcaatctgccgtgttacactactagacgcaagcgagtatgagtgtgaggtggagaaacatggacgcggacaggtcttgtttgacctggtgtgtgaacacctaaatttactggaaaaggactatttcgggttgactttctgtgacgccgattcccagaaaaactggttagacccttctaaggaaattaagaaacaaattcggagctctccctggaatttcgcttttacagtgaagttctatccacctgaccccgcccagttaactgaggacatcaccagatattacctttgccttcagctcagagccgacattatcacaggcaggttgccatgttcctttgtgacccacgctctgctggggtcttacgccgtccaagcggagctgggcgattacgacgcagaggagcacgtgggcaattacgtctctgaactgagatttgctcctaaccaaacgagagagctcgaggaaaggatcatggaactgcacaagacttatagaggaatgacacctggggaagctgaaattcacttcttggaaaatgccaagaaactgtctatgtatggagtggatcttcatcacgccaaggatagcgaggggattgacattatgctgggagtgtgtgccaacggacttctcatctatcgcgacaggcttagaattaaccgctttgcctggccgaaaatattgaagatctcttacaagcgctctaacttctatatcaagattcgcccaggcgagtatgagcagtttgagagcaccataggcttcaaactgcccaaccataggtctgcaaagcggttgtggaaagtgtgtatcgaacatcataccttctttaggttagtgtcgccagagcctccacctaagggcttcttggtaatggggagcaagtttcggtattcaggccgcacccaagcccagactcgtcaagccagtgctctgatcgacaggccagcccctttcttcgagcggagcagcagcaagagatacacaatgtcaaggagcttggatggagctgagttcagccggccagcttctgtctccgagaaccacgatgccggtcccgacggcgataagcgcgacgaggatggggagtctggaggccaaaggtccgaggcagaagagggtgaggtgcggactccgacgaaaataaaagaactgaagcctgagcaggagacaactccacgccacaaacaagaatttctggacaagcccgaagacgtcctcttaaaacatcaagcctcaatcaatgaattgaaacggacactcaaagagccaaattccaaactgattcatcgggatagagactgggaacgggagcgacggttgccgtcctcccccgcttcacctagccccaaggggacccccgaaaaggccaatgagcgggctgggttacgggagggctccgaagaaaaggttaagcccccaaggccgcgagcgccagagtctgacacaggagacgaagaccaagaccaggagagggataccgtgttcttgaaggataatcatcttgctatcgagcggaaatgcagttccattaccgtgagcagcacctcctctctggaagcagaggtggacttcaccgtgatcggagattaccacggcagtgccttcgaggacttctctcgcagcctcccggagttggaccgcgataaatcggatagcgatacggaggggcttctattttctagagatttgaataagggggctccctctcaggatgacgaaagcggaggtatcgaggacagtcccgacagaggggcatgttcaacaccagatatgccccagttcgagcctgttaagacagaaacgatgacagtctccagtcttgccattcgaaagaagatagagcctgaagccgtgttacagaccagggtcagcgctatggacaatactcaacaggtcgacggctctgcgtccgtgggtcgagagttcatcgccacaactccctccatcaccaccgagacgatctctacaaccatggagaactccctgaagagtggaaagggggcagcggccatgatccccggaccccagaccgtggctacggagatcaggagcctttcacccattatcggtaaggacgtattaacctctacctatggggccactgccgaaaccctgtccacatctactactacccacgtgaccaagaccgtgaagggtggattctccgagacccggatcgagaagcgcattatcattacaggagatgaagatgtggaccaggaccaggctctggcattagccataaaggaggcaaagctgcaacacccagacatgcttgtgaccaaggccgtcgtgtacagggaaacggatccctcccccgaggagagagataagaaaccacaagagtcatag

SEQ ID NO: 172858 - DNA, 2646 bp, Artificial Sequence
  derived and/or modified sequence
atgacgaccgagacaggtcctgactcggaggtgaaaaaggcacaggaggaagcccctcagcagcccgaggccgcagccgcagtgactactcccgtaactcctgccggacacggacaccccgaagctaactcaaacgaaaaacatccgtcccagcaagacacccggccagccgagcagtctctggacatggaagagaaggactacagcgaggccgacggcttgagcgagaggacaaccccaagtaaagcccagaaatccccacagaagattgccaaaaagtataaaagtgccatctgtagggtgactttgctggacgcgagcgaatacgagtgtgaggtagagaaacacggtagaggtcaggttctctttgacttggtctgcgaacacctgaatttactagaaaaggattatttcggtctgaccttctgtgacgcggacagccagaaaaattggctggacccatctaaggaaatcaaaaagcaaattagatcgtctccctggaatttcgcttttactgtgaaattctacccaccagatcccgcacagctgacagaagacattactcggtactacctgtgcctgcagctcagggccgacatcatcaccgggagactgccctgttcttttgtgacccacgccttattaggctcatatgccgtgcaggctgagctgggggattatgacgcggaggagcatgtaggaaactacgtttccgagctcagatttgctccaaaccagacacgggagctggaggaaaggataatggagttacacaaaacctatcgtggcatgactcccggtgaggccgagatacacttcctggagaatgcaaagaagctcagtatgtacggcgttgacctgcaccacgccaaggatagcgaaggaattgatatcatgctgggagtctgtgcaaatgggttattaatatacagagatagactcaggatcaaccggttcgcgtggccgaaaatattaaaaataagttataaacgttctaacttctatatcaaaatccgtcctggcgagtatgaacagttcgagagtactatcgggtttaagcttcccaatcatcggtccgccaagagattgtggaaggtatgtatcgagcatcacaccttcttccggttagtttcccccgaaccccctcctaagggttttctggtcatgggctccaagttccggtactccggccgtacccaggctcagactcgacaagcctccgccctcatcgatcggccagcccctttcttcgagcgttctagttccaagagatacacaatgagcaggagcctggatggggctgagttctcacgtccagcatctgtctctgaaaatcacgatgccggtcccgacggcgacaagcgcgacgaggacggagaatcgggcggacagagatcagaggccgaagaaggagaggtacgtacacccactaagatcaaagaacttaagccggagcaagagactacacctagacataaacaagaattcctcgataaacccgaggatgttctcctcaagcaccaggctagcataaacgaacttaagaggacactcaaagaacctaactctaagctcatccatagggaccgcgactgggagagggaacggaggctgccctcctctccggctagtccctccccaaagggcacaccagagaaggcgaacgaacgcgctgggctgcgggaaggctcagaagagaaggttaagccgccaagaccgagagcccctgagtccgacactggtgacgaggaccaggaccaagagcgcgacacagtattcctcaaagacaaccacctcgccattgaacggaaatgtagctcaattactgtctcgtcaacgtcttccttggaagcagaagtggattttacagtgataggcgactaccacgggtctgcattcgaggactttagtaggagtctgccagaactggatagagataagagcgatagtgacactgaggggctgttattttcacgcgatctaaacaagggcgcaccttcacaggacgatgaatctggaggcatcgaagactcacctgatagaggcgcttgcagtactcccgacatgccacaattcgaaccggtgaagactgagacgatgaccgtttcttccttagccatacgcaaaaagattgaaccagaggcagtgctgcagacccgggtgtctgccatggataatacacaacaggtggatggatccgcgtccgttggtcgtgaatttattgcaacaaccccaagcataactaccgaaaccatctcaaccaccatggagaacagtttgaagtctggtaaaggcgcagcagctatgatccccggacctcaaacggtggctacagagatccgcagcctgtccccaatcatcgggaaggacgtgctaacctcaacctacggcgctaccgctgaaactctgagcacgtccaccacgacccacgtgacgaaaaccgtcaagggagggttctcggagacgcggatcgaaaaacggataattatcaccggtgacgaggacgtggaccaagaccaagctctcgcgctcgccatcaaagaagcaaagcttcagcacccagatatgctggttaccaaggccgtggtatatagagagactgaccccagtcctgaggagagagacaaaaagccgcaggaatcgtag

SEQ ID NO: 172859 - DNA, 2646 bp, Artificial Sequence
  derived and/or modified sequence
atgaccaccgagaccggccccgacagcgaggtgaagaaggcccaggaggaggccccccagcagcccgaggccgccgccgccgtgaccacccccgtgacccccgccggccacggccaccccgaggccaacagcaacgagaagcaccccagccagcaggacaccagacccgccgagcagagcctggacatggaggagaaggactacagcgaggccgacggcctgagcgagagaaccacccccagcaaggcccagaagagcccccagaagatcgccaagaagtacaagagcgccatctgcagagtgaccctgctggacgccagcgagtacgagtgcgaggtggagaagcacggcagaggccaggtgctgttcgacctggtgtgcgagcacctgaacctgctggagaaggactacttcggcctgaccttctgcgacgccgacagccagaagaactggctggaccccagcaaggagatcaagaagcagatcagaagcagcccctggaacttcgccttcaccgtgaagttctacccccccgaccccgcccagctgaccgaggacatcaccagatactacctgtgcctgcagctgagagccgacatcatcaccggcagactgccctgcagcttcgtgacccacgccctgctgggcagctacgccgtgcaggccgagctgggcgactacgacgccgaggagcacgtgggcaactacgtgagcgagctgagattcgcccccaaccagaccagagagctggaggagagaatcatggagctgcacaagacctacagaggcatgacccccggcgaggccgagatccacttcctggagaacgccaagaagctgagcatgtacggcgtggacctgcaccacgccaaggacagcgagggcatcgacatcatgctgggcgtgtgcgccaacggcctgctgatctacagagacagactgagaatcaacagattcgcctggcccaagatcctgaagatcagctacaagagaagcaacttctacatcaagatcagacccggcgagtacgagcagttcgagagcaccatcggcttcaagctgcccaaccacagaagcgccaagagactgtggaaggtgtgcatcgagcaccacaccttcttcagactggtgagccccgagcccccccccaagggcttcctggtgatgggcagcaagttcagatacagcggcagaacccaggcccagaccagacaggccagcgccctgatcgacagacccgcccccttcttcgagagaagcagcagcaagagatacaccatgagcagaagcctggacggcgccgagttcagcagacccgccagcgtgagcgagaaccacgacgccggccccgacggcgacaagagagacgaggacggcgagagcggcggccagagaagcgaggccgaggagggcgaggtgagaacccccaccaagatcaaggagctgaagcccgagcaggagaccacccccagacacaagcaggagttcctggacaagcccgaggacgtgctgctgaagcaccaggccagcatcaacgagctgaagagaaccctgaaggagcccaacagcaagctgatccacagagacagagactgggagagagagagaagactgcccagcagccccgccagccccagccccaagggcacccccgagaaggccaacgagagagccggcctgagagagggcagcgaggagaaggtgaagccccccagacccagagcccccgagagcgacaccggcgacgaggaccaggaccaggagagagacaccgtgttcctgaaggacaaccacctggccatcgagagaaagtgcagcagcatcaccgtgagcagcaccagcagcctggaggccgaggtggacttcaccgtgatcggcgactaccacggcagcgccttcgaggacttcagcagaagcctgcccgagctggacagagacaagagcgacagcgacaccgagggcctgctgttcagcagagacctgaacaagggcgcccccagccaggacgacgagagcggcggcatcgaggacagccccgacagaggcgcctgcagcacccccgacatgccccagttcgagcccgtgaagaccgagaccatgaccgtgagcagcctggccatcagaaagaagatcgagcccgaggccgtgctgcagaccagagtgagcgccatggacaacacccagcaggtggacggcagcgccagcgtgggcagagagttcatcgccaccacccccagcatcaccaccgagaccatcagcaccaccatggagaacagcctgaagagcggcaagggcgccgccgccatgatccccggcccccagaccgtggccaccgagatcagaagcctgagccccatcatcggcaaggacgtgctgaccagcacctacggcgccaccgccgagaccctgagcaccagcaccaccacccacgtgaccaagaccgtgaagggcggcttcagcgagaccagaatcgagaagagaatcatcatcaccggcgacgaggacgtggaccaggaccaggccctggccctggccatcaaggaggccaagctgcagcaccccgacatgctggtgaccaaggccgtggtgtacagagagaccgaccccagccccgaggagagagacaagaagccccaggagagctag

SEQ ID NO: 172860 - DNA, 6266 bp, Artificial Sequence
  derived and/or modified sequence
catcagcgggcgggggtgtcgccgaacaggctgctccgcagagcccgccgcgaccccgcgccgccccgccccgcggcctgcctgccagaggagccgagggggccgcccctcgcccaacctgcccgacatggggaaccccgggcccaggcgtgctggtcaccatgacaacagagacaggccccgactctgaggtgaagaaagctcaggaggaggccccgcagcagcccgaggctgctgccgctgtgaccacccctgtgacccctgcaggccacggccacccagaggccaactccaatgagaagcatccatcccagcaggacacgcggcctgctgaacagagcctagacatggaggagaaggactacagtgaggccgatggcctttcggagaggaccacgcccagcaaggcccagaaatcgccccagaagattgccaagaaatacaagagtgccatctgccgggtcactctgcttgatgcctcggagtatgagtgtgaggtggagaaacatggccggggccaggtgctgtttgacctggtctgtgaacacctcaacctcctagagaaggactacttcggcctgaccttctgtgatgctgacagccagaagaactggctggacccctccaaggagatcaagaagcagatccggagtagcccctggaattttgccttcacagtcaagttctacccgcctgatcctgcccagctgacagaagacatcacaagatactacctgtgcctgcagctgcgggcagacatcatcacgggccggctgccatgctcctttgtcacgcatgccctactgggctcctacgctgtgcaggctgagctgggtgactatgatgctgaggagcatgtgggcaactatgtcagcgagctccgcttcgcccctaaccagacccgggagctggaggagaggatcatggagctgcataagacatatagggggatgaccccgggagaagcagaaatccacttcttagagaatgccaagaagctttccatgtacggagtagacctgcaccatgccaaggactctgagggcatcgacatcatgttaggcgtttgtgccaatggcctgctcatctaccgggaccggctgagaatcaaccgctttgcctggcccaagatcctcaagatctcctacaagaggagtaacttctatatcaagatccggcctggggagtatgagcaatttgagagcacaattggctttaagctcccaaaccaccggtcagccaagagactgtggaaggtctgcatcgagcatcatacattcttccggctggtgtcccctgagcccccacccaagggcttcctggtgatgggctccaagttccggtacagtgggaggacccaggcacagactcgccaggccagcgccctcattgaccggcctgcacccttctttgagcgttcttccagcaaacggtacaccatgtcccgcagccttgatggagcagagttctcccgcccagcctcggtcagcgagaaccatgatgcagggcctgacggtgacaagcgggatgaggatggcgagtctggggggcaacggtcagaggctgaggagggagaggtcaggactccaaccaagatcaaggagctaaagccggagcaggaaaccacgccgagacacaagcaggagttcttagacaagccagaagatgtcttgctgaagcaccaggccagcatcaatgagctcaaaaggaccctgaaggagcccaacagcaaactcatccaccgggatcgagactgggaacgggagcgcaggctgccctcctcccccgcctccccctcccccaagggcacccctgagaaagccaatgagagagcagggctgagggagggctccgaggagaaagtcaaaccaccacgtccccgggccccagagagtgacacaggcgatgaggaccaggaccaggagagggacacggtgttcctgaaggacaaccacctggccattgagcgcaagtgctccagcatcacggtcagctctacgtctagcctggaggctgaggtggacttcacggtcattggtgactaccatggcagcgccttcgaagacttctcccgcagcctgcctgagctcgaccgggacaaaagcgactcggacactgagggcctgctgttctcccgggatctcaacaagggggcccccagccaggatgatgagtctgggggcattgaggacagcccggatcgaggggcctgctccaccccggatatgccccagtttgagcccgtgaaaacagaaaccatgactgtcagcagtctggccattagaaagaagattgagccggaggccgtactgcagaccagagtctccgctatggataacacccagcaggttgatgggagtgcctcagtggggagggagttcatagcaaccactccctccatcaccacggagaccatatcgaccaccatggagaacagtctcaagtccgggaagggggcagctgccatgatcccaggcccacagacggtggccacggaaatccgttctctttctccgatcatcgggaaagatgtcctcaccagcacctacggcgccactgcggaaaccctctcaacctccaccaccacccatgtcaccaaaactgtgaaaggagggttttctgagacaaggatcgagaagcgaatcatcattactggggatgaagatgtcgatcaagaccaggccctggctttggccatcaaggaggccaaactgcagcatcctgatatgctggtaaccaaagctgtcgtatacagagaaacagacccatccccagaggagagggacaagaagccacaggaatcctgacctctgtgaagagatcctggcatttctggtccaacccaagccagagaaccattaagaaggggccttcattctggattctccgacgcaacactgacgtcccagctgcgacgtactgtcactgatgagagactgggaagggaaaagcatatatatatagatatatagagatatagatatatatacaggaaacaccgcatccttgcactgctgctggggctggcagagcagttggctgacagcaacaaccgacatctgaacacctacatttcctttgcagacaaattgaagaactggtgggatttttttcaagaaaaaaaattatataataactataatcccttgctcacccctttcccccgccaaataagaaacgcaagccagaccacgatgattgtagaagtccctcccgccctggttctgcacgttacagttagcagacgagcaattccatttgttcttctccagcatctctaaggcccacttgaatgcaaaggaaaacacttgcacagcaaagcaagagaagtcacagcagcaagacacgcacagtcaaccattttccgagaaaaaaagaaaattccccacttggaaagaaagaggaggaacactggattcttactttctggatcttgacactgggctgcaaaacctaccttcctctctcccgcctcccctcaccctcaactctcaatgtcttgctgtcattttctgtctcggctccctcctcccccttcccccttcccccaccccacacccttcaccctctgtgtcctggtccttctgagggccactgcagatgactctcctttgaaatgagaaaaagaaaagaaagcaagaacagaaaacgaagccacaggaagggaagtagacattgtatgcttatggtttctcattatgaaggtgcagcttgtaggaggtttgtacggatgtgctttgaagttatgtatattacatataacaggaaaaaatattaaaataaacagtgctggtaagtatgaagctgacattctaaaattataattatctgactgtgattgatgtatcctgaggttcctagatctcactgaactggcccagctaaggagacctggactctgggtgtgggttggctcacagtaggggctgacgggttcagtgtagtaatactgtgtgtggtgtttgtaattggttgattggtggggaggggtggggggccctaatggagaggtgtgggtttggcaagaaagaagcaacacagatgtcgtccccaaaatgccagttcaagacaccttctccctgcccccctggtagtaacagtcagggcctggtctgtgctcaggtactgggtcccagtctgggactctgctgctgaagttgccacagtagaggtccctggcttagtccttatctccctacggggcttgccttggttttcagtcttctctctctttctctcttttttttttttttgccacattctgcccttccctgaccccattgtaataaccaactccatatccaaagggaggtggtgctctcagccattgtagaagatggtggctttaacctgactgtctaaaaattcccagctaagccttttcctctactctcttccttgttctgaatcatttcttcttctcaggccaaagtagccatggtaaggaggcttcatggggcagaccctgaaagatcaaaactgcatttgcaaagccctcccctgtcccaggacaaagctgagactgacgggtgatgttgctcataggctccagctctgcataagaccttggcttggagacctccctctcagtcaacagctgaactctgagcttgtgcccagaaattaccccaagaccacaggaacccttcaagaagctcccatcacaagcttggcattgctctctgccacacgtgggcttcctcaggcttgtctgccacaagctacttctctgagctcagaaagtgccccttgatgagggaaaatgtcccactgcactgcgaatttctcagttccattttacctcccagtcctccttctaaaccagttaataaattcattccacaagtatttactgattacctgcttgtgccagggactattctcaggctgaagaaggtgggaggggagggcggaacctgaggagccacctgagccagctttatatttcaaccatggctggcccatctgagagcatctccccactctcgccaacctatcggggcatagcccagggatgcccccaggcggcccaggttagatgcgtccctttggcttgtcagtgatgacatacaccttagctgcttagctggtgctggcctgaggcagggcaggaaatcagaatagcatttgcttctctgggcaaatgggaagttcagcggggcagcagaatcagtggcattccccctggtgcaggccggtgggtccactccaactccccctgagtgtagcagcacactttccatacaccaggttctttctacaatcctggtggaaaagccacagaaccttcttcctgcccttcttgagagttccccctctttctgggtcaagagctggagtggtggctccatcctctctgggccacttcggtctaggaactcatctttgcaggaaccaggagtcctgagcacactgaacacacctcagagggaggatccttgttgtggattttgcacctggctttggggcaggggtgaagtgaccaggcttagcttgtggagtttatgggccaccagggtttggggaaatcaccatcccgcggatgctgtgacctcccttctacggagatgcaggcagtgccacgagggaggaggggacctgcaaagctagaatctagggcactgtttcctccccatccttctctttgtagagaatagagacgtttgtcttgtctgtcttcaacctacttttccttttctcttttttgtttctcatcctctctgtgccacctctccacccaggaggccatgtagcatagtggaaaaagtccctgagggcggttaggagttctgggtgaccatcctggctcagctcctaactcaccatgtgacatcaggctatccccattccccctcttgggcctcagtttcccgacttgcaaaataagcagaaagaaccagatgctctccagggtctttttctactttgctatctcatgggtcttcattttctcttattttgttttctctggatcttttccatctgagggtacaggaagtaccaggacctgtttcagtttttgaatcctgcaagcacattccaagactggcctgaaactgcatgagcaacatcactcgaaataattttttttttcaaaagcaccttaacaaccaattgcgatgctgtcctgttcctttttactcacacccttctctcctttctcgtccccatgctcccccacctcagtgctccgtgctgtatgcgtgtgctctctgttcttgtatactcaatataagtgaaataaatgtgtttgatgctgaaccata

SEQ ID NO: 172861 - protein, 423 aa, Artificial Sequence
  derived and/or modified sequence
MVFSNNDEGLINKKLPKELLLRIFSFLDIVTLCRCAQISKAWNILALDGSNWQRIDLFNFQTDVEGRVVENISKRCGGFLRKLSLRGCIGVGDSSLKTFAQNCRNIEHLNLNGCTKITDSTCYSLSRFCSKLKHLDLTSCVSITNSSLKGISEGCRNLEYLNLSWCDQITKDGIEALVRGCRGLKALLLRGCTQLEDEALKHIQNYCHELVSLNLQSCSRITDEGVVQICRGCHRLQALCLSGCSNLTDASLTALGLNCPRLQILEAARCSHLTDAGFTLLARNCHELEKMDLEECILITDSTLIQLSIHCPKLQALSLSHCELITDDGILHLSNSTCGHERLRVLELDNCLLITDVALEHLENCRGLERLELYDCQQVTRAGIKRMRAQLPHVKVHAYFAPVTPPTAVAGSGQRLCRCCVIL

SEQ ID NO: 172862 - protein, 339 aa, Artificial Sequence
  derived and/or modified sequence
MYIALVWILFVMWTFAQNCRNIEHLNLNGCTKITDSTCYSLSRFCSKLKHLDLTSCVSITNSSLKGISEGCRNLEYLNLSWCDQITKDGIEALVRGCRGLKALLLRGCTQLEDEALKHIQNYCHELVSLNLQSCSRITDEGVVQICRGCHRLQALCLSGCSNLTDASLTALGLNCPRLQILEAARCSHLTDAGFTLLARNCHELEKMDLEECILITDSTLIQLSIHCPKLQALSLSHCELITDDGILHLSNSTCGHERLRVLELDNCLLITDVALEHLENCRGLERLELYDCQQVTRAGIKRMRAQLPHVKVHAYFAPVTPPTAVAGSGQRLCRCCVIL

SEQ ID NO: 172863 - protein, 133 aa, Artificial Sequence
  derived and/or modified sequence
MDLEECILITDSTLIQLSIHCPKLQALSLSHCELITDDGILHLSNSTCGHERLRVLELDNCLLITDVALEHLENCRGLERLELYDCQQVTRAGIKRMRAQLPHVKVHAYFAPVTPPTAVAGSGQRLCRCCVIL

SEQ ID NO: 172864 - DNA, 3847 bp, Artificial Sequence
  derived and/or modified sequence
gggcggggcgcctggctggcgtcaccaggacaacgggcgtcgccggcgccgtgtgacttcgggctgtgggctcgctcgcggctcttcggccatggttttctcaaacaatgatgaaggccttattaacaaaaagttacccaaagaacttctgttaagaatattttccttcttggatatagtaactttgtgccgatgtgcacagatttccaaggcttggaacatcttagccctggatggaagcaactggcaaagaatagatctttttaactttcaaacagatgtagagggtcgagtggtggaaaatatctcgaagcgatgcggtggattcctgaggaagctcagcttgcgaggctgcattggtgttggggattcctccttgaagacctttgcacagaactgccgaaacattgaacatttgaacctcaatggatgcacaaaaatcactgacagcacgtgttatagccttagcagattctgttccaagctgaaacatctggatctgacctcctgtgtgtctattacaaacagctccttgaaggggatcagtgagggctgccgaaacctggagtacctgaacctctcttggtgtgatcagatcacgaaggatggcatcgaggcactggtgcgaggttgtcgaggcctgaaagccctgctcctgaggggctgcacacagttagaagatgaagctctgaaacacattcagaattactgccatgagcttgtgagcctcaacttgcagtcctgctcacgtatcacggatgaaggtgtggtgcagatatgcaggggctgtcaccggctacaggctctctgcctttcgggttgcagcaacctcacagatgcctctcttacagccctgggtttgaactgtccgcgactgcaaattttggaggctgcccgatgctcccatttgactgacgcaggttttacacttttagctcggaattgccacgaattggagaagatggatcttgaagaatgcatcctgataaccgacagcacactcatccagctctccattcactgtcctaaactgcaagccctgagcctgtcccactgtgaactcatcacagatgatgggatcctgcacctgagcaacagtacctgtggccatgagaggctgcgggtactggagttggacaactgcctcctcatcactgatgtggccctggaacacctagagaactgccgaggcctggagcgcctcgagctgtacgactgccagcaggttacccgtgcaggcatcaagcggatgcgggctcagctccctcatgtcaaagtccacgcctactttgctcccgtcaccccaccgacagcagtggcaggaagtggacagcgactgtgcaggtgctgtgtcattctctgacagcagctgcctgggcccaaggggtgatgaggcatcctttcctctagaagacctgagtcttcctgaccgactccaccatcacccaatctgttgattctccattgggaaaggcatttacaggtaaaagacttctgtatggattgcagttactctggtgatagttttcacctttattctgctgtgaaacaatcaaatcaaagccttgtgtcagttaacacatgacaagtggtctcaatgcagctaggaccatgccagaaacctggatctcttaagagattggtacctacctaggtacgaaagttctacccttggcatactcagcattcctcaaaaagaccatcagtgttagcacaaactgagcagaaaaaataagctgttgattttctacctgatacttaagccagtggcctactttaattcacaattccattttgattagcaggacttttccactttgaagataaatagcaactttatcaaagtgactgtactgcaaattaattcataatgcctgatagttttatatatagagacttatgtggaaggcatgttaataggtttccatgagacaccaaagaaaagaggactctatactgggtggagcagggtcttcacctttttgtttctgtcaacttgtcatatacacctccagggaccaaaaacaaaagcagctcggagtctgtgttgcctgattggaaagtagaagctctggtgtatgctacagcacataacacatttttactaaaggaaaaaagctaattatgtccatgcctctcgtaaaactggggggaaccttaaagagaaagaactaaggcttaagttatctgtagtataatcaattagaagtaatgaatggatgcatgtaaaatggatgtgattttttttcaagcttattttgaaatcttaaaaatcaggttacaccatagctactcaaaagttttacacacttaaaactcagatcagtaagtgttggtaccttttagactcataaaattgaataaaccattgcaatgctttaaaaaaaattaagtcagagggttttattgctatgattttatggcagacacatccaagcaaaaccattttccaaatgcagaccttcctgatgttatctgaaatctgataaaatgaccctactctctgctgtggttcattcttgctccatgctgtccatatttatgatctttattaagaacctgtcaatcagtcatcaccaccttcattgtaaacttaggtgttcatggtggctggcccttccaaacaaccactcccccaaactgaagggccagagctcatgagaaacttaaaagtgaaacggcaaaagcaagatgtgttcccatgactaccaatacctttattaggcagttttagaagtgtttttaaggatatattatgtcagctgcattctaggaagagaagcagattatatatatatataatctccccataaacggacttagcacaattatcatcagagtaagcattaaagtcattttattgccttatgatatattccagtattccttggtctaaaaattgtgtggataccatagcagttagttaaatatacatttatacccactgtttgttgtggaagagatgatgggggaggaggactgatgcaggaagcaacttcaataaatgagcatataacagacttgcttcagtgattatgaattagtttagtttctattaaaaaaaattaacttaaggctggccacggtggttcatgcctataatcccagcacttggggaggccaaggcgggtggatcacctgaggtcaggagtttgagaccagcctggccaacacagtaaaaccccatctctactgaaaatacaaaaattagccgggcgtggtgctgggcacctgtaatctcagctactcgggaggctgaagcaggagaaatgctggaacccaggaggcggaggtggcagtgagccgagattgtgccattgcactccatccagcccaggagacaacagtgagactccatcatcatctcaaaacaaaacaaacaaacaaacaaaacaaaccaccagagccttctatacatgattgatttcttttgagccaggatacaacctatcatcagtcacagctattggacttgatgctcaatgatccatggcctcatttacaaaacaggagaacctcttgtaagaaaatcaggtttgcaggctgggcacggtggctcacgcctgtaatcccagcactttgggaggcagaggcgggcggatcgtgagatcaggagatcaagaccatcctggctaacacagtgaaaccccgtctctactaaaaatacaaaaaaaattagccgggcatagtggcgggtgcctgtagtcccagctactcaggagactgaggcagaagaatggcgtgaacccgggaggcagagcttgcagtgagccgagattgcgccactgcactccagcctgggtgacagagccagactccgtctcaaaaaaaaaaaaaaaaaagaaaa

SEQ ID NO: 172865 - DNA, 1618 bp, Artificial Sequence
  derived and/or modified sequence
acaacgggcgtcgccggcgccgtgtgacttcgggctgtgggctcgctcgcggctcttcggccatggttttctcaaacaatgatgaaggccttattaacaaaaagttacccaaagaacttctgttaagaatgctgttcagcttgttgttaaattttacttggtctaatccagaatgtactaagtatgtacatagcattggtctggattctttttgtaatgtggacctttgcacagaactgccgaaacattgaacatttgaacctcaatggatgcacaaaaatcactgacagcacgtgttatagccttagcagattctgttccaagctgaaacatctggatctgacctcctgtgtgtctattacaaacagctccttgaaggggatcagtgagggctgccgaaacctggagtacctgaacctctcttggtgtgatcagatcacgaaggatggcatcgaggcactggtgcgaggttgtcgaggcctgaaagccctgctcctgaggggctgcacacagttagaagatgaagctctgaaacacattcagaattactgccatgagcttgtgagcctcaacttgcagtcctgctcacgtatcacggatgaaggtgtggtgcagatatgcaggggctgtcaccggctacaggctctctgcctttcgggttgcagcaacctcacagatgcctctcttacagccctgggtttgaactgtccgcgactgcaaattttggaggctgcccgatgctcccatttgactgacgcaggttttacacttttagctcggaattgccacgaattggagaagatggatcttgaagaatgcatcctgataaccgacagcacactcatccagctctccattcactgtcctaaactgcaagccctgagcctgtcccactgtgaactcatcacagatgatgggatcctgcacctgagcaacagtacctgtggccatgagaggctgcgggtactggagttggacaactgcctcctcatcactgatgtggccctggaacacctagagaactgccgaggcctggagcgcctcgagctgtacgactgccagcaggttacccgtgcaggcatcaagcggatgcgggctcagctccctcatgtcaaagtccacgcctactttgctcccgtcaccccaccgacagcagtggcaggaagtggacagcgactgtgcaggtgctgtgtcattctctgacagcagctgcctgggcccaaggggtgatgaggcatcctttcctctagaagacctgagtcttcctgaccgactccaccatcacccaatctgttgattctccattgggaaaggcatttacaggtaaaagacttctgtatggattgcagttactctggtgatagttttcacctttattctgctgtgaaacaatcaaatcaaagccttgtgtcagttaacacatgacaagtggtctcaatgcagctaggaccatgccagaaacctggatctcttaagagattggtacctacctaggtacgaaagttctacccttggcatactcagcattcctcaaaaagaccatcagtgttagcacaaactgagcagaaaaaataagctgttgattttctacctgatacttaagccagtggcctacttt

SEQ ID NO: 172866 - DNA, 1556 bp, Artificial Sequence
  derived and/or modified sequence
agctacagtgcaggactacacctacctgccaacttttcccatgggccttcaattagtacattggaataggagttcggatgctggggcaagggaaagagagctaagaagggtcctgctgaggttttctcaaacaatgatgaaggccttattaacaaaaagttacccaaagaacttctgttaagaatgctgttcagcttgttgttaaattttacttggtctaatccagaatgtactaagtatgtacatagcattggtctggattctttttgtaatgtgaatattttccttcttggatatagtaactttgtgccgatgtgcacagatttccaaggcttggaacatcttagccctggatggaagcaactggcaaagaatagatctttttaactttcaaacagatgtagagggtcgagtggtggaaaatatctcgaagcgatgcggtggattcctgaggaagctcagcttgcgaggctgcattggtgttggggattcctccttgaagacctttgcacagaactgccgaaacattgaacatttgaacctcaatggatgcacaaaaatcactgacagcacgtgttatagccttagcagattctgttccaagctgaaacatctggatctgacctcctgtgtgtctattacaaacagctccttgaaggggatcagtgagggctgccgaaacctggagtacctgaacctctcttggtgtgatcagatcacgaaggatggcatcgaggcactggtgcgaggttgtcgaggcctgaaagccctgctcctgaggggctgcacacagttagaagatgaagctctgaaacacattcagaattactgccatgagcttgtgagcctcaacttgcagtcctgctcacgtatcacggatgaaggtgtggtgcagatatgcaggggctgtcaccggctacaggctctctgcctttcgggttgcagcaacctcacagatgcctctcttacagccctgggtttgaactgtccgcgactgcaaattttggaggctgcccgatgctcccatttgactgacgcaggttttacacttttagctcggaattgccacgaattggagaagatggatcttgaagaatgcatcctgataaccgacagcacactcatccagctctccattcactgtcctaaactgcaagccctgagcctgtcccactgtgaactcatcacagatgatgggatcctgcacctgagcaacagtacctgtggccatgagaggctgcgggtactggagttggacaactgcctcctcatcactgatgtggccctggaacacctagagaactgccgaggcctggagcgcctcgagctgtacgactgccagcaggttacccgtgcaggcatcaagcggatgcgggctcagctccctcatgtcaaagtccacgcctactttgctcccgtcaccccaccgacagcagtggcaggaagtggacagcgactgtgcaggtgctgtgtcattctctgacagcagctgcctgggcccaaggggtgatgaggcatcctttcctctagaagacctgagtcttcctgaccgactc

SEQ ID NO: 172867 - DNA, 1272 bp, Artificial Sequence
  derived and/or modified sequence
atggtcttttccaacaacgacgagggtctaatcaacaagaaactccctaaggaactccttctgagaatcttctcatttctggatatcgtaaccctttgtaggtgcgcccagatatctaaggcatggaatattctggccttagacgggagcaactggcaacgcatcgacctgtttaattttcagacagacgtggaaggtcgtgtcgtggaaaacatcagcaaaaggtgcggaggtttcctgagaaagcttagcctgcgaggttgtatcggcgtgggagatagctctttaaaaacctttgcccagaattgtcgtaacattgaacatctgaacttgaatggatgtacgaaaatcaccgacagcacctgttatagcttgtcacgattttgtagcaagcttaagcacctcgacctgacctcttgtgtatccatcacaaactcctcgctgaagggtatatcagagggttgccggaatcttgaataccttaatctgagctggtgcgaccaaattactaaggatggcattgaggctctggtcagggggtgcagaggtctgaaggccctcctgcttcgaggatgtacccagctagaagatgaagccctaaagcacatccaaaattactgtcacgagctcgttagtctcaatctgcaatcgtgctcacggatcactgatgagggggtggtgcagatctgccgcggctgccatcgcctccaagcactgtgcctctccggttgttctaatctgacggatgcctcactgaccgcgctggggctgaattgccctcggctgcaaatcctggaagcagcccgatgctctcacttgactgatgctgggtttacactgttagccaggaactgtcacgaactcgaaaagatggacctggaggagtgtatcttaataaccgatagcacactgatacagttgtcaatccactgccccaaactgcaagcgcttagtcttagtcattgcgagctcattaccgacgatggtatcctgcatcttagcaactcaacttgtggccacgaacggctcagagtgctggaacttgataattgtctcctcatcaccgatgtagcgttggagcacctcgagaattgtaggggcctggaaaggttggagctctatgactgccaacaggtgacgagagccgggattaaaagaatgcgagctcagttaccccacgtcaaagtgcacgcatattttgctcctgtgaccccgcccacggctgtagccgggtccggacagcgactgtgtagatgttgcgtgatcttgtag

SEQ ID NO: 172868 - DNA, 1020 bp, Artificial Sequence
  derived and/or modified sequence
atgtacattgccttggtgtggatcttgtttgtgatgtggacatttgcccagaattgtagaaatatcgagcatctgaatctaaacgggtgtaccaaaattacagactctacatgttacagtctgtcccgcttttgttccaaattgaagcatctggatctcactagttgcgtgtccataaccaactcttcactgaaaggcatttccgagggttgtaggaatctggagtacctcaacttgtcttggtgtgaccagattacaaaagacggaatcgaggccctggttcggggctgtagagggctgaaggcattgttacttcggggctgcactcagctggaggatgaggctctgaaacacatccaaaactattgtcacgaactcgtgtcattgaatctgcagtcatgttctcggatcacagatgagggggtggtccagatctgtcgggggtgccacaggctgcaggcactgtgcctaagcgggtgtagtaatctgacagacgcatcactgacggcactcggcctgaactgtccgcgcctccagattttagaggccgcgaggtgttcgcacttgactgatgcaggcttcacccttctggcgagaaactgtcatgaactggaaaagatggatctcgaggaatgcatcctaattaccgacagcactttgattcagctgtccattcactgtccaaagctgcaggctctgagcctatcccattgcgaacttattaccgacgatggcatcctacaccttagcaattcaacatgcggccacgaacgtctcagggtactggagctggacaactgtctcttgattaccgacgtggctctggagcatttggaaaactgcaggggcctggaacgcttagagctttatgactgccaacaagtgaccagggccggaatcaagcggatgagggcacagctgcctcacgttaaggtccatgcctactttgccccggtgacgcctcccaccgctgtggcgggctccggccagcggctctgccgctgttgcgtaatactctag

SEQ ID NO: 172869 - DNA, 1272 bp, Artificial Sequence
  derived and/or modified sequence
atggtgttcagcaacaatgatgagggcctcatcaacaagaagctgcccaaggagctgctgctgcgcatcttctccttcctggacatcgtgaccctgtgccgctgtgcccagatcagcaaggcctggaacatcctggccctggatggcagcaactggcagagaattgacctcttcaacttccagacagatgtggagggccgggtggtggagaacatcagcaagagatgtggcggcttcctgaggaagctgagcctgcggggctgcattggagtgggggacagcagcctgaagacctttgcccagaactgcaggaacatcgagcacctgaacctgaatggctgcaccaagatcacagacagcacctgctacagcctgagccgcttctgcagcaagctgaagcacctggacctgaccagctgtgtgtccatcaccaacagcagcctgaagggcatcagcgagggctgcaggaacctggagtacctgaacctgtcctggtgtgaccagatcaccaaggatggcatcgaggccctggtgcggggctgccggggcctgaaggccctgctgctgcggggctgcacccagctggaggatgaggccctgaagcacatccagaactactgccacgagctggtgtccctgaacctgcagagctgcagccgcatcacagatgaaggagtggtgcagatctgccggggctgccaccggctgcaggccctgtgcctgagcggctgcagcaacctgacagatgccagcctgacagccctgggcctgaactgcccccggctgcagatcctggaggccgcccgctgcagccacctgacagatgctggcttcaccctgctggccaggaactgccacgagctggagaagatggacctggaggagtgcatcctgatcacagacagcaccctcatccagctgagcatccactgccccaagctgcaggccctgagcctgagccactgtgagctgatcacagatgatggcatcctgcacctgagcaacagcacctgtggccacgagcggctgcgggtgctggagctggacaactgcctgctgatcacagatgtggccctggagcacctggagaactgccggggcctggagcggctggagctgtatgactgccagcaggtgacccgggccggcatcaagaggatgagggcccagctgccccacgtgaaggtgcacgcctactttgcccctgtgaccccacccacagctgtggccggcagcggccagaggctgtgccgctgctgcgtcatcctgtag

SEQ ID NO: 172870 - DNA, 1020 bp, Artificial Sequence
  derived and/or modified sequence
atgtacatcgccctggtgtggatcctgtttgtgatgtggacctttgcccagaactgcaggaacatcgagcacctgaacctgaatggctgcaccaagatcacagacagcacctgctacagcctgagccgcttctgcagcaagctgaagcacctggacctgaccagctgtgtgtccatcaccaacagcagcctgaagggcatcagcgagggctgcaggaacctggagtacctgaacctgtcctggtgtgaccagatcaccaaggatggcatcgaggccctggtgcggggctgccggggcctgaaggccctgctgctgcggggctgcacccagctggaggatgaggccctgaagcacatccagaactactgccacgagctggtgtccctgaacctgcagagctgcagccgcatcacagatgaaggagtggtgcagatctgccggggctgccaccggctgcaggccctgtgcctgagcggctgcagcaacctgacagatgccagcctgacagccctgggcctgaactgcccccggctgcagatcctggaggccgcccgctgcagccacctgacagatgctggcttcaccctgctggccaggaactgccacgagctggagaagatggacctggaggagtgcatcctgatcacagacagcaccctcatccagctgagcatccactgccccaagctgcaggccctgagcctgagccactgtgagctgatcacagatgatggcatcctgcacctgagcaacagcacctgtggccacgagcggctgcgggtgctggagctggacaactgcctgctgatcacagatgtggccctggagcacctggagaactgccggggcctggagcggctggagctgtatgactgccagcaggtgacccgggccggcatcaagaggatgagggcccagctgccccacgtgaaggtgcacgcctactttgcccctgtgaccccacccacagctgtggccggcagcggccagaggctgtgccgctgctgcgtcatcctgtag

SEQ ID NO: 172871 - DNA, 1272 bp, Artificial Sequence
  derived and/or modified sequence
atggtgttcagcaacaacgacgagggcctgatcaacaagaagctgccaaaagaacttctgctccgtatcttcagttttctggacattgtgactctttgtaggtgtgcccagattagtaaggcgtggaatatccttgctctggacgggtccaactggcagcgtattgatctgttcaacttccaaaccgatgtcgagggccgagtagtcgaaaacatctcaaaacggtgcggaggatttctccggaagttatcattacgcgggtgcatcggggtcggcgactcgtcgctcaagacctttgcccagaactgcagaaacattgagcatctcaacctgaacggatgtacaaagataaccgattccacatgttactcactctccaggttttgcagcaaattgaaacatttggacttgacctcgtgtgtatcaatcaccaattcttctctgaaggggatatcagagggctgccggaacctagagtacctgaacctgagttggtgcgaccaaatcaccaaagatggaatcgaagctttggttcgtggctgccgcgggctgaaagctctcttgctgcgcgggtgtacacaactggaggacgaagccctgaagcatatccagaattactgccacgagctggtgtctttgaacctccagtcatgctcccggataaccgatgaaggtgtggtgcagatctgcagaggctgccatagactgcaggccctgtgtctgtccggttgtagcaacctgactgatgcgagtctcacagctctcgggttgaactgcccaaggctgcagatcctggaagcggctagatgtagccatctgacggacgcaggctttacccttctagcaaggaactgtcatgagctggagaaaatggacctcgaagagtgtattttaatcaccgattccactctgatacaactcagtatccactgccctaaactgcaagcactcagtctgagccactgtgagttaattactgatgacggtatcttgcacctgagtaattctacgtgcggtcacgagaggctgcgcgtacttgagcttgataactgtctgctgatcacagacgttgccctggaacatttggagaactgcaggggcctagagcggctggagctgtacgattgccagcaagtgacaagagcggggattaagcgcatgcgcgcccagctgccccacgtgaaagttcacgcatactttgcgccagtaactccaccgaccgccgtggccggaagcggccaacggctgtgtcggtgttgtgtcattctctag

SEQ ID NO: 172872 - DNA, 1020 bp, Artificial Sequence
  derived and/or modified sequence
atgtacatcgccctggtgtggatcctgttcgtgatgtggaccttcgcacaaaactgcagaaatatcgaacacttgaacctcaatggctgtacaaaaattacggactcaacctgttactcattgagccgcttctgcagcaagttgaaacatctagatttaacatcctgcgtttcaattacaaacagcagcctcaagggaatctctgaagggtgtcgaaatttggagtacctgaacctgagctggtgcgaccagatcacgaaggacggtattgaagccctcgtgagagggtgcagaggactcaaggccctgttgttgcggggctgcacacaacttgaggatgaggccttaaaacacattcagaactattgtcacgagctggtcagcctcaatcttcaatcctgctccagaatcactgatgagggcgtggttcaaatctgcagaggctgtcacaggttgcaggcgttgtgcctctcaggttgtagcaatttaacagatgcgagcctgactgcactgggccttaactgccctcgacttcagatccttgaagcagccaggtgctcccacttgacagatgcaggattcactcttctcgccagaaattgccatgagctagagaagatggacctggaagagtgtattctcatcaccgacagcaccctgattcagctgagcatacactgtccaaaattgcaggctctgagtctttcccactgtgaactcattacggatgacggtatactgcacctgagtaactcaacatgtggccacgagagacttagggtgctggaattagacaactgccttctcatcaccgatgtggctctcgagcatctagaaaattgtaggggactggaaagactcgagctttacgattgccagcaggtcacgagggccggtataaaaaggatgagggctcagctgccccatgtgaaggtccacgcatactttgcaccggtgactcctcccactgcggtagccggcagtggccagagactttgtcggtgctgcgttatcttgtag

SEQ ID NO: 172873 - DNA, 1272 bp, Artificial Sequence
  derived and/or modified sequence
atggtattttccaataatgacgaaggcctgattaacaaaaagctgccaaaagaactgctgctgaggatatttagttttcttgatatcgtgacactgtgcaggtgcgcccagatcagcaaagcctggaatattctggccctggacgggtcgaactggcaaagaattgacctgttcaatttccaaacagatgtagagggccgagtcgtggagaacatctccaagcggtgcgggggattcctccgtaaactgtccttaagaggatgtataggcgtaggcgattcctctttgaagacattcgctcagaactgccggaatatcgaacatctgaaccttaacggatgcacgaagatcactgatagtacctgttattctctcagtcgcttctgttctaaactaaagcacctggacctgaccagctgcgtgtcaatcactaactcatctctcaaaggaatatcagaaggatgtaggaacttggaatacctcaacctgagctggtgcgatcagatcacgaaggacggaatagaagctcttgttcgcggatgccgtgggctgaaggctttgttgcttcgaggatgtacccagctcgaggacgaggcactcaagcatatccaaaactactgccacgagcttgtttccttgaacttgcaaagctgctcacggattaccgacgagggagtcgttcagatttgcaggggatgtcaccggcttcaggcactgtgtctgtcaggatgttcaaacctgacagacgcctctttaacagctcttggactgaattgtcctcggctgcagattttggaggcagcacgctgttctcatctgaccgatgcaggattcactctgttagcaagaaattgtcatgagttagagaaaatggacttagaggagtgcatcctgatcactgatagcaccctgatccaactgagcatccactgccctaagctgcaggcgctgagcctgtctcactgcgaactgattacagatgacgggatcctacacttatccaattctacatgtgggcatgagcgccttcgcgtgctcgaactggacaactgtctcctgatcacagatgtggccctggagcacctcgaaaactgcaggggtttggagagactcgaactgtacgactgtcagcaggtcacccgcgctggcatcaaaagaatgcgcgcacagctcccccatgtgaaggtgcacgcctatttcgccccagttacgccccctacagcggttgctggcagcggtcaacggctgtgccggtgttgtgtcattctgtag

SEQ ID NO: 172874 - DNA, 1020 bp, Artificial Sequence
  derived and/or modified sequence
atgtatatagctctcgtgtggatcctctttgttatgtggactttcgctcagaactgtcgaaatattgagcacttgaacctgaacggatgcactaaaatcaccgacagtacgtgttactcgctgagccggttctgcagcaaacttaagcatctggacctgacatcttgtgtgagcatcaccaatagctctctgaagggcatatcagaggggtgccgtaacttggagtatctgaacctgagctggtgtgaccagattaccaaagacgggatagaagccctggttcgagggtgccgtggactgaaggccctgctgcttcggggatgtactcagctcgaggatgaagccctcaaacatatccagaattattgccatgagctggtcagcttgaacctgcagtcatgcagcagaatcaccgatgagggggttgtgcaaatttgtcggggatgccaccggctccaggccctgtgcctctcaggttgcagcaacttgaccgacgcttccctgaccgccttgggattgaactgccctaggctgcagatactcgaggccgcacgatgcagccacttgaccgatgcaggcttcactttactcgcaaggaactgccatgagctggaaaaaatggacctcgaggagtgcattctcattacagactcaacccttatccagttgtctatacactgccccaagttgcaggccctgtctttgtctcattgcgaactgattacggatgatggcattctccacttaagcaatagtacgtgtgggcacgaaaggttacgtgttctggagcttgacaactgtcttcttatcaccgacgtagctttggaacacttagagaattgcagaggcctagagcggttagagctatatgactgccagcaggtgacccgtgccggaattaagaggatgcgagcccaactgcctcacgtgaaggtccacgcttatttcgcccctgtgacccccccaaccgctgtcgccggttcaggccaacgactatgtcgctgctgcgtcatcttatag

SEQ ID NO: 172875 - DNA, 1272 bp, Artificial Sequence
  derived and/or modified sequence
atggtgttcagcaacaacgacgagggcctgatcaacaagaagctgcccaaggagctgctgctgagaatcttcagcttcctggacatcgtgaccctgtgcagatgcgcccagatcagcaaggcctggaacatcctggccctggacggcagcaactggcagagaatcgacctgttcaacttccagaccgacgtggagggcagagtggtggagaacatcagcaagagatgcggcggcttcctgagaaagctgagcctgagaggctgcatcggcgtgggcgacagcagcctgaagaccttcgcccagaactgcagaaacatcgagcacctgaacctgaacggctgcaccaagatcaccgacagcacctgctacagcctgagcagattctgcagcaagctgaagcacctggacctgaccagctgcgtgagcatcaccaacagcagcctgaagggcatcagcgagggctgcagaaacctggagtacctgaacctgagctggtgcgaccagatcaccaaggacggcatcgaggccctggtgagaggctgcagaggcctgaaggccctgctgctgagaggctgcacccagctggaggacgaggccctgaagcacatccagaactactgccacgagctggtgagcctgaacctgcagagctgcagcagaatcaccgacgagggcgtggtgcagatctgcagaggctgccacagactgcaggccctgtgcctgagcggctgcagcaacctgaccgacgccagcctgaccgccctgggcctgaactgccccagactgcagatcctggaggccgccagatgcagccacctgaccgacgccggcttcaccctgctggccagaaactgccacgagctggagaagatggacctggaggagtgcatcctgatcaccgacagcaccctgatccagctgagcatccactgccccaagctgcaggccctgagcctgagccactgcgagctgatcaccgacgacggcatcctgcacctgagcaacagcacctgcggccacgagagactgagagtgctggagctggacaactgcctgctgatcaccgacgtggccctggagcacctggagaactgcagaggcctggagagactggagctgtacgactgccagcaggtgaccagagccggcatcaagagaatgagagcccagctgccccacgtgaaggtgcacgcctacttcgcccccgtgaccccccccaccgccgtggccggcagcggccagagactgtgcagatgctgcgtgatcctgtag

SEQ ID NO: 172876 - DNA, 1020 bp, Artificial Sequence
  derived and/or modified sequence
atgtacatcgccctggtgtggatcctgttcgtgatgtggaccttcgcccagaactgcagaaacatcgagcacctgaacctgaacggctgcaccaagatcaccgacagcacctgctacagcctgagcagattctgcagcaagctgaagcacctggacctgaccagctgcgtgagcatcaccaacagcagcctgaagggcatcagcgagggctgcagaaacctggagtacctgaacctgagctggtgcgaccagatcaccaaggacggcatcgaggccctggtgagaggctgcagaggcctgaaggccctgctgctgagaggctgcacccagctggaggacgaggccctgaagcacatccagaactactgccacgagctggtgagcctgaacctgcagagctgcagcagaatcaccgacgagggcgtggtgcagatctgcagaggctgccacagactgcaggccctgtgcctgagcggctgcagcaacctgaccgacgccagcctgaccgccctgggcctgaactgccccagactgcagatcctggaggccgccagatgcagccacctgaccgacgccggcttcaccctgctggccagaaactgccacgagctggagaagatggacctggaggagtgcatcctgatcaccgacagcaccctgatccagctgagcatccactgccccaagctgcaggccctgagcctgagccactgcgagctgatcaccgacgacggcatcctgcacctgagcaacagcacctgcggccacgagagactgagagtgctggagctggacaactgcctgctgatcaccgacgtggccctggagcacctggagaactgcagaggcctggagagactggagctgtacgactgccagcaggtgaccagagccggcatcaagagaatgagagcccagctgccccacgtgaaggtgcacgcctacttcgcccccgtgaccccccccaccgccgtggccggcagcggccagagactgtgcagatgctgcgtgatcctgtag

SEQ ID NO: 172877 - protein, 428 aa, Artificial Sequence
  derived and/or modified sequence
MKRGGRDSDRNSSEEGTAEKSKKLRTTNEHSQTCDWGNLLQDIILQVFKYLPLLDRAHASQVCRNWNQVFHMPDLWRCFEFELNQPATSYLKATHPELIKQIIKRHSNHLQYVSFKVDSSKESAEAACDILSQLVNCSLKTLGLISTARPSFMDLPKSHFISALTVVFVNSKSLSSLKIDDTPVDDPSLKVLVANNSDTLKLLKMSSCPHVSPAGILCVADQCHGLRELALNYHLLSDELLLALSSEKHVRLEHLRIDVVSENPGQTHFHTIQKSSWDAFIRHSPKVNLVMYFFLYEEEFDPFFRYEIPATHLYFGRSVSKDVLGRVGMTCPRLVELVVCANGLRPLDEELIRIAERCKNLSAIGLGECEVSCSAFVEFVKMCGGRLSQLSIMEEVLIPDQKYSLEQIHWEVSKHLGRVWFPDMMPTW

SEQ ID NO: 172878 - DNA, 1287 bp, Artificial Sequence
  derived and/or modified sequence
atgaagagaggcggcagagacagcgacagaaacagcagcgaggagggcaccgccgagaagagcaagaagctgagaaccaccaacgagcacagccagacctgcgactggggcaacctgctgcaggacatcatcctgcaggtgttcaagtacctgcccctgctggacagagcccacgccagccaggtgtgcagaaactggaaccaggtgttccacatgcccgacctgtggagatgcttcgagttcgagctgaaccagcccgccaccagctacctgaaggccacccaccccgagctgatcaagcagatcatcaagagacacagcaaccacctgcagtacgtgagcttcaaggtggacagcagcaaggagagcgccgaggccgcctgcgacatcctgagccagctggtgaactgcagcctgaagaccctgggcctgatcagcaccgccagacccagcttcatggacctgcccaagagccacttcatcagcgccctgaccgtggtgttcgtgaacagcaagagcctgagcagcctgaagatcgacgacacccccgtggacgaccccagcctgaaggtgctggtggccaacaacagcgacaccctgaagctgctgaagatgagcagctgcccccacgtgagccccgccggcatcctgtgcgtggccgaccagtgccacggcctgagagagctggccctgaactaccacctgctgagcgacgagctgctgctggccctgagcagcgagaagcacgtgagactggagcacctgagaatcgacgtggtgagcgagaaccccggccagacccacttccacaccatccagaagagcagctgggacgccttcatcagacacagccccaaggtgaacctggtgatgtacttcttcctgtacgaggaggagttcgaccccttcttcagatacgagatccccgccacccacctgtacttcggcagaagcgtgagcaaggacgtgctgggcagagtgggcatgacctgccccagactggtggagctggtggtgtgcgccaacggcctgagacccctggacgaggagctgatcagaatcgccgagagatgcaagaacctgagcgccatcggcctgggcgagtgcgaggtgagctgcagcgccttcgtggagttcgtgaagatgtgcggcggcagactgagccagctgagcatcatggaggaggtgctgatccccgaccagaagtacagcctggagcagatccactgggaggtgagcaagcacctgggcagagtgtggttccccgacatgatgcccacctggtag

SEQ ID NO: 172879 - DNA, 3503 bp, Artificial Sequence
  derived and/or modified sequence
gtttgtggcccaggtgcaggaagcttacgcggtggcagccgctcgctgaggtagtctctcgcggcgccggggatccctgaacacagacagcgcgggactgagaaggaaagcttctttctgggcagccagagccgcaaaggtggagccgcgttggcgccctccgcgggaccagcgcctcggatgcgggcggagcgcggggggccgcggctgcgggagcgcgaagcggggggccaggggcgcctcatgtgagagccgcgggacctgcagccgccgccgtccccggagcacggggtggtgtgtgggggaagccgcccccggcagcaggatgaaacgaggaggaagagatagtgaccgtaattcatcagaagaaggaactgcagagaaatccaagaaactgaggactacaaatgagcattctcagacttgtgattggggtaatctccttcaggacattattctccaagtatttaaatatttgcctcttcttgaccgggctcatgcttcacaagtttgccgcaactggaaccaggtatttcacatgcctgacttgtggagatgttttgaatttgaactgaatcagccagctacatcttatttgaaagctacccatccagagctgatcaaacagattattaaaagacattcaaaccatctacaatatgtcagcttcaaggtggacagcagcaaggaatcagctgaagcagcttgtgatatactatcgcaacttgtgaattgctctttaaaaacacttggacttatttcaactgctcgaccaagctttatggatttaccaaagtctcactttatctctgcactgacagttgtgttcgtaaactccaaatccctgtcttcgcttaagatagatgatactccagtagatgatccatctctcaaagtactagtggccaacaatagtgatacactcaagctgttgaaaatgagcagctgtcctcatgtctctccagcaggtatcctttgtgtggctgatcagtgtcacggcttaagagaactagccctgaactaccacttattgagtgatgagttgttacttgcattgtcttctgaaaaacatgttcgattagaacatttgcgcattgatgtagtcagtgagaatcctggacagacacacttccatactattcagaagagtagctgggatgctttcatcagacattcacccaaagtgaacttagtgatgtatttttttttatatgaagaagaatttgaccccttctttcgctatgaaatacctgccacccatctgtactttgggagatcagtaagcaaagatgtgcttggccgtgtgggaatgacatgccctagactggttgaactagtagtgtgtgcaaatggattacggccacttgatgaagagttaattcgcattgcagaacgttgcaaaaatttgtcagctattggactaggggaatgtgaagtctcatgtagtgcctttgttgagtttgtgaagatgtgtggtggccgcctatctcaattatccattatggaagaagtactaattcctgaccaaaagtatagtttggagcagattcactgggaagtgtccaagcatcttggtagggtgtggtttcccgacatgatgcccacttggtaaaaactgcatgatgaatagcaccttaatttcaagcaaatgtattataattaaagttttatttgctgtagttctgatataattctactattttgtggcacagaaatttgatatcttcagtcagtatatgtaaagattgtttatcggaagacccatgaatgagttttggtcagaaaattccacttgtttccttagtgtaatagcagtcatatctccgaattttttttaatgtggttcggatgtgaaataaccagttatacgtattaaacagtttacagtctaaaggaaacaaaacctatatgttataatatccaagaagtactaataggttttctgaaatgttatattctctatgcatttaaaaaaaaatgtaaacttgacattttagggtcttcagttacacatacacctgttataaggtgtttaatatagctcaggaaagtgagcattttgtgagaaaaatgaatatatcatatctaatggaaaagattggatgaatgttctcaaatgttacaaagctgtttaaagaaaaaggtatatataagtaatcagaacacttagaagactgatagatgtcacacagtggtattatagaaggataatacagagccaagatcaaattaaaagacaataaatggaacagaagggaggcagtgtttagctttgtataaacttttaggtttgctctgtaatctgctaaaccatatacattcttttgtgatatgttattatgtatgtggcacttgaggcactgtatgtaaagtaaggaatgctttactagttctccttggttttatctttgtttaaactagctttaaagtattaaacaataattgaaatgaaaagcttacctattttaaaaagccaaatttaaataaatatagaactttaaaatgtttatcagttgtttccatgaaagaatattagtttccagtaaattttagtgatggctcactcacttttctattttggaattacatagttatgtaagtaaaatttttaaaaatcataaagggagcaccattgtacagtctagcataaacagcaaattttaaagaggacatatttaagttcataatcatatttttcagtaaatattgctcagtgaactggaaaactttaatagaaaaatgtctgcagttttgtgattgttaatttggttaaaccgatattttatattatttaagttaggtaacattttatattactttcatatgaataaaagtaatccatgcattgtagagtctataaaatgttgagttttaaaagatgatataaactttgatgctgggcactagtgctagtagatattactaccctcctgagggaaatcagaaatgatttaaccccggtggaatacattaattcttaaagcggctcttttcagtggtgtgacttttagattgtgtctcagtggttgaggaagctaacagtcttagatctacttttaaaacggatggccttcttaagaataaagcaaaaggtgattttctacataatttttgctttccaaaagtgatgatatgctctcctacagcaacatatgagaagaaaaaaggcttatctagattcgaaaattaacagcaattatagtaatatatcccctccttctaaatagtaaaaagctctgattgtacaagaattacctgtgctagtcaagttgttgtttttccttgaacaactttggaaaaatggatttgacagtacataatcagttctactaaccaaagcttgtatttggaaatttactttttgtacaaattgaattatataatgcttaaaatactttgtcactttataagcaaaatgcatagtacttaatttgtttatactgtaaagtatatgttaaatgcttttatcactttgagaataaaaagttactaatgctgttgta

SEQ ID NO: 172880 - DNA, 1287 bp, Artificial Sequence
  derived and/or modified sequence
atgaagcggggagggcgtgacagtgatcgcaactcaagcgaggaagggacagcggaaaagtcaaagaaactccggaccacaaacgagcactcacagacctgcgactgggggaacctacttcaggatattattctgcaggtgtttaaatacctgccgttgctggatagagcacacgcctcccaggtgtgtaggaactggaatcaggttttccacatgccagacctctggcgctgttttgagtttgagctcaatcagccagccacttcttacctgaaggctacacatcctgagttaatcaagcagattatcaaacggcattccaaccaccttcaatacgtcagtttcaaggtcgactcatctaaagagtcagcagaagccgcctgtgacatactgagccaactagtcaattgcagcctgaaaaccttaggccttatttcgaccgcgcggccgagctttatggatttgccgaaatcacattttatcagtgcacttacagtggtattcgttaacagcaaatctttatcctctctgaagatagacgacacccctgtagatgatcccagtctgaaagtactcgtcgccaataatagcgataccctgaagctgctgaagatgagctcttgtccccatgtcagtccagctggaattctgtgcgtcgcagaccagtgtcatggcttgcgtgagcttgccctcaactaccatttgctgtccgatgagctgttactggctctaagctctgagaagcatgtacgcctcgagcatctgaggatcgacgttgtctctgaaaatccagggcagacccacttccacaccatccagaagagctcctgggacgcgttcatacgccatagtccgaaggtaaatttagtgatgtacttcttcctgtatgaagaagaattcgatccgttctttcggtacgagattccagccacccacctgtatttcggtaggagtgtctccaaagatgtgttaggacgtgtcgggatgacatgccctcggttagtcgagctagtggtctgtgctaacgggcttaggcctctggatgaggaacttatcagaatcgcggaacgatgtaaaaatctctcggcaattgggttaggtgagtgcgaggtcagctgctccgcatttgttgagttcgtgaagatgtgcggcgggcggttgtcccaactgtctataatggaagaggtgttgattccagatcagaagtacagcctggagcagatccactgggaggtgtcaaagcacttgggcagagtctggtttccggatatgatgcccacttggtag

SEQ ID NO: 172881 - DNA, 1287 bp, Artificial Sequence
  derived and/or modified sequence
atgaagaggggcggccgggacagcgacaggaacagcagcgaggagggcacagctgagaagagcaagaagctgcggaccaccaatgagcacagccagacctgtgactggggcaacctgctgcaggacatcatcctgcaggtgttcaagtacctgcccctgctggaccgggcccacgccagccaggtgtgcaggaactggaaccaggtgttccacatgccagacctgtggcgctgctttgaatttgagctgaaccagcctgccaccagctacctgaaggccacccaccctgagctgatcaagcagatcatcaagaggcacagcaaccacctgcagtatgtgtccttcaaggtggacagcagcaaggagagcgctgaggccgcctgtgacatcctgagccagctggtgaactgcagcctgaagaccctgggcctcatcagcacagcccggcccagcttcatggacctgcccaagagccacttcatcagcgccctgactgtggtgtttgtgaacagcaagagcctgagcagcctgaagattgatgacacccctgtggatgaccccagcctgaaggtgctggtggccaacaacagcgacaccctgaagctgctgaagatgagcagctgcccccacgtgtccccagctggcatcctgtgtgtggccgaccagtgccacggcctgcgggagctggccctgaactaccacctgctgagtgatgagctgctgctggccctgagcagcgagaagcacgtgcggctggagcacctgagaattgatgtggtgtctgagaaccctggccagacccacttccacaccatccagaagagctcctgggatgccttcatccgccacagccccaaggtgaacctggtgatgtacttcttcctgtatgaggaggagtttgaccccttcttccgctatgagatcccagccacccacctgtacttcggccgctctgtgtccaaggatgtgctgggccgggtgggcatgacctgcccccggctggtggagctggtggtgtgtgccaacggcctgcggcccctggatgaggagctgatcagaattgctgagcgctgcaagaacctgagcgccatcggcctgggggagtgtgaggtgtcctgcagcgcctttgtggagtttgtgaagatgtgtggcggccgcctgagccagctgagcatcatggaggaggtgctgatcccagaccagaagtacagcctggagcagatccactgggaggtgtccaagcacctgggccgggtgtggttcccagacatgatgcccacctggtag

SEQ ID NO: 172882 - DNA, 1287 bp, Artificial Sequence
  derived and/or modified sequence
atgaagcggggcggccgggacagcgaccggaacagcagcgaggaggggacagctgagaaatccaagaagttgcgaacaacaaatgagcactcacagacctgtgactgggggaacttgcttcaagatattattctccaggtgtttaagtatttgccactactggaccgggcccatgcttcgcaagtgtgccggaactggaatcaggtctttcatatgccagatctgtggcgatgctttgagtttgagcttaaccagcctgcaacttcttatctgaaagcgacccacccagagctgattaagcagatcatcaagcggcactccaatcacctgcagtacgtttcctttaaggtggacagctctaaggagtccgctgaggcggcttgcgacatcttatcacagctggtcaattgtagtcttaagaccctgggcctgatcagcactgctagacccagtttcatggaccttccgaagtcacattttatctccgctctgactgtagtcttcgtcaattctaaaagcctgtcgagcctcaaaattgatgacacccctgtggatgatccatcccttaaggttctcgttgctaacaatagcgacactcttaagctgctgaaaatgagctcatgccctcatgtgagtccagcgggaatcctgtgcgtggccgaccagtgccacggactgagggagctcgctctgaactaccacctcttgtccgatgaactcctcctggccctttcctccgaaaagcacgtgagactcgaacacctgagaatagatgtcgtctccgagaatcccggccaaacacattttcacacgattcagaaatcctcctgggatgcctttattcggcattcacctaaggtcaacctggtgatgtattttttcctctacgaagaggagtttgaccctttttttcgttatgaaatcccagctacacatctgtactttggccggtctgtttccaaagacgttctgggccgggtaggaatgacgtgtcctcggttagtagaactcgtcgtgtgcgccaacggacttcgcccgctggacgaggaactgatcaggatagcagagagatgtaaaaacctgtcagcaatcggactcggggaatgcgaggtgagctgttccgcctttgtggagtttgtaaaaatgtgcggagggaggctctcccagctgtctatcatggaagaagtgcttataccagatcagaagtattccctcgaacagattcattgggaggtgagcaagcatctgggtagagtttggtttcccgacatgatgcccacgtggtag

SEQ ID NO: 172883 - DNA, 1287 bp, Artificial Sequence
  derived and/or modified sequence
atgaagcgcggaggacgagacagtgataggaactcctctgaggaggggacggccgagaaaagcaagaagctaagaaccaccaacgaacatagccaaacctgcgactgggggaacttattgcaagacataatcctgcaggtctttaaatacttgccactcctggacagggcccacgctagccaagtatgtaggaactggaaccaggtgtttcatatgccagatctgtggaggtgctttgaatttgagctgaaccagccagctacctcatacctgaaagccactcatcccgagctcatcaagcaaatcatcaaaagacattccaaccacctacaatatgtgtcttttaaggtggactcaagcaaagagagtgccgaggctgcctgcgacatactctctcagctcgtgaactgtagccttaagacgttgggtctcatatcgactgccaggccaagcttcatggatctgcccaagtcacactttatcagcgcactgacagtggtgtttgtgaattctaaatcattatcatccctgaaaattgacgatacccctgtagatgatccatctctaaaagtgctcgtagcaaataactcggacacactgaaactgcttaaaatgtcaagttgcccacatgtaagcccagcgggtattttgtgtgtggctgaccagtgtcacggcctacgggagctggcactgaactatcatctgctctccgacgagttactgctggccctcagttcagagaagcatgtgcgcttggagcacctccgcattgacgtggtttccgaaaatccaggccagacacacttccacactatccaaaaatcctcctgggatgctttcatccgacactcccccaaagtaaatctcgtcatgtacttcttcctgtatgaggaagagtttgatcccttttttaggtatgaaatcccagccactcacctatactttgggcgttccgtttcaaaggacgtgctaggcagggttggaatgacatgtcccagactggtcgaactcgtcgtctgcgcgaatggcttgcgtccattagacgaagaacttattcggatcgccgagaggtgtaagaatctctctgccatagggttaggagagtgcgaggtgagctgctccgcgtttgttgaatttgtgaaaatgtgcggaggtaggctctcgcagttatccattatggaagaagtcctgatcccagaccaaaagtatagtttggagcagatccattgggaggtctctaagcacctaggcagagtgtggttccctgatatgatgccaacatggtag

SEQ ID NO: 172884 - protein, 691 aa, Artificial Sequence
  derived and/or modified sequence
MAPFPEEVDVFTAPHWRMKQLVGLYCDKLSKTNFSNNNDFRALLQSLYATFKEFKMHEQIENEYIIGLLQQRSQTIYNVHSDNKLSEMLSLFEKGLKNVKNEYEQLNYAKQLKERLEAFTRDFLPHMKEEEEVFQPMLMEYFTYEELKDIKKKVIAQHCSQKDTAELLRGLSLWNHAEERQKFFKYSVDEKSDKEAEVSEHSTGITHLPPEVMLSIFSYLNPQELCRCSQVSMKWSQLTKTGSLWKHLYPVHWARGDWYSGPATELDTEPDDEWVKNRKDESRAFHEWDEDADIDESEESAEESIAISIAQMEKRLLHGLIHNVLPYVGTSVKTLVLAYSSAVSSKMVRQILELCPNLEHLDLTQTDISDSAFDSWSWLGCCQSLRHLDLSGCEKITDVALEKISRALGILTSHQSGFLKTSTSKITSTAWKNKDITMQSTKQYACLHDLTNKGIGEEIDNEHPWTKPVSSENFTSPYVWMLDAEDLADIEDTVEWRHRNVESLCVMETASNFSCSTSGCFSKDIVGLRTSVCWQQHCASPAFAYCGHSFCCTGTALRTMSSLPESSAMCRKAARTRLPRGKDLIYFGSEKSDQETGRVLLFLSLSGCYQITDHGLRVLTLGGGLPYLEHLNLSGCLTITGAGLQDLVSACPSLNDEYFYYCDNINGPHADTASGCQNLQCGFRACCRSGE

SEQ ID NO: 172885 - protein, 565 aa, Artificial Sequence
  derived and/or modified sequence
MKEEEEVFQPMLMEYFTYEELKDIKKKVIAQHCSQKDTAELLRGLSLWNHAEERQKFFKYSVDEKSDKEAEVSEHSTGITHLPPEVMLSIFSYLNPQELCRCSQVSMKWSQLTKTGSLWKHLYPVHWARGDWYSGPATELDTEPDDEWVKNRKDESRAFHEWDEDADIDESEESAEESIAISIAQMEKRLLHGLIHNVLPYVGTSVKTLVLAYSSAVSSKMVRQILELCPNLEHLDLTQTDISDSAFDSWSWLGCCQSLRHLDLSGCEKITDVALEKISRALGILTSHQSGFLKTSTSKITSTAWKNKDITMQSTKQYACLHDLTNKGIGEEIDNEHPWTKPVSSENFTSPYVWMLDAEDLADIEDTVEWRHRNVESLCVMETASNFSCSTSGCFSKDIVGLRTSVCWQQHCASPAFAYCGHSFCCTGTALRTMSSLPESSAMCRKAARTRLPRGKDLIYFGSEKSDQETGRVLLFLSLSGCYQITDHGLRVLTLGGGLPYLEHLNLSGCLTITGAGLQDLVSACPSLNDEYFYYCDNINGPHADTASGCQNLQCGFRACCRSGE

SEQ ID NO: 172886 - DNA, 3385 bp, Artificial Sequence
  derived and/or modified sequence
accgggcgcgcgcgccgacggggcgggcgcatgcgcaagggggcgcgccgcctctgccccgcggcgagggtgtctatggagaggcggcggccgcggctgctgaggcggaggctgaggcagtggcgatggcgccctttcctgaagaagtggacgtcttcaccgccccacactggcggatgaagcagctggtggggctctactgcgacaagctttctaaaaccaatttttccaacaacaacgatttccgtgctcttctgcagtctttgtatgctactttcaaggagttcaaaatgcatgagcagattgaaaatgaatacattattggtttgcttcaacaacgcagccagaccatttataatgtacattctgacaataaactctccgagatgcttagcctctttgaaaagggactgaagaatgttaagaatgaatatgaacagttaaattatgcaaaacaactgaaagagagattggaggcttttacaagagattttcttcctcacatgaaagaggaagaggaggtttttcagcccatgttaatggaatattttacctatgaagagcttaaggatattaaaaagaaagtgattgcacaacactgctctcagaaggatactgcagaactccttagaggtcttagcctatggaatcatgctgaagagcgacagaagttttttaaatattccgtggatgaaaagtcagataaagaagcagaagtgtcagaacactccacaggtataacccatcttcctcctgaggtaatgctgtcaattttcagctatcttaatcctcaagagttatgtcgatgcagtcaagtaagcatgaaatggtctcagctgacaaaaacgggatcgctttggaaacatctttaccctgttcattgggccagaggtgactggtatagtggtcccgcaactgaacttgatactgaacctgatgatgaatgggtgaaaaataggaaagatgaaagtcgtgcttttcatgagtgggatgaagatgctgacattgatgaatctgaagagtctgcggaggaatcaattgctatcagcattgcacaaatggaaaaacgtttactccatggcttaattcataacgttctaccatatgttggtacttctgtaaaaaccttagtattagcatacagctctgcagtttccagcaaaatggttaggcagattttagagctttgtcctaacctggagcatctggatcttacccagactgacatttcagattctgcatttgacagttggtcttggcttggttgctgccagagtcttcggcatcttgatctgtctggttgtgagaaaatcacagatgtggccctagagaagatttccagagctcttggaattctgacatctcatcaaagtggctttttgaaaacatctacaagcaaaattacttcaactgcgtggaaaaataaagacattaccatgcagtccaccaagcagtatgcctgtttgcacgatttaactaacaagggcattggagaagaaatagataatgaacacccctggactaagcctgtttcttctgagaatttcacttctccttatgtgtggatgttagatgctgaagatttggctgatattgaagatactgtggaatggagacatagaaatgttgaaagtctttgtgtaatggaaacagcatccaactttagttgttccacctctggttgttttagtaaggacattgttggactaaggactagtgtctgttggcagcagcattgtgcttctccagcctttgcgtattgtggtcactcattttgttgtacaggaacagctttaagaactatgtcatcactcccagaatcttctgcaatgtgtagaaaagcagcaaggactagattgcctaggggaaaagacttaatttactttgggagtgaaaaatctgatcaagagactggacgtgtacttctgtttctcagtttatctggatgttatcagatcacagaccatggtctcagggttttgactctgggaggagggctgccttatttggagcaccttaatctctctggttgtcttactataactggtgcaggcctgcaggatttggtttcagcatgtccttctctgaatgatgaatacttttactactgtgacaacattaacggtcctcatgctgataccgccagtggatgccagaatttgcagtgtggttttcgagcctgctgccgctctggcgaatgacccttgacttctgatctttgtctacttcatttagctgagcaggctttctttcatgcactttactcatagcacatttcttgtgttaaccatccctttttgagcgtgacttgttttggccccatttcttacaacttcagaaatcttaatttaccagtgaattgtaatgttgtttctcttgcaaattatacttttggtttagaaagggattaggtcttttcaaaagggtgagaacagtcttacatttttcttttaaatgaaatgctttaaagaatgttggtaatgccatgtcatttaaagtatttcatagataattttgagttttaaagtccatggaggtgattggttctctttacacattaacactgtaccaagctttgcagatcttttccgacacacatgtctgaagacttattttcaaagacagcacatttttggaaactaatctcttttccgtaatatttcctttatttcaatgattctcagaaggccaattcaaacaaacccacatttaaggttctttaggattatagaataaattggcttctgagtgttagctcagtgagctaggaaagcaccaatcgatatttgtttcctttagggatactttgttctcaccactgtccctatgtcatcaaatttgggagagattttttaaaataccacaatcatttgaagaaatgtataaataaaatctactttgaggactttaccaagtaatactgttgtgttgtgatttttattataaatctcaatccaggtttactttagtatagaataggactacatactttgtctttggacctcccatgaacttattaccctgacaaatagttttagacagatactgaattttattgagctgaattttctttttgaaatgagttattcagtagtcaaaatttgaatccgtaagtatatctactttgctttgttaaaacatcatgagagtggaggcctgccacccagaaaggcacatactagtgccttttagtacaattttatgtcatgtagaagaaaatggcaatgttcctcctattgatacagatacaggcatatgtcatcttattgcgttttgctttattgcactttgcaaataatgcattttttacaaatggaaggtttatggcaactctgcgttgagccagtctattggtgccatgtttccaataaaacttctcctttca

SEQ ID NO: 172887 - DNA, 2076 bp, Artificial Sequence
  derived and/or modified sequence
atggccccctttcccgaagaagttgatgtgttcaccgctcctcactggcggatgaaacagctggttggactatactgtgacaaactatccaaaactaatttttccaacaataacgacttcagggccctcctgcaatcattgtacgccacatttaaagagtttaagatgcacgagcagatcgaaaatgagtatatcattgggctgctgcagcaacggagtcagacgatttacaacgttcatagtgacaacaaactttcagagatgttgtctttattcgagaaaggtcttaaaaacgtgaaaaatgaatatgagcagctgaattacgccaagcaactcaaagaaaggctggaagcttttaccagagacttcctgccgcacatgaaagaggaggaggaagtgtttcaacccatgcttatggaatactttacttacgaagagctaaaagatatcaaaaagaaagtgatcgcacagcactgtagccaaaaggatacggctgagcttctgcgcggtctgagcttgtggaaccacgccgaggagcgccagaagtttttcaaatactcagtggatgaaaagtctgataaagaggccgaggttagcgagcacagcacggggattacgcatttgcctccagaagtgatgttatcaattttttcttatctgaacccccaggagttgtgtaggtgttcacaggtcagtatgaaatggtcacagctcactaaaactggctcactatggaagcatctataccctgttcattgggctaggggtgactggtactccgggcctgccaccgagctggacaccgagcccgatgatgaatgggtgaagaacaggaaggatgagtctcgtgcattccacgagtgggatgaggatgcagacatcgatgagtcagaggagagtgctgaggaaagcattgccattagtattgctcagatggaaaaacgcctactgcacgggctgatacacaatgtgctgccctacgtcggtacctcagtgaagacgttggtcttggcttacagcagcgcggtgtccagcaagatggtacgccagattcttgaactttgtcctaacctagaacatctggacctgacccagacggatatcagcgacagcgccttcgactcttggtcctggcttggctgctgccagagcttacggcatttagatttgtcgggctgcgagaaaattaccgatgtggctctggaaaagattagtagggcccttggcatcctcacgagtcatcagtcagggttcttaaagaccagcactagcaagatcacctccactgcttggaagaacaaagatatcacgatgcagagcaccaagcaatacgcctgccttcacgacctgaccaataagggcattggtgaggagattgataatgaacatccatggaccaagcccgtgagttccgagaatttcaccagtccctacgtctggatgttagacgccgaagacctggccgatatcgaggacacggtggagtggcgacaccgaaatgtcgagtcattgtgtgtgatggagactgcttctaatttctcatgttcaacttcaggctgttttagcaaagatattgtgggcctgcgcaccagtgtgtgttggcagcagcactgtgcaagcccagctttcgcgtactgcggacattccttctgctgtacaggaacggccctgcggacaatgagctccctgcctgagtccagtgcaatgtgcaggaaagccgccaggaccaggcttccacgaggaaaggacctgatttacttcgggagtgagaagtccgatcaggaaaccggcagggttctcttgttccttagcttgagtggctgctatcagattacggaccacggattacgagtgttaacccttggcggtggcctgccttacctcgagcacctgaacctgtcaggatgcctgactatcactggcgccggtctgcaggacctcgtatccgcttgcccatccctgaacgacgaatatttctattattgcgacaacatcaacggaccccatgctgataccgcatctggatgtcagaatctgcaatgcgggttcagggcctgttgccgcagtggcgaatag

SEQ ID NO: 172888 - DNA, 2076 bp, Artificial Sequence
  derived and/or modified sequence
atggcccccttccctgaggaggtggatgtgttcaccgccccccactggaggatgaagcagctggtgggcctgtactgtgacaagctgagcaagaccaacttcagcaacaacaatgacttccgggccctgctgcagagcctgtatgccaccttcaaggagttcaagatgcatgagcagattgaaaatgagtacatcatcggcctgctgcagcagaggagccagaccatctacaacgtgcacagcgacaacaagctgtctgagatgctgagcctgtttgagaagggcctgaagaatgtgaagaatgaatatgagcagctgaactatgccaagcagctgaaggagcggctggaggccttcacccgggacttcctgccccacatgaaggaggaggaggaggtgttccagcccatgctgatggagtacttcacctatgaggagctgaaggacatcaagaagaaggtgattgcccagcactgcagccagaaggacacagctgagctgctgcggggcctgagcctgtggaaccacgccgaggagcggcagaagttcttcaagtacagcgtggatgagaagagtgacaaggaggccgaggtgtctgagcacagcacaggcatcacccacctgcccccagaggtgatgctgagcatcttctcctacctgaacccccaggagctgtgccgctgcagccaggtgtccatgaagtggagccagctgaccaagacaggcagcctgtggaagcacctgtaccctgtgcactgggcccggggggactggtacagcggccctgccacagagctggacacagagccagatgatgagtgggtgaagaacaggaaggatgagagccgggccttccacgagtgggatgaagatgctgacattgatgaaagtgaggagagcgctgaggagagcatcgccatcagcatcgcccagatggagaagaggctgctgcacggcctcatccacaacgtgctgccctacgtgggcacctctgtgaagaccctggtgctggcctacagcagcgctgtgagcagcaagatggtgcggcagatcctggagctgtgccccaacctggagcacctggacctgacccagacagacatcagtgacagcgcctttgacagctggagctggctgggctgctgccagagcctgcggcacctggacctgagcggctgtgagaagatcacagatgtggccctggagaagatcagccgggccctgggcatcctgaccagccaccagagcggcttcctgaagaccagcaccagcaagatcaccagcacagcctggaagaacaaggacatcaccatgcagagcaccaagcagtatgcctgcctgcatgacctgaccaacaagggcattggagaggagattgacaatgagcacccctggaccaagcctgtgtcctctgagaacttcaccagcccctacgtgtggatgctggatgctgaggacctggccgacattgaagatactgtggagtggaggcacagaaatgtggagagcctgtgtgtgatggagacagccagcaacttcagctgcagcaccagcggctgcttcagcaaggacatcgtgggcctgcggacctctgtgtgctggcagcagcactgtgccagccctgcctttgcctactgcggccacagcttctgctgcacaggaacagccctgcggaccatgagcagcctgcctgagagcagcgccatgtgcaggaaggccgcccggacccggctgccccggggcaaggacctgatctactttggaagtgagaagagtgaccaggagaccggccgggtgctgctcttcctgagcctgagcggctgctaccagatcacagaccacggcctgcgggtgctgaccctgggcggcggcctgccctacctggagcacctgaacctgagcggctgcctgaccatcaccggggccggcctgcaggacctggtgtctgcctgccccagcctgaatgatgagtacttctactactgtgacaacatcaatggcccccacgccgacacagccagcggctgccagaacctgcagtgtggcttccgggcctgctgccgctctggagagtag

SEQ ID NO: 172889 - DNA, 2076 bp, Artificial Sequence
  derived and/or modified sequence
atggcccccttccccgaggaggtggacgtgttcaccgccccccactggcggatgaagcaactcgtcggcctgtattgcgataaactcagtaaaacgaatttctctaataacaacgacttcagagcactgctgcagtccctttacgcaacattcaaagagttcaagatgcacgagcagatagagaatgaatatattattgggctgctgcagcagcggagccaaacgatctacaacgtacacagtgacaacaagctcagcgagatgctgtccctcttcgaaaaaggcctgaagaacgttaagaatgaatacgagcagctgaattatgctaagcaactgaaggaaagactcgaagcatttacgagagattttctccctcacatgaaggaggaggaggaggtattccaaccaatgctgatggaatacttcacatacgaggagctcaaggatatcaaaaaaaaagtgattgcgcagcactgcagtcaaaaggacactgcagagttgctacggggcctgtcgctgtggaatcacgccgaggaaagacagaagttcttcaagtatagtgttgacgaaaagtctgataaggaagccgaggtgagtgagcacagtactggcattacacacttgccccctgaggtcatgctgtctatcttctcgtacctgaatccccaggagctgtgtagatgttctcaggtctcaatgaagtggtcccaactgacgaagaccggttctttgtggaaacacttatacccggtgcactgggcccgtggcgattggtattccggacctgcaactgagttggacaccgagccagacgatgagtgggtgaagaacaggaaggatgagtccagagccttccacgagtgggatgaagacgccgacattgacgagtcagaagaaagtgccgaggagagcattgctatcagtatcgcacagatggagaagaggctgcttcacggcctaatccacaatgtactgccatacgtgggtacaagcgtgaaaacattggtcctagcctatagttctgctgtgtcttccaaaatggtgaggcagatactggaactgtgccccaacctcgaacatctggacctgacacagacagacatatcggattctgccttcgacagttggtcctggttgggatgctgccagagcctgcggcaccttgatttgagcgggtgcgaaaagattaccgacgtcgccctcgagaagatcagcagggccctcggtatcttaacctcccatcagagcgggttcctgaaaacatcgaccagcaagatcacaagcaccgcttggaagaataaggacattaccatgcagagcacaaagcagtatgcttgtctccacgaccttactaacaaagggattggggaggaaatcgacaacgaacacccttggactaaacctgtcagttctgaaaacttcaccagcccctatgtgtggatgttggacgccgaagacctagccgatatcgaagataccgtcgaatggcggcacaggaatgtggagtctctgtgtgttatggagacagccagcaatttctcttgctctacttccggctgtttttcaaaagacatcgtgggtctgcgtactagcgtgtgctggcagcaacactgtgccagccctgctttcgcttattgcggtcattcattttgctgtactgggacagccctccggacaatgagctctctgccggagtccagcgccatgtgccgcaaagccgcacggaccaggcttccccgaggcaaagacctcatttacttcggtagcgaaaaatccgatcaagagacgggaagagtcctgctgttcttgtccctcagcggctgctaccagatcacagaccatggacttcgggtcctcacgctcggcggcggtctgccatatctcgaacacctgaacctatccggctgcctgacaatcacaggcgccggactgcaggatctggtgtccgcctgccctagtctcaatgacgaatatttctactattgtgacaatatcaacggaccccacgccgataccgcatcaggctgccaaaatctgcagtgtgggtttcgcgcgtgctgtcgctcaggggagtag

SEQ ID NO: 172890 - DNA, 2076 bp, Artificial Sequence
  derived and/or modified sequence
atggccccttttccagaggaagtggatgtgttcacagccccacactggaggatgaagcagctggtgggtctctactgcgacaagctgagtaagacaaattttagcaacaacaacgattttcgcgctcttctacagagtctatatgcaacatttaaggagtttaagatgcacgagcaaattgaaaatgaatacattataggccttttgcagcagcggagccagacaatttataacgtgcactcggacaataagctgtccgaaatgttatcattgttcgaaaaaggactgaagaatgtaaagaacgagtatgaacaactgaattacgctaaacaacttaaagagcggttggaggcttttactcgagacttccttccacatatgaaggaagaggaagaagtgtttcagcctatgctgatggagtatttcacttacgaagaacttaaagatattaaaaagaaagtgattgcgcaacattgtagccagaaggatacagccgagctcctgcgagggctctccctgtggaatcatgccgaggagagacagaagttcttcaagtactccgtagacgagaagagtgacaaagaagccgaagtgtccgagcattcgacaggtattacccatcttccccctgaagtaatgctgtccatattcagttaccttaacccccaggaactgtgtcgatgcagccaggtctcaatgaagtggtcccagcttaccaagaccgggtcactctggaaacatttatacccagtgcactgggcacgtggagattggtactctggtccggcaacagaactggatacagagccggatgacgagtgggtgaagaatcggaaggacgaaagccgtgcctttcacgaatgggacgaagacgccgacatcgatgagagcgaggagtctgccgaagagtccattgccatcagtattgcccagatggagaagcgccttcttcacgggttaatacacaacgtcctgccttatgtgggtacatctgtgaagaccctcgtactagcatactcttcagcagtttcctccaaaatggtccgacagattctcgaattgtgccctaatctggaacacttagacctgactcagactgacatcagtgatagtgccttcgactcctggagttggttgggctgctgccaaagcctccggcacctggacctctccggttgtgaaaagattaccgatgtcgccttagaaaaaatttcgagagccctgggaatcctgacatcacaccagtctggtttcctgaaaacttcaacttcaaagatcacgagtaccgcttggaagaataaggatataactatgcaaagtaccaaacagtatgcttgtctccatgacctcactaataaaggcattggtgaggagatagacaatgaacacccttggaccaaaccagtctccagcgagaacttcacttcaccatatgtgtggatgcttgatgccgaggacttggcggacattgaagataccgtggaatggcggcatcggaacgtggagtccctctgtgttatggaaaccgcaagtaactttagctgcagcacttcaggctgtttcagcaaagatatagttggtctccgcacctctgtttgctggcagcaacattgcgcctcccccgcttttgcctactgtgggcactccttttgttgtacagggaccgcgctgaggacaatgagcagcctgccggagagctctgccatgtgtcgtaaggccgcaaggacaaggctgccacggggaaaggacctcatctactttggcagcgagaagagcgatcaggaaacgggacgggtgctcctcttcctctcactctccggctgctaccaaatcactgatcacgggttgcgagtgctcacccttggaggcggattaccctacctggaacacctgaatctttcaggatgtcttacaattacgggagcagggttgcaggatctggtgtcggcttgcccctctctcaacgatgaatatttctactactgtgacaatattaacgggcctcacgccgacacagcttccgggtgccagaacctgcaatgcggatttagagcctgttgcagatctggggagtag

SEQ ID NO: 172891 - DNA, 2076 bp, Artificial Sequence
  derived and/or modified sequence
atggcccccttccccgaggaggtggacgtgttcaccgccccccactggagaatgaagcagctggtgggcctgtactgcgacaagctgagcaagaccaacttcagcaacaacaacgacttcagagccctgctgcagagcctgtacgccaccttcaaggagttcaagatgcacgagcagatcgagaacgagtacatcatcggcctgctgcagcagagaagccagaccatctacaacgtgcacagcgacaacaagctgagcgagatgctgagcctgttcgagaagggcctgaagaacgtgaagaacgagtacgagcagctgaactacgccaagcagctgaaggagagactggaggccttcaccagagacttcctgccccacatgaaggaggaggaggaggtgttccagcccatgctgatggagtacttcacctacgaggagctgaaggacatcaagaagaaggtgatcgcccagcactgcagccagaaggacaccgccgagctgctgagaggcctgagcctgtggaaccacgccgaggagagacagaagttcttcaagtacagcgtggacgagaagagcgacaaggaggccgaggtgagcgagcacagcaccggcatcacccacctgccccccgaggtgatgctgagcatcttcagctacctgaacccccaggagctgtgcagatgcagccaggtgagcatgaagtggagccagctgaccaagaccggcagcctgtggaagcacctgtaccccgtgcactgggccagaggcgactggtacagcggccccgccaccgagctggacaccgagcccgacgacgagtgggtgaagaacagaaaggacgagagcagagccttccacgagtgggacgaggacgccgacatcgacgagagcgaggagagcgccgaggagagcatcgccatcagcatcgcccagatggagaagagactgctgcacggcctgatccacaacgtgctgccctacgtgggcaccagcgtgaagaccctggtgctggcctacagcagcgccgtgagcagcaagatggtgagacagatcctggagctgtgccccaacctggagcacctggacctgacccagaccgacatcagcgacagcgccttcgacagctggagctggctgggctgctgccagagcctgagacacctggacctgagcggctgcgagaagatcaccgacgtggccctggagaagatcagcagagccctgggcatcctgaccagccaccagagcggcttcctgaagaccagcaccagcaagatcaccagcaccgcctggaagaacaaggacatcaccatgcagagcaccaagcagtacgcctgcctgcacgacctgaccaacaagggcatcggcgaggagatcgacaacgagcacccctggaccaagcccgtgagcagcgagaacttcaccagcccctacgtgtggatgctggacgccgaggacctggccgacatcgaggacaccgtggagtggagacacagaaacgtggagagcctgtgcgtgatggagaccgccagcaacttcagctgcagcaccagcggctgcttcagcaaggacatcgtgggcctgagaaccagcgtgtgctggcagcagcactgcgccagccccgccttcgcctactgcggccacagcttctgctgcaccggcaccgccctgagaaccatgagcagcctgcccgagagcagcgccatgtgcagaaaggccgccagaaccagactgcccagaggcaaggacctgatctacttcggcagcgagaagagcgaccaggagaccggcagagtgctgctgttcctgagcctgagcggctgctaccagatcaccgaccacggcctgagagtgctgaccctgggcggcggcctgccctacctggagcacctgaacctgagcggctgcctgaccatcaccggcgccggcctgcaggacctggtgagcgcctgccccagcctgaacgacgagtacttctactactgcgacaacatcaacggcccccacgccgacaccgccagcggctgccagaacctgcagtgcggcttcagagcctgctgcagaagcggcgagtag

SEQ ID NO: 172892 - protein, 532 aa, Artificial Sequence
  derived and/or modified sequence
MDDYSLDEFRRRWQEELAQAQAPKKRRRPEAAERRARRPENEMNDVPFFDIQLPYELAINIFQYLDRKELGRCAQVSKTWKVIAEDEVLWYRLCQQEGHLPDSSISDYSCWKLIFQECRAKEHMLRTNWKNRKGAVSELEHVPDTVLCDVHSHDGVVIAGYTSGDVRVWDTRTWDYVAPFLESEDEEDEPGMQPNVSFVRINSSLAVAAYEDGFLNIWDLRTGKYPVHRFEHDARIQALALSQDDATVATASAFDVVMLSPNEEGYWQIAAEFEVPKLVQYLEIVPETRRYPVAVAAAGDLMYLLKAEDSARTLLYAHGPPVTCLDVSANQVAFGVQGLGWVYEGSKILVYSLEAGRRLLKLGNVLRDFTCVNLSDSPPNLMVSGNMDGRVRIHDLRSGNIALSLSAHQLRVSAVQMDDWKIVSGGEEGLVSVWDYRMNQKLWEVYSGHPVQHISFSSHSLITANVPYQTVMRNADLDSFTTHRRHRGLIRAYEFAVDQLAFQSPLPVCRSSCDAMATHYYDLALAFPYNHV

SEQ ID NO: 172893 - DNA, 4648 bp, Artificial Sequence
  derived and/or modified sequence
acttccctgggcgggactgtctcgtggcacccggtggaaccgaggagaacgtggagcgccgggagcggcgaatatggacgactacagcctggatgagttccgtcggcgctggcaggaggagctggcgcaggcccaggcgccgaagaagcggcgacggcccgaggctgccgagaggcgggctcggcggccggagaatgaaatgaatgatgtgcctttctttgatatccaactgccttacgaattggcaatcaatatatttcagtatctggacaggaaagaactaggaagatgtgcacaggtgagcaagacgtggaaggtgattgcagaggatgaggtgctgtggtacaggctgtgccagcaggaagggcaccttccggatagcagcatctctgactattcttgctggaagctcatcttccaagagtgccgagccaaggaacacatgttacgaaccaactggaagaatcgcaaaggtgccgtgagcgagctggagcatgttcctgacacagttttgtgtgatgtgcattctcacgatggtgtggtcattgcgggatatacatcaggggatgtgagagtgtgggacacccgcacctgggactacgtagcccccttcctggaatcagaggacgaggaggatgagcctggaatgcagccaaatgtctcctttgtgaggataaacagctcgttggcagtagcagcttatgaggatgggtttcttaatatttgggatttaaggaccggaaagtaccctgttcatcgttttgagcacgatgcaagaatacaggcactagccctcagccaggacgatgcaaccgtggccacagcttctgcttttgatgtcgtgatgttatcccccaatgaggaggggtactggcagatagctgcggaatttgaagttccgaaactggttcagtaccttgaaatagttccagaaaccagaaggtaccctgtggcagtagccgctgctggagatctgatgtacctgctcaaagccgaagactccgccagaaccctcctttacgcccacggcccgcctgtcacatgtctagacgtctcggccaaccaagttgcttttggtgtacagggtctgggatgggtgtacgaaggaagcaagatcctggtgtatagcctggaagcaggacgccgcctcttgaagctgggtaacgttctccgtgacttcacgtgtgtcaacctcagcgacagccctcccaacctcatggtcagtggcaacatggacgggagggtgaggatccacgacctccgcagtggtaacatcgccctgtcgctctccgcccatcagctcagggtctctgctgtgcagatggatgactggaagatcgtcagtggaggcgaggaaggcctggtgtccgtgtgggattatcggatgaaccagaagctgtgggaggtgtattccgggcacccggtgcagcacatctcattcagcagccacagcctcatcacggccaacgtgccttaccagacggtaatgcgaaacgccgacctggacagcttcactactcacaggagacaccgggggctgatccgcgcctatgagtttgcggtggaccagctggccttccagagccctctccctgtctgccgttcatcctgtgacgccatggccactcactactacgacctcgcactggcctttccctataaccatgtttagggatgtgcctcagttgggagcaaggagaaaaatgggaagaaccagttttatccatcttaaaacgccaggcacctcttcacaggtggtaaacatttaggggaagaaagcagcccagggtgccatgcctgacagcacgcatctccctgacccctgcacttcccccagcgcctggggcaagctggcgtgtgccagggctcgagtcccacgtgctgccaactcaaacatagcctccttccccacccagctggccaccctggcctcagctccctcaggacgcctcagggatctcgctgcgcggtcctatacggtccctgcttagccagcttctgtgtgtccgccctcccagctccagccctgcaggccgtcttttccgtctccagccccttacctcttttcctccgagggcctttggatgtgcttgttcctggcctccaaggcaataacctccatgtccttttccctgtatttacttggggtgctcttctgtgacacttgccaccaccaccttccagtagcaagctggtagagctgtactttttcttcacagcttttaccatggtttataattatatacttatacagtttagtcatcaatgactattttgcttactattgtgtctatgatatgtgatacaaagcaaatattttctaaatattcattgactaaacagccatcaagatgaaacaggacaggagagaactgttcagtgtgatacagagctgccatttccaaagtattctggaagcaagccattgccttactcttgattttcaacagttctaaacagcaacagcatccacctaatataccttcagaatatcaaagcgaaaactgatagaactacaaagagaaataaaatccattctcacggcaggcaaatcagtgagaaaaatgtaaagatctggaggatttacttagtatcgctaacaagctggatccagtagatgcgtatggaatttcaaatacacatagacgatgcacaaaaaaccaccctgtacgaaggccacaaagaacagctcagatgcacaaagattcacaccatacaggccaaattatagaatcccccaaccccaagacactgcaccctatgggctataccctcaggcagggccctgcttttctaggaattgactccaatgcagaatagtgagaaatcaacaaaaagcaaaataagacaattccagacactcctgaatttacttggatttaaagaggttaataaaaacaaactataaactctctagactgggctgacagtaaaagcacagaatacaaaacccaggggatggggctgggaggggctgtgaggggctggcacctcagctcagaaaaggtagcagcaatcccaaagcagcagaaggcaggggttaaatcaggataaaaacagacatcagtggaatcgaaaaccaatagttagttaatataaagccagaaggttttgttttttttcaggtggggtctcgctctgtcacctagactagactggagtgcaatggcctgatctcggctcactgcaacctctgcctcccgagttcaagcaattctcctgcctcagcctcctgagtagctgggattacaggcgtccgctaccacaactggctaatttttacatttttagtagagacgggggatattgctatgttggccaggctggtctcaaacttctgacctcaaatgattgcctgcctcagcctcccaaagtgctgggattacaggtgtaagtcactgtacccagcccaaaagcagtttaaaaaaaaaaaagacaaaatatacaactcttgataaaacataaaggtacagtggtctatgaggaagagaaaaggtacctgaggatgcagaagtacctaccacatgggaaccgtttgtccacactcattccagagaaaaccgagtcctctcagttgcacacgtgtacgtatcagtgggaagtgcttgccattactccaaagcctagaaccttcacgtcatgaaggttctggaaggtttttcagattgcttaagatacgcagccattccatattcatctccaactacacaggggaacggagcagatagagctgcgactgggaagcgtcaccttcccgtccagagcgctttctttcagaccctgcctacctgcaggcagatggaccggagggttttctgcttcctttcaaccagataacttcctaagtggagatggcctgtaggtagcaaatgcaggattttgtttactttcatcatgtcatgtggtggtcagactgctcgctggtggcctcgctttagaaggttttcatcaagccccgccctttctctctcatagtcttaatgcgtctggaccactggggaaaatatttttcttttcaaaaagcagccccttcagtctgcgttcccagttcattttgcaggcgcattcgcccttcctagtttgcagcaattaaagataacggagtgtaaagtcattagacccagaattagagcagccagcagctggcccagtgtaaaaatgtcccaagtgtagcccctcccaccgcagagcctgtttctaacgtacctgccattcgtggaagtcgcctgggttttgtaaaggagaattttttggactcaagctgtcatcttcaagcacgccaacttcaggcagtgttttctactgcaaacctccacatcctggaatcaatcacactgacagggaaaggataaatgctcctttataagccaacatgtatccaaattaagcccccttacctttatccagaccctttcacaaacaagttctgagtttttagccaattgatcctctactttccttctttagtccctctcagggacgcctccatccccggctcccctaaaggtagaagatactcgagcatgctgccaggggagctggatggtgaaacacctgaagatctcatatcgcctctcaaaacactgtcggacttgctttctgctttatgatgtccgtagttgttctaatattaaatgctttgaatttc

SEQ ID NO: 172894 - DNA, 2243 bp, Artificial Sequence
  derived and/or modified sequence
acttccctgggcgggactgtctcgtggcacccggtggaaccgaggagaacgtggagcgccgggagcggcgaatatggacgactacagcctggatgagttccgtcggcgctggcaggaggagctggcgcaggcccaggcgccgaagaagcggcgacggcccgaggctgccgagaggcgggctcggcggccggagaatgaaatgaatgatgtgcctttctttgatatccaactgccttacgaattggcaatcaatatatttcagtatctggacaggaaagaactaggaagatgtgcacaggtgagcaagacgtggaaggtgattgcagaggatgaggtgctgtggtacaggctgtgccagcaggaagggcaccttccggatagcagcatctctgactattcttgctggaagctcatcttccaagagtgccgagccaaggaacacatgttacgaaccaactggaagaatcgcaaaggtgccgtgagcgagctggagcatgttcctgacacagttttgtgtgatgtgcattctcacgatggtgtggtcattgcgggatatacatcaggggatgtgagagtgtgggacacccgcacctgggactacgtagcccccttcctggaatcagaggacgaggaggatgagcctggaatgcagccaaatgtctcctttgtgaggataaacagctcgttggcagtagcagcttatgaggatgggtttcttaatatttgggatttaaggaccggaaagtaccctgttcatcgttttgagcacgatgcaagaatacaggcactagccctcagccaggacgatgcaaccgtggccacagcttctgcttttgatgtcgtgatgttatcccccaatgaggaggggtactggcagatagctgcggaatttgaagttccgaaactggttcagtaccttgaaatagttccagaaaccagaaggtaccctgtggcagtagccgctgctggagatctgatgtacctgctcaaagccgaagactccgccagaaccctcctttacgcccacggcccgcctgtcacatgtctagacgtctcggccaaccaagttgcttttggtgtacagggtctgggatgggtgtacgaaggaagcaagatcctggtgtatagcctggaagcaggacgccgcctcttgaagctgggtaacgttctccgtgacttcacgtgtgtcaacctcagcgacagccctcccaacctcatggtcagtggcaacatggacgggagggtgaggatccacgacctccgcagtggtaacatcgccctgtcgctctccgcccatcagctcagggtctctgctgtgcagatggatgactggaagatcgtcagtggaggcgaggaaggcctggtgtccgtgtgggattatcggatgaaccagaagctgtgggaggtgtattccgggcacccggtgcagcacatctcattcagcagccacagcctcatcacggccaacgtgccttaccagacggtaatgcgaaacgccgacctggacagcttcactactcacaggagacaccgggggctgatccgcgcctatgagtttgcggtggaccagctggccttccagagccctctccctgtctgccgttcatcctgtgacgccatggccactcactactacgacctcgcactggcctttccctataaccatgtttagggatgtgcctcagttgggagcaaggagaaaaatgggaagaaccagttttatccatcttaaaacgccaggcacctcttcacaggtggtaaacatttaggggaagaaagcagcccagggtgccatgcctgacagcacgcatctccctgacccctgcacttcccccagcgcctggggcaagctggcgtgtgccagggctcgagtcccacgtgctgccaactcaaacatagcctccttccccacccaggtcaaacaccagaatgaacgggctcactgggcacttccgtacagcgtcatttactattgtgcatttgtatggttatgggaggcaatttttattttacaataattttttattcattccttctttcattttccaactcagttattccagtttaaggtggtgggcgaccagagcctatcccaacagctcagtgtgcaaggcagggaccaccctggacaggatgccctcccatcacagggcacactcaccccccacacacactcagactgcgaccagacaccaacaaacctcacctgcacatctttggggcgtgggaggaaaccagagtgc

SEQ ID NO: 172895 - DNA, 1599 bp, Artificial Sequence
  derived and/or modified sequence
atggatgactacagtttggacgaattcagacggagatggcaggaggagctggcccaggcacaggcccctaaaaagaggcggagacctgaagctgccgagcgccgggcacggcgtcccgaaaacgaaatgaacgatgtgcctttctttgatatccagctgccgtacgagctcgcaatcaatatcttccagtacctcgataggaaggaactaggcagatgcgcccaggtgagtaagacatggaaagtcattgccgaagacgaggtcctctggtacagactgtgtcagcaggagggccacttaccagactccagcatcagcgactattcctgctggaaattaatcttccaggaatgccgagctaaggaacacatgctgagaaccaattggaaaaaccggaagggcgccgtgagcgaacttgaacacgtccccgataccgtgttatgtgacgttcatagtcacgacggcgtagtgattgctggatacaccagcggtgacgttcgggtgtgggacacccggacctgggattatgttgctcctttcctggagtctgaggatgaagaggacgaaccaggcatgcaacctaatgtgtcgtttgttaggattaatagtagcctggcagttgccgcttatgaggacggttttctcaatatctgggatctgaggactgggaagtacccggtccatcggttcgaacacgatgctcggatacaggccctggcacttagccaggatgacgctactgtggccactgctagcgcattcgacgtggtgatgctctcccctaatgaagaaggttattggcagattgccgcagaatttgaagtacccaaactcgtccagtacctggagatcgtgccagagacacgccgctatcccgtggccgtagcagcggccggcgacttaatgtacctcctcaaagccgaggactccgcccgcactctcctgtacgctcacggcccccccgtgacatgcctcgacgtatccgctaaccaggtggccttcggcgtgcagggcctcggttgggtgtatgagggttctaagattcttgtatacagcctggaagcagggcgaaggctgctgaagctaggaaatgtgttgagagatttcacctgtgttaacttgtctgacagcccgcccaacttgatggtctcggggaacatggacggtcgggtgcggatccacgatctgaggtcagggaatattgccttaagtctgtcagcgcatcagcttcgtgtgtcagccgttcagatggatgactggaaaatcgtgtcaggcggggaggaggggctggtgtctgtctgggactacagaatgaaccagaagctgtgggaggtgtattctggacatccagtgcagcacatctcatttagcagccattccctcataaccgcgaatgtaccctaccaaaccgtgatgcgaaacgccgacttggactcttttacaactcatcgccgacaccgaggcctgattcgggcctatgagtttgctgtggaccagttagcatttcagtcccctttgcccgtttgtcggtcctcttgcgacgctatggctactcactactatgatcttgcgctggcatttccatataaccacgtgtag

SEQ ID NO: 172896 - DNA, 1599 bp, Artificial Sequence
  derived and/or modified sequence
atggacgactatagtttagacgagttcagaaggcgctggcaggaagagttggctcaggctcaagcccctaagaagcgacgccgaccagaagcggcggaacggcgcgcacggcgacctgagaatgagatgaacgacgtgcctttctttgacatccaattaccttacgagctcgccattaacatttttcagtacttggaccggaaggagctgggacgttgcgcccaagttagcaaaacttggaaggttatcgccgaggacgaggttctttggtatcggttatgtcagcaagaggggcacttaccagactcctccatatctgattattcttgctggaagctgatcttccaggagtgccgggctaaagagcacatgcttcgcaccaactggaagaatcggaagggggcggtttctgagcttgagcacgtgcctgacacagtgttgtgcgacgtccatagtcatgatggagttgtgatcgctgggtacacaagtggcgacgtgagagtgtgggacacacggacgtgggattacgttgccccattcctggagtctgaggatgaagaggacgagcctggcatgcagccaaacgttagctttgtgcgtattaattcttccctcgctgtcgctgcgtatgaggacggttttctaaacatttgggatctccgcactggtaagtatcctgttcacaggtttgagcatgacgcgagaatccaagctctagcacttagccaagatgacgccaccgtcgccactgcctccgcatttgacgtcgtgatgctttcaccaaatgaagagggctattggcagatcgcagcagagtttgaggtgcccaaactggtgcagtacctggagatcgtccctgagacacgaaggtatcccgtcgccgtggccgctgcaggggatctgatgtatttacttaaggccgaagatagtgctagaacactcctctatgcacatgggccccccgtgacctgcctggacgtatcagccaatcaggtggcgttcggagttcagggtctgggatgggtgtacgagggctctaagattctggtgtacagcttagaagccggtcggcggttacttaagctgggtaacgtgctgcgggatttcacctgcgtcaatctgtccgatagccccccgaatttgatggtgtcaggcaatatggacggcagggtgaggatacacgacctgcgctctggaaacattgccctgtctctgtccgctcatcagctgcgcgtatccgctgtacaaatggacgactggaagattgtgtcagggggcgaagagggcctggtctccgtttgggactaccggatgaatcagaagctatgggaggtgtatagcggccaccctgtccaacacatttccttttcgtcccactctcttatcacagccaatgtcccttatcagaccgtaatgagaaacgccgatcttgacagctttacaacccaccgcagacaccgaggattaataagagcatacgagtttgcagtggaccagctcgccttccagtcacctctgccggtatgtcggtcgtcttgcgatgctatggccacccattactatgacctcgcactagcattcccttataaccatgtctag

SEQ ID NO: 172897 - DNA, 1599 bp, Artificial Sequence
  derived and/or modified sequence
atggatgactacagcctggatgagttcagaagacgctggcaggaggagctggcccaggcccaggcccccaagaagagaagaagacctgaggccgctgagcggcgggcccggcggccagaaaatgagatgaatgatgtgcccttctttgacatccagctgccctatgagctggccatcaacatcttccagtacctggacaggaaggagctgggccgctgtgcccaggtgtccaagacctggaaggtgattgctgaagatgaggtgctgtggtaccgcctgtgccagcaggagggccacctgcctgacagcagcatcagtgactacagctgctggaagctgatcttccaggagtgccgggccaaggagcacatgctgcggaccaactggaagaacagaaaaggagctgtgtctgagctggagcacgtgcctgacacagtgctgtgtgatgtgcacagccatgatggagtggtgattgctggctacaccagcggagatgtgcgggtgtgggacaccaggacctgggactatgtggcccccttcctggagagtgaagatgaagaagatgagcccggcatgcagcccaacgtgtcctttgtgcgcatcaacagcagcctggccgtggccgcctatgaagatggcttcctgaacatctgggacctgaggacaggcaagtaccctgtgcacagatttgaacatgatgcccgcatccaggccctggccctgagccaggatgatgccaccgtggccacagccagcgcctttgatgtggtgatgctgagccccaatgaggagggctactggcagattgctgctgagtttgaggtgcccaagctggtgcagtacctggagatcgtgcctgagacccggcgctaccctgtggccgtggccgccgccggggacctgatgtacctgctgaaggccgaggacagcgcccggaccctgctgtatgcccacggcccccctgtgacctgcctggatgtgtctgccaaccaggtggccttcggcgtgcagggcctgggctgggtgtatgagggcagcaagatcctggtgtacagcctggaggccggccgccgcctgctgaagctgggcaatgtgctgcgggacttcacctgtgtgaacctgagtgacagcccccccaacctgatggtgtctggcaacatggatggccgggtgcgcatccatgacctgcggagcggcaacatcgccctgagcctgagcgcccaccagctgcgggtgtctgctgtgcagatggatgactggaagatcgtgtctggaggagaggagggcctggtgtctgtgtgggactacaggatgaaccagaagctgtgggaggtgtacagcggccaccctgtgcagcacatctccttcagcagccacagcctcatcacagccaacgtgccctaccagacagtgatgagaaatgctgacctggacagcttcaccacccaccggcggcaccggggcctcatccgggcctatgaatttgctgtggaccagctggccttccagagccccctgcctgtgtgccgcagcagctgtgatgccatggccacccactactatgacctggccctggccttcccctacaaccacgtgtag

SEQ ID NO: 172898 - DNA, 1599 bp, Artificial Sequence
  derived and/or modified sequence
atggacgactacagcctggacgagttccggcggcggtggcaggaggaacttgcccaggcccaggccccgaaaaaacgccgcagaccggaagccgctgaaagacgagcacgccggccggagaatgagatgaacgacgtgccctttttcgatattcaactgccttacgaactggccatcaacatttttcagtatctcgatcgcaaagaactgggacggtgtgcccaggtatctaaaacctggaaagtgattgccgaggatgaggtgctgtggtataggctatgtcagcaagagggtcacctacccgactcctccatcagcgactacagctgctggaagttgatcttccaggagtgccgcgcgaaagaacacatgcttcgcactaattggaagaataggaagggcgccgtgagcgagttagaacatgttcccgataccgtgctctgcgacgtgcattctcacgacggagttgttatcgccgggtatacctcgggcgacgttagggtgtgggacacacgcacgtgggattacgtcgcaccttttttagaatccgaagatgaagaggatgaacccgggatgcagcctaatgtatcttttgtgaggatcaattcgagtctcgcagtggcagcctatgaggatgggtttctgaacatctgggatttaaggacggggaaatatccagtgcatagatttgaacacgatgcaagaatacaggctttggcactcagccaagacgatgctacagtagcaacagccagcgcctttgatgtggtcatgctgtcacccaatgaggagggatattggcagatcgccgcagaatttgaggtaccaaagcttgtccagtatctagaaatagtgccagaaacaagacgctatcccgtcgcagttgccgctgccggagacctcatgtacttgttgaaagctgaggactctgcaagaactcttttatacgcacatggacctcccgttacttgtctagacgtgtctgccaatcaggtggcttttggcgtgcagggactagggtgggtgtatgaggggtccaagattttggtgtactcattagaagctggacgccgccttctgaagcttggcaatgtgctgagagattttacctgcgtgaatctgtctgatagtccccccaacctgatggtcagcggaaacatggatggccgcgtgaggattcatgatctgaggtcggggaacattgctctttctttgagtgctcaccagctgcgagtcagcgcagtccaaatggacgactggaaaattgtgtctggaggtgaagaggggctggtctctgtgtgggactacaggatgaaccagaaactctgggaggtttattctgggcatccagtacagcacatatccttctccagtcacagcctgatcaccgcaaacgtgccttaccagaccgtcatgcgcaatgccgatttggacagtttcactacccaccgcagacacaggggcctgatacgtgcctacgaatttgcagtcgatcagctcgcttttcaaagtcccttacctgtgtgcaggtcttcatgcgatgctatggcgactcactactacgacctagcgctggcctttccttataatcatgtgtag

SEQ ID NO: 172899 - DNA, 1599 bp, Artificial Sequence
  derived and/or modified sequence
atggacgactacagcctggacgagttccggcggcggtggcaggaggaactcgcccaagcgcaagccccaaaaaagagacgacgaccggaggccgcggaacgacgggcccggaggccggaaaacgaaatgaatgacgtgcctttctttgatatccaactcccatacgagttagctatcaatatctttcaatacctggaccgcaaagaactggggagatgcgcccaggtcagcaaaacctggaaagtgattgccgaggacgaggttctctggtataggctttgccagcaagagggtcacttgcccgacagctcaatctccgactattcatgctggaagctgattttccaagagtgcagagcgaaagagcacatgctccggacaaactggaagaacaggaagggcgctgtgagcgagctcgagcatgtgcccgatactgtgctttgtgacgtgcacagccatgatggggtggtgatagcaggatacacaagcggtgacgtgcgtgtttgggacacgaggacttgggattatgtggcacctttcctggagagcgaggacgaggaagatgagcctggaatgcagccaaatgtgagctttgtcaggataaactcctccctagctgtagccgcatacgaagatggatttctcaatatatgggatttacgcaccgggaaatacccggtgcatcgcttcgagcacgacgcgaggattcaggcacttgctttgagtcaagacgacgcgacggtggcaaccgctagcgccttcgatgtggttatgctgagtccaaacgaagagggatactggcagattgcggccgaattcgaggttcccaaattggttcagtacctggagatcgtccctgaaactcggcgctaccctgttgccgtggctgcagctggggacttgatgtacttgctgaaggcagaggatagcgcaagaacgctgctgtatgcacatggcccacccgttacatgtctggacgtgagcgctaatcaggtggctttcggtgtccagggactcggctgggtttatgaggggtctaagatcctggtatactccctggaagcagggagaagactgttaaagctaggcaacgtcctacgggactttacatgcgtcaatttaagcgattccccaccaaacctaatggtgtcagggaacatggatgggcgcgttcgcatccacgatctcaggagcggcaacatcgctctctccctgtccgcccatcagctccgagtatccgcagttcagatggatgactggaagatcgtgtcagggggtgaggaaggcttggtctctgtctgggattaccgcatgaatcagaagctgtgggaagtatattctggacatcccgtacaacacattagtttctcctctcatagcttgatcaccgcaaacgtgccttatcagacagtgatgcggaacgctgacctagattccttcacaacccatcgtcgccatcgcggcctgattcgcgcctatgagtttgctgtggatcagctcgcctttcagagccctctgccagtctgcagatcaagctgcgatgcaatggccacacactattacgacttggccctggcgtttccttacaatcacgtctag

SEQ ID NO: 172900 - DNA, 1599 bp, Artificial Sequence
  derived and/or modified sequence
atggatgactactccctggacgaatttaggcggcgttggcaggaagagttggcgcaagcacaggccccaaaaaagcgccgtcggccagaggccgctgaaaggcgcgcacgcagaccagaaaacgagatgaatgacgttccttttttcgacatccagctgccatacgaactggctatcaacatctttcaatacctggatcggaaagagctcggcagatgtgcccaagtctccaagacttggaaggttattgctgaagacgaggtgctgtggtacagactgtgccagcaggagggacacttgcccgactcatctatctccgactactcatgttggaagttgatctttcaggaatgtcgtgccaaggagcatatgctccgcactaactggaagaatcggaaaggagccgtttcagaactcgagcatgtgccagacaccgtcctttgcgatgttcattctcacgacggcgtggttatcgcaggctataccagtggggatgttcgcgtgtgggatacacgaacttgggattatgtggctcccttccttgaaagtgaggacgaggaagatgagcctggcatgcagcccaacgtgagtttcgtgagaatcaattcaagcttggctgtcgcggcatacgaagacggctttctcaatatatgggatttaaggaccggtaagtatcccgtgcataggttcgagcatgatgccaggatacaggccctggccttatcacaggacgacgctacagtcgctaccgcctctgcgtttgatgtggtgatgctctcacctaatgaagagggctactggcagattgctgctgagtttgaggtgcccaagctagtccagtacttggaaatcgtgccagagaccaggaggtatcctgtggcagttgctgcggcaggggatctgatgtatctcctcaaagccgaggacagcgcgagaacgttactgtacgcccacggcccacctgtcacgtgtctggatgtttccgctaatcaggtcgccttcggcgtgcagggattgggctgggtgtatgagggatctaaaatcctggtgtattctctcgaggctggtcgcaggttgctcaaactgggcaacgtattacgcgattttacctgcgtcaacctgtcggactcccctcctaaccttatggtgtcagggaatatggacggccgtgtgagaatccatgatctgaggagcgggaacatcgccctgtccctgtccgcccaccagctaagagtgagtgctgtgcagatggacgattggaaaatagtaagcggcggtgaagaggggttagtgtctgtctgggactaccgaatgaatcagaagttgtgggaagtttatagtggacatcctgtgcagcacatttccttttccagccactctttgatcaccgcaaatgtaccctaccagacggtcatgagaaacgccgacctggatagttttacgacccataggaggcacaggggactgattcgggcttatgagtttgccgtcgaccagcttgcgtttcagagtccactgcccgtatgccgctcaagctgtgatgccatggctactcactattacgacctggccctcgccttcccatataatcacgtatag

SEQ ID NO: 172901 - DNA, 1599 bp, Artificial Sequence
  derived and/or modified sequence
atggatgactacagtctggatgagtttagacgcaggtggcaggaggaactggcacaggctcaggccccaaagaagcggaggcgcccagaagcagccgagcgtagagcgagacggccagaaaacgagatgaatgacgtccctttttttgacatccagttaccttacgagctggcaatcaatatatttcagtacctggataggaaagaactcggtcgctgcgcacaggtgtccaaaacctggaaagtgattgctgaggatgaagtactgtggtaccgcctatgccaacaagaagggcacctgcccgacagcagcatctctgactacagctgctggaaactgatttttcaggagtgtagggccaaggaacacatgctgcgaactaactggaagaaccggaaaggagcggtatcagaactcgaacatgtgcccgataccgtactgtgcgacgttcactctcatgatggagtggtcatcgccggttatacaagtggggacgtcagagtgtgggacacgcggacgtgggactatgtggcaccattcctcgaatccgaggacgaggaagatgaacccggtatgcaacccaatgtctctttcgtcaggatcaactcatccctggcagtcgcagcgtatgaagacggatttctgaacatctgggacctgcgaaccggcaagtatcctgtgcatcggtttgaacacgatgcaagaattcaagccctagccctttcacaagacgatgcgacagtggctactgcctctgctttcgacgtggtgatgctgtccccaaatgaggaagggtactggcagattgccgctgagtttgaagtaccaaagttggtacaataccttgagatcgtgccagaaacgagaagatatcctgttgctgtggccgcagctggggacctgatgtatctcctgaaggccgaggatagtgcaagaacccttttgtacgcccacgggccacctgtcacctgtcttgatgtgtctgcaaaccaggtcgcgtttggggttcaaggactgggctgggtgtatgaaggctctaaaatcttggtatacagcctagaggcaggacgacgattgttgaagttgggcaacgtgttgcgggatttcacttgtgtgaacctaagcgactctccccctaacttgatggtcagcgggaatatggatggccgtgtcaggatccacgaccttcgaagcgggaatattgccctgagcctcagcgctcaccagctccgcgtgtctgccgtgcagatggatgactggaaaatcgtttctggaggagaagaaggactggtaagcgtgtgggactatcggatgaatcaaaagctctgggaagtttactcggggcacccggtgcagcacatttccttctccagccacagtctgattaccgcaaatgtcccctatcagacagtgatgagaaatgccgaccttgatagctttacgacgcacaggcggcatagagggctcatccgtgcgtacgagttcgccgtagaccagctggccttccagtctccactccccgtgtgccgcagtagttgtgatgcaatggccacccattactacgacctggccctagccttcccttataatcacgtttag

SEQ ID NO: 172902 - DNA, 1599 bp, Artificial Sequence
  derived and/or modified sequence
atggacgactacagcctggacgagttcagaagaagatggcaggaggagctggcccaggcccaggcccccaagaagagaagaagacccgaggccgccgagagaagagccagaagacccgagaacgagatgaacgacgtgcccttcttcgacatccagctgccctacgagctggccatcaacatcttccagtacctggacagaaaggagctgggcagatgcgcccaggtgagcaagacctggaaggtgatcgccgaggacgaggtgctgtggtacagactgtgccagcaggagggccacctgcccgacagcagcatcagcgactacagctgctggaagctgatcttccaggagtgcagagccaaggagcacatgctgagaaccaactggaagaacagaaagggcgccgtgagcgagctggagcacgtgcccgacaccgtgctgtgcgacgtgcacagccacgacggcgtggtgatcgccggctacaccagcggcgacgtgagagtgtgggacaccagaacctgggactacgtggcccccttcctggagagcgaggacgaggaggacgagcccggcatgcagcccaacgtgagcttcgtgagaatcaacagcagcctggccgtggccgcctacgaggacggcttcctgaacatctgggacctgagaaccggcaagtaccccgtgcacagattcgagcacgacgccagaatccaggccctggccctgagccaggacgacgccaccgtggccaccgccagcgccttcgacgtggtgatgctgagccccaacgaggagggctactggcagatcgccgccgagttcgaggtgcccaagctggtgcagtacctggagatcgtgcccgagaccagaagataccccgtggccgtggccgccgccggcgacctgatgtacctgctgaaggccgaggacagcgccagaaccctgctgtacgcccacggcccccccgtgacctgcctggacgtgagcgccaaccaggtggccttcggcgtgcagggcctgggctgggtgtacgagggcagcaagatcctggtgtacagcctggaggccggcagaagactgctgaagctgggcaacgtgctgagagacttcacctgcgtgaacctgagcgacagcccccccaacctgatggtgagcggcaacatggacggcagagtgagaatccacgacctgagaagcggcaacatcgccctgagcctgagcgcccaccagctgagagtgagcgccgtgcagatggacgactggaagatcgtgagcggcggcgaggagggcctggtgagcgtgtgggactacagaatgaaccagaagctgtgggaggtgtacagcggccaccccgtgcagcacatcagcttcagcagccacagcctgatcaccgccaacgtgccctaccagaccgtgatgagaaacgccgacctggacagcttcaccacccacagaagacacagaggcctgatcagagcctacgagttcgccgtggaccagctggccttccagagccccctgcccgtgtgcagaagcagctgcgacgccatggccacccactactacgacctggccctggccttcccctacaaccacgtgtag

SEQ ID NO: 172903 - protein, 471 aa, Artificial Sequence
  derived and/or modified sequence
MAAMETETAPLTLESLPTDPLLLILSFLDYRDLINCCYVSRRLSQLSSHDPLWRRHCKKYWLISEEEKTQKNQCWKSLFIDTYSDVGRYIDHYAAIKKAWDDLKKYLEPRCPRMVLSLKEGAREEDLDAVEAQIGCKLPDDYRCSYRIHNGQKLVVPGLLGSMALSNHYRSEDLLDVDTAAGGFQQRQGLKYCLPLTFCIHTGLSQYIAVEAAEGRNKNEVFYQCPDQMARNPAAIDMFIIGATFTDWFTSYVKNVVSGGFPIIRDQIFRYVHDPECVATTGDITVSVSTSFLPELSSVHPPHYFFTYRIRIEMSKDALPEKACQLDSRYWRITNAKGDVEEVQGPGVVGEFPIISPGRVYEYTSCTTFSTTSGYMEGYYTFHFLYFKDKIFNVAIPRFHMACPTFRVSIARLEMGPDEYEEMEEEEEEEEEEDEDDDSADMDESDEDDEEERRRRVFDVPIRRRRCSRLF

SEQ ID NO: 172904 - DNA, 2397 bp, Artificial Sequence
  derived and/or modified sequence
ctgcaccgggccaggcaagatggcggccatggagaccgagacggcgccgctgaccctagagtcgctgcccaccgatcccctgctcctcatcttatcctttttggactatcgggatctaatcaactgttgttatgtcagtcgaagacttagccagctatcaagtcatgatccgctgtggagaagacattgcaaaaaatactggctgatatctgaggaagagaaaacacagaagaatcagtgttggaaatctctcttcatagatacttactctgatgtaggaagatacattgaccattatgctgctattaaaaaggcctgggatgatctcaagaaatatttggagcccaggtgtcctcggatggttttatctctgaaagagggtgctcgagaggaagacctcgatgctgtggaagcgcagattggctgcaagcttcctgacgattatcgatgttcataccgaattcacaatggacagaagttagtggttcctgggttattgggaagcatggcactgtctaatcactatcgttctgaagatttgttagacgtcgatacagctgccggaggattccagcagagacagggactgaaatactgtctccctttaactttttgcatacatactggtttgagtcagtacatagcagtggaagctgcagagggccgaaacaaaaatgaagttttctaccaatgtccagaccaaatggctcgaaatccagctgctattgacatgtttattataggtgctacttttactgactggtttacctcttatgtcaaaaatgttgtatcaggtggcttccccatcatcagagaccaaattttcagatatgttcacgatccagaatgtgtagcaacaactggggatattactgtgtcagtttccacatcgtttctgccagaacttagctctgtacatccaccccactatttcttcacataccgaatcaggattgaaatgtcaaaagatgcacttcctgagaaggcctgtcagttggacagtcgctattggagaataacaaatgctaagggtgacgtggaagaagttcaaggacctggagtagttggtgaatttccaatcatcagcccaggtcgggtatatgaatacacaagctgtaccacattctctacaacatcaggatacatggaaggatattataccttccattttctttactttaaagacaagatctttaatgttgccattccccgattccatatggcatgtccaacattcagggtgtctatagcccgattggaaatgggtcctgatgaatatgaagagatggaagaagaggaggaggaggaagaggaggaagacgaggatgatgattcagcagatatggatgaatcagatgaagatgatgaagaggagagacggaggagagtctttgatgttcccattcgcagacgccgctgctcacgccttttttagcaagccttctgctgatggaagcactaggatgattctaggctgttaaatagatttctcaataatgtaaataactaaattgttctctgcatatagcaggaaaactagcatgaaatattgtttcaggccctgggttctatgtgacactacattaggaattggattgtttgggtttgctttgtgtttttgaggtagaggaagaaatgggaatcttttttttctcttccaggagtcagtggaagaatagttctctagctaaggaatggacatacctttgttttaaaatattttatacttacaaaaatctagaaatggagagggaactgttttgaataaggatttaaaatacctgcacaaggatagagagaaactatgtgactcattctgtgaaaagacttcttgcagttgtgagttatttagaaatgatcaaaatttgtaattaggctaatccatttagtgattcctaatattttgtactcacagagaactaattgactaaacaacttgaacgctagtggtttgtccttagacaatctgtctttgaatttaaagtctttatcgctaagaccttgactttaaatttttcatcactacaaccttgaatttaatttcaggtcttcaacatgatgaccttggatttaatttaaagtcttcaacactatgcgctttatcatattattcacagatgcatttttgaaatgtagtatgtaaaagtatgtaacgtgctgtttattaacaaaagattgttcacaacatctcatgtagtttaaatttgtaaatactgcttctgttttgtttctcctttatacacttgactgtctttgtgataagtgacatgaattttatgttaggattaagtatgttttcctgaaacttggattttttttgtaattatataattgagagttaagaatgaaatccttcaagtgttaaaaactcacattttaaaagcaaattttggttcc

SEQ ID NO: 172905 - DNA, 2394 bp, Artificial Sequence
  derived and/or modified sequence
ccgggccaggcaagatggcggccatggagaccgagacggcgccgctgaccctagagtcgctgcccaccgatcccctgctcctcatcttatcctttttggactatcgggatctaatcaactgttgttatgtcagtcgaagacttagccagctatcaagtcatgatccgctgtggagaagacattgcaaaaaatactggctgatatctgaggaagagaaaacacagaagaatcagtgttggaaatctctcttcatagatacttactctgatgtaggaagatacattgaccattatgctgctattaaaaaggccgggatgatctcaagaaatatttggagcccaggtgtcctcggatggtttgttagtataaatagagggtgctcgagaggaagacctcgatgctgtggaagcgcagattggtgcaagcttcctgacgattatcgatgttcataccgaattcacaatggacagaagttagtggttcctggaagttattgggaagcatggcactgtctaatcactatcgttctgaagatttgttagacgtcgatacagctgccggaggattccagcagagacagggactgaaatactgtctccctttaactttttgcatacatactggtttgagtcagtacatagcagtggaagctgcagagggccgaaacaaaaatgaagttttctaccaatgtccagaccaaatggctcgaaatccagctgctattgacatgtttattataggtgctacttttactgactggtttacctcttatgtcaaaaatgttgtatcaggtggcttccccatcatcagagaccaaattttcagatatgttcacgatccagaatgtgtagcaacaactggggatattactgtgtcagtttccacatcgtttctgccagaacttagctctgtacatccaccccactatttcttcacataccgaatcaggattgaaatgtcaaaagatgcacttcctgagaaggcctgtcagttggacagtcgctattggagaataacaaatgctaagggtgacgtggaagaagttcaaggacctggagtagttggtgaatttccaatcatcagcccaggtcgggtatatgaatacacaagctgtaccacattctctacaacatcaggatacatggaaggatattataccttccattttctttactttaaagacaagatctttaatgttgccattccccgattccatatggcatgtccaacattcagggtgtctatagcccgattggaaatgggtcctgatgaatatgaagagatggaagaagaggaggaggaggaagaggaggaagacgaggatgatgattcagcagatatggatgaatcagatgaagatgatgaagaggagagacggaggagagtctttgatgttcccattcgcagacgccgctgctcacgccttttttagcaagccttctgctgatggaagcactaggatgattctaggctgttaaatagatttctcaataatgtaaataactaaattgttctctgcatatagcaggaaaactagcatgaaatattgtttcaggccctgggttctatgtgacactacattaggaattggattgtttgggtttgctttgtgtttttgaggtagaggaagaaatgggaatcttttttttctcttccaggagtcagtggaagaatagttctctagctaaggaatggacatacctttgttttaaaatattttatacttacaaaaatctagaaatggagagggaactgttttgaataaggatttaaaatacctgcacaaggatagagagaaactatgtgactcattctgtgaaaagacttcttgcagttgtgagttatttagaaatgatcaaaatttgtaattaggctaatccatttagtgattcctaatattttgtactcacagagaactaattgactaaacaacttgaacgctagtggtttgtccttagacaatctgtctttgaatttaaagtctttatcgctaagaccttgactttaaatttttcatcactacaaccttgaatttaatttcaggtcttcaacatgatgaccttggatttaatttaaagtcttcaacactatgcgctttatcatattattcacagatgcatttttgaaatgtagtatgtaaaagtatgtaacgtgctgtttattaacaaaagattgttcacaacatctcatgtagtttaaatttgtaaatactgcttctgttttgtttctcctttatacacttgactgtctttgtgataagtgacatgaattttatgttaggattaagtatgttttcctgaaacttggattttttttgtaattatataattgagagttaagaatgaaatccttcaagtgttaaaaactcacattttaaaagcaaattttggttcc

SEQ ID NO: 172906 - DNA, 1416 bp, Artificial Sequence
  derived and/or modified sequence
atggcggccatggaaacagagactgcgcccctcaccttggagtcactgcccaccgatccgttgctgctgatcttatccttcctggactaccgcgaccttatcaattgctgctacgtgtcaaggcggcttagccagctgagttcacatgaccccttgtggcggagacactgtaagaaatactggctcattagcgaggaggaaaagacgcagaaaaaccaatgttggaaaagtctctttatcgatacctatagtgacgtgggtcgttacatcgatcattacgcagccatcaagaaggcctgggacgatctgaaaaaatacctcgagcccagatgtccacgcatggtgctgagtctgaaggagggagctagagaggaagacctcgacgccgtcgaggcacagatcgggtgcaaactgcccgacgattacagatgcagctacagaattcacaatggtcaaaaactggtggtcccaggtctgctgggatcaatggccctgagcaatcattaccggagcgaagacttactcgacgtggacaccgccgcaggaggattccagcaaaggcagggactcaaatactgtttaccattgactttttgtatccacactgggctttcccagtatatagctgtcgaagccgcagaaggcaggaacaagaatgaggtcttctatcagtgtcccgatcaaatggcccggaacccagcggcaattgatatgtttatcatcggcgccacatttaccgactggttcacatcttatgtgaagaacgtggtgtccggcggctttcccatcattagagaccagatctttcgatacgtgcacgacccagagtgcgtggccactaccggagacatcaccgtcagcgtatctacaagctttctgcccgagctcagcagcgttcaccctccccattacttttttacatatcggattaggattgaaatgtcgaaggatgcgctccccgagaaagcttgccaactggacagcaggtactggcgcattactaacgctaagggagacgtagaggaggtgcagggaccaggcgtggtgggcgaattccccattatttcgccgggaagggtttacgaatacacctcctgtactaccttcagtactacttctgggtatatggaaggctactacacctttcatttcctgtactttaaggataaaatcttcaacgtagcaattcccagatttcacatggcctgccctacatttagggtgtccatagccaggttggaaatgggcccggatgaatatgaagaaatggaggaggaggaggaggaggaagaggaagaggacgaagacgacgatagtgcagacatggatgaatcagatgaggatgatgaagaagaaagacgaagacgcgtttttgatgtacctattcgaaggcggcgttgcagtaggctcttttag

SEQ ID NO: 172907 - DNA, 1416 bp, Artificial Sequence
  derived and/or modified sequence
atggccgccatggagacagaaacagcccccctgaccctggagagcctgcccacagaccccctgctgctgatcctgtccttcctggactacagagacctgatcaactgctgctacgtgtcccggcggctgagccagctgagcagccatgaccccctgtggaggaggcactgcaagaagtactggctgatcagcgaggaggagaagacccagaagaaccagtgctggaagagcctcttcatcgacacctacagtgatgtgggccgctacatcgaccactacgccgccatcaagaaggcctgggatgacctgaagaagtacctggagccccgctgccccaggatggtgctgagcctgaaggagggcgcccgggaggaggacctggatgctgtggaggcccagatcggctgcaagctgcctgatgactaccgctgcagctaccgcatccacaacggccagaagctggtggtgcccggcctgctgggctccatggccctgagcaaccactacagaagtgaggacctgctggatgtggacacagctgctgggggcttccagcagaggcagggcctgaagtactgcctgcccctgaccttctgcatccacacaggcctgagccagtacatcgctgtggaggccgctgagggcaggaacaagaatgaggtgttctaccagtgcccagaccagatggccagaaatcctgctgccatcgacatgttcatcattggagccaccttcacagactggttcaccagctatgtgaagaatgtggtgtctgggggcttccccatcatccgggaccagatcttccgctacgtgcatgaccctgaatgtgtggccaccactggagacatcaccgtgtctgtgtccaccagcttcctgcctgagctgagctctgtgcaccccccccactacttcttcacctaccgcatccgcatcgagatgagcaaggatgccctgcctgagaaggcctgccagctggacagccgctactggaggatcaccaatgccaagggagatgtggaggaggtgcagggccctggggtggtgggggagttccccatcatcagccctggccgggtgtatgagtacaccagctgcaccaccttcagcaccaccagcggctacatggagggctactacaccttccacttcctgtacttcaaggacaagatcttcaacgtggccatcccccgcttccacatggcctgccccaccttccgggtgtccatcgcccggctggagatgggcccagatgaatatgaggagatggaggaggaggaggaggaggaggaggaggaggatgaagatgatgattctgctgacatggatgaaagtgatgaagatgatgaggaggagaggagaagaagagtgtttgatgtgcccatcagaagaagacgctgcagccgcctcttctag

SEQ ID NO: 172908 - DNA, 1416 bp, Artificial Sequence
  derived and/or modified sequence
atggccgccatggagaccgagaccgcccccctgaccctggagagcctgcctacagatccactgcttctgatactgtccttcttggattatagagatctgatcaactgttgttacgtgagtagacgcctgtctcagctctcctcccacgatcccctatggaggcgacattgtaagaaatattggttgatttccgaggaagagaaaacccagaagaatcagtgctggaaatccctcttcatcgatacatacagcgatgtcggcagatatatcgaccactatgccgccatcaagaaggcctgggacgatcttaagaaatatctggagcctcggtgtcctcgcatggttctcagtctgaaagagggagcacgagaggaagacctagatgctgtagaagcccagatagggtgcaagctgcctgatgactatcggtgctcataccgcatccataatggacagaagctggttgttcctggattgcttgggagcatggcactcagcaaccactatcgcagcgaagacttacttgatgtggatacagccgccgggggcttccagcagcgccagggcctgaaatactgtcttcccttaaccttctgtatccacaccggactatcccagtacattgctgtggaggcggctgaaggcagaaacaagaacgaggtgttctaccagtgccctgaccagatggcccggaatccagctgcgattgatatgtttatcattggagccaccttcaccgattggttcacgagctatgtcaaaaatgtggttagtggcggctttccaattatccgggatcagattttccgatatgtgcacgacccagaatgcgtcgctacaaccggcgatatcactgtcagcgtgtccacctccttcctgccagagctcagtagtgttcacccacctcattacttcttcacatatcgaattcgcattgagatgagcaaagacgctctgcctgagaaggcctgccagctggacagccgttactggagaattacaaacgcgaagggagacgtggaagaagttcagggccctggggttgtgggggagttccccattatctcaccaggccgcgtctacgagtataccagttgcaccactttctcgacaacttccggctatatggaaggttattacacatttcactttctttatttcaaagacaagatcttcaacgtagctattcctagattccatatggcttgccctacatttagagttagtattgcccggctcgaaatgggccccgacgaatacgaggaaatggaggaagaagaggaggaggaagaagaggaggacgaggacgatgacagtgccgatatggatgaatctgatgaagacgacgaagaggaacgccgcagacgcgtgtttgatgttcctattcggcgtagacggtgttctcgtcttttctag

SEQ ID NO: 172909 - DNA, 1416 bp, Artificial Sequence
  derived and/or modified sequence
atggccgcaatggaaactgagacagccccacttacacttgagtcgcttcctaccgatcctcttctgttaatcctaagctttcttgactaccgagatctgattaactgctgctacgtttctcggagactgtcacagttgagtagtcatgacccgctttggagaagacattgtaaaaagtactggctcatcagtgaggaagagaaaactcaaaaaaatcagtgttggaagagtttgttcatcgatacctattctgacgtgggccgatacatagaccactacgcagccatcaagaaagcttgggacgatctaaaaaaatatctggaaccaagatgtccacgcatggtgctgagtttgaaggagggcgctagggaagaggacctggacgcagtggaagcccaaattggttgcaaactgcccgatgattatcgttgcagctatcgcattcacaacgggcaaaaactggttgtacccggtctcttagggagcatggccctctccaaccactatagaagcgaggacctgttagacgttgacaccgctgctggaggcttccagcaacgacagggcttgaagtattgtctacctctcacattctgcattcacacagggctgtcacagtacatagccgtcgaggctgctgagggcaggaataaaaacgaggtcttctaccagtgtccagaccagatggcgaggaatccggctgcaatagatatgttcattattggagctaccttcaccgactggttcaccagttacgtgaaaaacgttgtgtccggcggatttccgatcattcgagaccagattttcaggtatgtgcatgatccagagtgcgtagcaacaacgggtgatatcacggtgtccgtatccacgtcttttctgcccgagctgtctagcgtgcatccgccacactacttttttacatatcgcataagaatcgagatgagtaaagacgctcttcccgaaaaggcatgtcagcttgactctcgctactggcgtatcaccaacgccaaaggagacgtagaggaggtgcaaggtcctggagtggtcggagagtttcccatcatatcgccaggtagggtgtacgagtacacctcctgtacaaccttctcaaccacgtccggctacatggaggggtattacacttttcatttcctgtacttcaaagacaagattttcaacgtggctatacccagatttcatatggcttgccccaccttcagggtttcaattgctagattggaaatgggccctgacgaatacgaggaaatggaggaagaggaggaggaggaggaggaagaagatgaggacgacgactctgcggatatggacgaaagtgacgaggacgatgaagaagaaagaaggcgaagggtgtttgatgttcccatacgccgacgaagatgcagtcgactgttctag

SEQ ID NO: 172910 - DNA, 1416 bp, Artificial Sequence
  derived and/or modified sequence
atggccgccatggagaccgagaccgcccccctgaccctggagagcctgcccaccgaccccctgctgctgatcctgagcttcctggactacagagacctgatcaactgctgctacgtgagcagaagactgagccagctgagcagccacgaccccctgtggagaagacactgcaagaagtactggctgatcagcgaggaggagaagacccagaagaaccagtgctggaagagcctgttcatcgacacctacagcgacgtgggcagatacatcgaccactacgccgccatcaagaaggcctgggacgacctgaagaagtacctggagcccagatgccccagaatggtgctgagcctgaaggagggcgccagagaggaggacctggacgccgtggaggcccagatcggctgcaagctgcccgacgactacagatgcagctacagaatccacaacggccagaagctggtggtgcccggcctgctgggcagcatggccctgagcaaccactacagaagcgaggacctgctggacgtggacaccgccgccggcggcttccagcagagacagggcctgaagtactgcctgcccctgaccttctgcatccacaccggcctgagccagtacatcgccgtggaggccgccgagggcagaaacaagaacgaggtgttctaccagtgccccgaccagatggccagaaaccccgccgccatcgacatgttcatcatcggcgccaccttcaccgactggttcaccagctacgtgaagaacgtggtgagcggcggcttccccatcatcagagaccagatcttcagatacgtgcacgaccccgagtgcgtggccaccaccggcgacatcaccgtgagcgtgagcaccagcttcctgcccgagctgagcagcgtgcaccccccccactacttcttcacctacagaatcagaatcgagatgagcaaggacgccctgcccgagaaggcctgccagctggacagcagatactggagaatcaccaacgccaagggcgacgtggaggaggtgcagggccccggcgtggtgggcgagttccccatcatcagccccggcagagtgtacgagtacaccagctgcaccaccttcagcaccaccagcggctacatggagggctactacaccttccacttcctgtacttcaaggacaagatcttcaacgtggccatccccagattccacatggcctgccccaccttcagagtgagcatcgccagactggagatgggccccgacgagtacgaggagatggaggaggaggaggaggaggaggaggaggaggacgaggacgacgacagcgccgacatggacgagagcgacgaggacgacgaggaggagagaagaagaagagtgttcgacgtgcccatcagaagaagaagatgcagcagactgttctag

SEQ ID NO: 172911 - protein, 387 aa, Artificial Sequence
  derived and/or modified sequence
MAGSEPRSGTNSPPPPFSDWGRLEAAILSGWKTFWQSVSKERVARTTSREEVDEAASTLTRLPIDVQLYILSFLSPHDLCQLGSTNHYWNETVRDPILWRYFLLRDLPSWSSVDWKSLPDLEILKKPISEVTDGAFFDYMAVYRMCCPYTRRASKSSRPMYGAVTSFLHSLIIQNEPRFAMFGPGLEELNTSLVLSLMSSEELCPTAGLPQRQIDGIGSGVNFQLNNQHKFNILILYSTTRKERDRAREEHTSAVNKMFSRHNEGDDQQGSRYSVIPQIQKVCEVVDGFIYVANAEAHKRHEWQDEFSHIMAMTDPAFGSSGRPLLVLSCISQGDVKRMPCFYLAHELHLNLLNHPWLVQDTEAETLTGFLNGIEWILEEVESKRAR

SEQ ID NO: 172912 - DNA, 1682 bp, Artificial Sequence
  derived and/or modified sequence
ggaggctgacgcgctagcgtggctctaagacgcgtcacccacgctgcgggcaagccatggcgggaagcgagccgcgcagcggaacaaactcgccgccgccgcccttcagcgactggggccgcctggaggcggccatcctcagcggctggaagaccttctggcagtcagtgagcaaggagagggtggcgcgtacgacctcacgggaggaggtggatgaggcggccagcaccctgacgcggctgccgattgatgtacagctatatattttgtcctttctttcacctcatgatctgtgtcagttgggaagtacaaatcattattggaatgaaactgtaagagatccaattctgtggagatactttttgttgagggatcttccttcttggtcttctgttgactggaagtctcttccagatctagaaatcttaaaaaagcctatatctgaggtcactgatggtgcattttttgactacatggcagtctatagaatgtgctgtccatacacaagaagagcttcaaaatccagccgtcctatgtatggagctgtcacttcttttttacactccctgatcattcagaatgaaccacgatttgctatgtttggaccaggtttggaagaattgaatacctctttggtgttgagcttgatgtcttcagaggaactttgcccaacagctggtttgcctcagaggcagattgatggtattggatcaggagtcaattttcagttgaacaaccaacataaattcaacattctaatcttatattcaactaccagaaaggaaagagatagagcaagggaagagcatacaagtgcagttaacaagatgttcagtcgacacaatgaaggtgatgatcaacaaggaagccggtacagtgtgattccacagattcaaaaagtgtgtgaagttgtagatgggttcatctatgttgcaaatgctgaagctcataaaagacatgaatggcaagatgaattttctcatattatggcaatgacagatccagcctttgggtcttcgggaagaccattgttggttttatcttgtatttctcaaggggatgtaaaaagaatgccctgtttttatttggctcatgagctgcatctgaatcttctaaatcacccatggctggtccaggatacagaggctgaaactctgactggttttttgaatggcattgagtggattcttgaagaagtggaatctaagcgtgcaagatgattctcttttcagatcttgggaactgaaaccatttgaaatttattactaaggtcgtgatgtgaatatttgctcagtcagcccaccttgtcctgcctttttgcagataggctttcatttggacagctataactgctgtgttttttatattatttttactctttaccataaatcaattacaagaaaagagtttcagtcctagtatttagccccaaaatgaacctttaaacatttttttggtaatttttatattttctgtctttttaaaaatattaaattctggaaaaaacaagtttgtgcctctcattccctgagtttctattcttttgggtataaagattgccttagtgagaaatagcaaatttgctaaactttctattcagtcttttcaagggttcataagtggttatcagaaaagaaatttttatctattcttaataaatacactgcttaaagactgaaaaa

SEQ ID NO: 172913 - DNA, 1164 bp, Artificial Sequence
  derived and/or modified sequence
atggcagggagtgaaccacggagcggaacaaatagtccacccccccccttctctgattgggggcgcctggaagctgccattcttagtggatggaaaacattctggcaaagcgtgagcaaggagagagttgcacggacaacctctagggaggaggtcgacgaggccgcatcaaccttgacccggctgccgattgacgttcagctctatatactgtcgtttctctcaccgcacgacctgtgccagctagggagcactaaccattattggaatgaaacggtaagggacccaattctctggcgttacttcctactgcgggacctgccatcttggtcatccgttgattggaagagtctccctgatctcgagatcctgaaaaaacccatcagtgaggtgactgacggtgctttcttcgactacatggccgtgtacagaatgtgctgcccatacacacgtcgggccagcaaaagttcgagacctatgtatggcgccgtcacgtcattcctgcattcactgattatccagaacgagcccaggttcgcaatgttcggccccggcttggaagagctcaacaccagtctcgtgctcagcttgatgtcttcggaggagttgtgccctacagctggacttccccagcgacagattgacggcataggttcaggcgtcaacttccagctgaacaaccagcataaatttaacatcctgattttgtactctacgacaaggaaggaacgggacagggccagagaggagcatacatctgcggtgaataagatgttcagccgccacaatgagggtgacgaccaacaagggagcagatattctgtgatcccccagatccaaaaggtgtgtgaagtggtggacggcttcatttacgtggccaatgcggaagcccataaacgccacgaatggcaagatgaatttagtcatataatggctatgacggatccagccttcggttctagtggacgcccattgttggtgctgtcatgcatctcccagggggatgtgaaaagaatgccatgcttctatcttgcacacgagctgcatttgaacctgttaaaccatccttggctcgtgcaagacaccgaggctgagacactcactggctttcttaacggaattgagtggatcctcgaggaagtggagtcaaaacgtgcccggtag

SEQ ID NO: 172914 - DNA, 1164 bp, Artificial Sequence
  derived and/or modified sequence
atggccggcagcgagcccaggagcggcaccaacagccccccaccacccttcagtgactggggccgcctggaggccgccatcctgagcggctggaagaccttctggcagagcgtgtccaaggagcgggtggcccggaccaccagccgggaggaggtggatgaagctgccagcaccctgacccggctgcccattgatgtgcagctgtacatcctgtccttcctgagcccccatgacctgtgccagctgggcagcaccaaccactactggaatgagaccgtgcgggaccccatcctgtggagatacttcctgctgcgggacctgcccagctggagctctgtggactggaagagcctgcctgacctggagatcctgaagaagcccatcagcgaggtgacagatggagccttctttgactacatggctgtgtacaggatgtgctgcccctacacccggcgggccagcaagagcagccggcccatgtatggagctgtgaccagcttcctgcacagcctcatcatccagaatgagcccaggtttgccatgtttggacctggcctggaggagctgaacaccagcctggtgctgagcctgatgagcagcgaggagctgtgccccacagctggcctgccccagaggcagattgatggcatcggcagcggcgtgaacttccagctgaacaaccagcacaagttcaacatcctgatcctgtacagcaccaccaggaaggagcgggaccgggcccgggaggagcacaccagcgctgtgaacaagatgttcagccgccacaatgaaggagatgaccagcagggcagccgctacagcgtcatcccccagatccagaaggtgtgtgaggtggtggatggcttcatctacgtggccaatgctgaggcccacaagagacatgagtggcaggatgagttcagccacatcatggccatgacagatcctgccttcggcagcagcggccggcccctgctggtgctgagctgcatcagccagggagatgtgaagaggatgccctgcttctacctggcccacgagctgcacctgaacctgctgaaccacccctggctggtgcaggacacagaggccgagaccctgaccggcttcctgaatggcatcgagtggatcctggaggaggtggagagcaagagggccaggtag

SEQ ID NO: 172915 - DNA, 1164 bp, Artificial Sequence
  derived and/or modified sequence
atggccggcagcgagccccggagcggcaccaacagccccccccccccattttctgattgggggagacttgaggccgcaattctctctgggtggaagaccttctggcaatctgtcagcaaagaacgtgtagctaggactaccagccgggaagaagtcgacgaagccgccagtacattaacaagactccctatcgatgtgcagctatacatactctcattcctttctccgcatgacctctgtcagctcggaagtaccaaccactactggaatgagaccgtacgagacccaattctgtggcgatactttctgctcagggacctaccatcctggtcctctgtggactggaaaagtctgcccgacctcgaaatcctgaaaaagccaatttccgaggtcaccgatggagcattctttgattatatggcagtgtataggatgtgctgtccttacacccggcgcgctagcaaaagctctagacccatgtacggtgcagtcacatccttcctgcatagtcttatcatccagaacgaacctcggttcgctatgtttgggccaggtctcgaggaactcaatacctctcttgtgctctcccttatgagtagcgaggagctctgcccaaccgcggggttgccccaaagacagatcgatggtatcgggtcgggtgtgaatttccaactcaacaatcagcacaaattcaatattcttatcctgtattctacgacccggaaggagcgcgatcgggctagggaagaacacacttccgctgtgaacaagatgttttcaaggcacaatgaaggggatgaccagcagggcagtcggtattccgtcatcccgcagatccagaaagtgtgcgaagtggtggacggatttatctacgttgccaatgccgaagctcataagagacatgaatggcaggatgaattctcacacattatggcaatgactgatccagctttcggatccagtgggcggcctctgctggtgctgagctgtatctcgcaaggggatgtgaaacgtatgccgtgtttttacttagcccatgagctgcacctgaacctactgaaccatccatggctcgtgcaggatacagaggccgagaccctcaccgggttcctgaatggcatcgagtggatccttgaagaggtggaaagcaaaagagcgcggtag

SEQ ID NO: 172916 - DNA, 1164 bp, Artificial Sequence
  derived and/or modified sequence
atggctggaagcgaacctaggagtggtactaatagtcctccaccgcctttttccgactggggacgccttgaggctgccatcctgagtggctggaaaacattctggcaatctgtctctaaagaaagagtggccagaacaacaagtcgtgaagaggtggacgaggctgcgtcaactttgaccaggctccccattgacgtccaactgtatattcttagcttcctgtccccgcacgacctttgtcagctcggatcgacaaaccactactggaacgagactgtgagagatcctatcctgtggcgatactttctcttacgcgacctcccatcctggagctccgtggattggaagagtcttcctgacctggaaatcttaaaaaagcccattagtgaagttactgatggcgctttttttgactacatggcagtttatcgaatgtgctgcccctacactagaagggccagcaagtcgtcccgccctatgtatggagccgtaacaagtttccttcattccctcatcattcaaaatgagcccagattcgctatgttcgggccagggttagaagagcttaataccagtctcgttctttccctgatgtcctctgaagagctgtgcccgacagctggcctgcctcagcgacagattgatggcatcggaagcggagtgaacttccaactgaacaaccagcataagttcaacatcctgatcctgtactctactaccagaaaagaaagagacagggctcgcgaggaacacacaagcgctgtgaacaagatgttctcgaggcacaatgaaggagacgatcagcaggggtcccgctatagcgtgataccccagatccagaaagtatgcgaagtggttgacggatttatctacgtcgccaacgctgaggcacacaaaagacatgagtggcaagacgagttttctcacatcatggctatgacagatcccgcttttggctcttccggcagacctctgctggtgttatcctgcatttcccaaggtgacgtcaagcgtatgccctgtttttacctcgcacacgaactccatctaaaccttttaaaccacccctggttggtacaggacactgaagctgagaccctgacagggtttctgaatgggatcgagtggatactggaggaagtggaaagcaaacgggctcgttag

SEQ ID NO: 172917 - DNA, 1164 bp, Artificial Sequence
  derived and/or modified sequence
atggccggcagcgagcccagaagcggcaccaacagcccccccccccccttcagcgactggggcagactggaggccgccatcctgagcggctggaagaccttctggcagagcgtgagcaaggagagagtggccagaaccaccagcagagaggaggtggacgaggccgccagcaccctgaccagactgcccatcgacgtgcagctgtacatcctgagcttcctgagcccccacgacctgtgccagctgggcagcaccaaccactactggaacgagaccgtgagagaccccatcctgtggagatacttcctgctgagagacctgcccagctggagcagcgtggactggaagagcctgcccgacctggagatcctgaagaagcccatcagcgaggtgaccgacggcgccttcttcgactacatggccgtgtacagaatgtgctgcccctacaccagaagagccagcaagagcagcagacccatgtacggcgccgtgaccagcttcctgcacagcctgatcatccagaacgagcccagattcgccatgttcggccccggcctggaggagctgaacaccagcctggtgctgagcctgatgagcagcgaggagctgtgccccaccgccggcctgccccagagacagatcgacggcatcggcagcggcgtgaacttccagctgaacaaccagcacaagttcaacatcctgatcctgtacagcaccaccagaaaggagagagacagagccagagaggagcacaccagcgccgtgaacaagatgttcagcagacacaacgagggcgacgaccagcagggcagcagatacagcgtgatcccccagatccagaaggtgtgcgaggtggtggacggcttcatctacgtggccaacgccgaggcccacaagagacacgagtggcaggacgagttcagccacatcatggccatgaccgaccccgccttcggcagcagcggcagacccctgctggtgctgagctgcatcagccagggcgacgtgaagagaatgccctgcttctacctggcccacgagctgcacctgaacctgctgaaccacccctggctggtgcaggacaccgaggccgagaccctgaccggcttcctgaacggcatcgagtggatcctggaggaggtggagagcaagagagccagatag

SEQ ID NO: 172918 - protein, 447 aa, Artificial Sequence
  derived and/or modified sequence
MSRRPCSCALRPPRCSCSASPSAVTAAGRPRPSDSCKEESSTLSVKMKCDFNCNHVHSGLKLVKPDDIGRLVSYTPAYLEGSCKDCIKDYERLSCIGSPIVSPRIVQLETESKRLHNKENQHVQQTLNSTNEIEALETSRLYEDSGYSSFSLQSGLSEHEEGSLLEENFGDSLQSCLLQIQSPDQYPNKNLLPVLHFEKVVCSTLKKNAKRNPKVDREMLKEIIARGNFRLQNIIGRKMGLECVDILSELFRRGLRHVLATILAQLSDMDLINVSKVSTTWKKILEDDKGAFQLYSKAIQRVTENNNKFSPHASTREYVMFRTPLASVQKSAAQTSLKKDAQTKLSNQGDQKGSTYSRHNEFSEVAKTLKKNESLKACIRCNSPAKYDCYLQRATCKREGCGFDYCTKCLCNYHTTKDCSDGKLLKASCKIGPLPGTKKSKKNLRRL

SEQ ID NO: 172919 - DNA, 2037 bp, Artificial Sequence
  derived and/or modified sequence
gttgctcagctgcccccggagcggttcctccacctgaggcagactccacgtcggctggcatgagccggcgcccctgcagctgcgccctacggccaccccgctgctcctgcagcgccagccccagcgcagtgacagccgccgggcgccctcgaccctcggatagttgtaaagaagaaagttctaccctttctgtcaaaatgaagtgtgattttaattgtaaccatgttcattccggacttaaactggtaaaacctgatgacattggaagactagtttcctacacccctgcatatttggaaggttcctgtaaagactgcattaaagactatgaaaggctgtcatgtattgggtcaccgattgtgagccctaggattgtacaacttgaaactgaaagcaagcgcttgcataacaaggaaaatcaacatgtgcaacagacacttaatagtacaaatgaaatagaagcactagagaccagtagactttatgaagacagtggctattcctcattttctctacaaagtggcctcagtgaacatgaagaaggtagcctcctggaggagaatttcggtgacagtctacaatcctgcctgctacaaatacaaagcccagaccaatatcccaacaaaaacttgctgccagttcttcattttgaaaaagtggtttgttcaacattaaaaaagaatgcaaaacgaaatcctaaagtagatcgggagatgctgaaggaaattatagccagaggaaattttagactgcagaatataattggcagaaaaatgggcctagaatgtgtagatattctcagcgaactctttcgaaggggactcagacatgtcttagcaactattttagcacaactcagtgacatggacttaatcaatgtgtctaaagtgagcacaacttggaagaagatcctagaagatgataagggggcattccagttgtacagtaaagcaatacaaagagttaccgaaaacaacaataaattttcacctcatgcttcaaccagagaatatgttatgttcagaaccccactggcttctgttcagaaatcagcagcccagacttctctcaaaaaagatgctcaaaccaagttatccaatcaaggtgatcagaaaggttctacttatagtcgacacaatgaattctctgaggttgccaagacattgaaaaagaacgaaagcctcaaagcctgtattcgctgtaattcacctgcaaaatatgattgctatttacaacgggcaacctgcaaacgagaaggctgtggatttgattattgtacgaagtgtctctgtaattatcatactactaaagactgttcagatggcaagctcctcaaagccagttgtaaaataggtcccctgcctggtacaaagaaaagcaaaaagaatttacgaagattgtgatctcttattaaatcaattgttactgatcatgaatgttagttagaaaatgttaggttttaacttaaaaaaaattgtattgtgattttcaattttatgttgaaatcggtgtagtatcctgaggtttttttccccccagaagataaagaggatagacaacctcttaaaatatttttacaatttaatgagaaaaagtttaaaattctcaatacaaatcaaacaatttaaatattttaagaaaaaaggaaaagtagatagtgatactgagggtaaaaaaaaattgattcaattttatggtaaaggaaacccatgcaattttacctagacagtcttaaatatgtctggttttccatctgttagcatttcagacattttatgttcctcttactcaattgataccaacagaaatatcaacttctggagtctattaaatgtgttgtcacctttctaaagctttttttcattgtgtgtatttcccaagaaagtatcctttgtaaaaacttgcttgttttccttatttctgaaatctgttttaatatttttgtatacatgtaaatatttctgtattttttatatgtcaaagaatatgtctcttgtatgtacatataaaaataaattttgctcaataaaattgtaa

SEQ ID NO: 172920 - DNA, 1344 bp, Artificial Sequence
  derived and/or modified sequence
atgtccagacggccctgtagctgtgcactccgccctccccggtgtagctgctcagcatctcccagcgcagtcacagccgccggcagaccgaggcccagtgactcttgcaaagaggaatcaagcacactcagcgtgaagatgaagtgtgactttaactgtaaccacgttcactccggactgaaattggtcaagccagatgacattggaagactcgtgtcctatacccctgcttatctcgagggttcctgtaaggattgtataaaggattacgaacgcctcagctgtattggtagcccaatagtgtccccaaggatcgtgcagctggaaaccgagtcaaagagactgcacaataaggaaaatcaacacgtgcagcagacattgaattctaccaacgagatagaggctctggaaacctcacgactttatgaagacagtgggtactccagcttcagtctgcagagtggtctgagtgaacacgaggaaggatctcttcttgaagaaaatttcggcgactctctccagagttgtctcttacaaattcagagtcctgatcagtatcctaacaagaatttgttacccgtcttgcacttcgaaaaggtggtctgctctacactaaaaaaaaacgccaagcgcaatcccaaagtggacagagaaatgctcaaagaaatcattgcaaggggcaactttcgcttgcagaatatcatcggcagaaagatgggactggagtgcgtggatatactctctgagctcttccgcaggggtctgcgtcatgttctcgccaccatactggcccagttgagcgatatggatctcattaatgttagcaaggtttcgacgacttggaaaaaaattctggaagatgacaagggagcatttcagctttactctaaagctattcagagggttaccgagaacaataacaaattctcaccacacgcaagcacacgagagtacgtcatgttccgcacacccctcgccagcgtccagaagtccgctgcccagacatctttgaagaaggacgcccagaccaagctctctaaccagggggatcagaagggatctacttatagtcgtcataacgagttttccgaagtggcaaagaccctgaaaaaaaatgagagcctgaaagcctgcattagatgtaactcccccgctaagtatgactgctacctccagcgggctacatgcaaacgggaggggtgcggattcgactactgtacaaagtgcctgtgcaattatcatacgacaaaggactgtagtgacgggaagttgctgaaggcctcttgcaagattgggcctctgcccgggaccaaaaagtctaagaaaaatctgcgtagactgtag

SEQ ID NO: 172921 - DNA, 1344 bp, Artificial Sequence
  derived and/or modified sequence
atgagcagaagaccctgcagctgtgccctgcggcccccacgctgcagctgcagcgccagccccagcgctgtgacagctgctggccggccccggcccagcgacagctgcaaggaggagagcagcaccctgtctgtgaagatgaagtgtgacttcaactgcaaccacgtgcacagcggcctgaagctggtgaagccagatgacatcggccgcctggtgtcctacaccccagcctacctggagggcagctgcaaggactgcatcaaggactatgaaaggctgagctgcatcggcagccccatcgtgagccccagaattgtgcagctggagacagagagcaagaggctgcacaacaaggagaaccagcacgtgcagcagaccctgaacagcaccaatgaaattgaggccctggagaccagccggctgtatgaagattctggctacagcagcttcagcctgcagagcggcctgtctgaacatgaggagggcagcctgctggaggagaactttggagacagcctgcagagctgcctgctgcagatccagagcccagaccagtaccccaacaagaacctgctgcctgtgctgcactttgagaaggtggtgtgcagcaccctgaagaagaatgccaagaggaaccccaaggtggaccgggagatgctgaaggagatcatcgcccggggcaacttccggctgcagaacatcattggaaggaagatgggcctggagtgtgtggacatcctgtctgagctgttccggcggggcctgcggcacgtgctggccaccatcctggcccagctgagtgacatggacctgatcaacgtgtccaaggtgtccaccacctggaagaagatcctggaggatgacaagggggccttccagctgtacagcaaggccatccagagggtgacagagaacaacaacaagttcagcccccacgccagcacccgggagtatgtgatgttccgcacccccctggcctctgtgcagaagtctgctgcccagaccagcctgaagaaggatgcccagaccaagctgagcaaccagggcgaccagaagggcagcacctacagccgccacaatgagttcagcgaggtggccaagaccctgaagaagaatgaaagcctgaaggcctgcatccgctgcaacagccctgccaagtatgactgctacctgcagagggccacctgcaagcgggagggctgcggctttgactactgcaccaagtgcctgtgcaactaccacaccaccaaggactgcagtgatggcaagctgctgaaggccagctgcaagattggccccctgcccggcaccaagaagagcaagaagaacctgcggcggctgtag

SEQ ID NO: 172922 - DNA, 1344 bp, Artificial Sequence
  derived and/or modified sequence
atgagccggcggccctgcagctgcgccctgcggcccccccggtgctcttgctccgcgtccccatccgctgtgaccgccgcagggaggccccggccttccgacagttgcaaagaggaatcctccacccttagcgtgaagatgaagtgtgacttcaactgtaaccatgtccactctggcctcaagcttgttaagcccgacgacattggccgattagtcagctacactcccgcttatttagagggtagctgcaaagattgtattaaggattacgaacgactcagctgtataggatcccccatcgtctcaccgaggatcgtccagcttgaaacagagtcaaaaaggctgcataataaagaaaatcaacacgtccaacagaccctaaactccacgaatgagatcgaggcattggagacctctagactgtatgaagactcgggctattcttctttctccctgcaatccggactgagtgaacatgaggagggctcgctgttagaggagaattttggcgatagtcttcagagctgcctgctccagatacagtcccccgaccaataccccaacaaaaatctcctccctgtgctgcactttgaaaaggtggtttgtagtacgctgaagaaaaatgcaaaacgcaatcctaaagtggacagggaaatgctaaaggaaataattgcacgaggaaacttcaggctgcagaacatcatcggaagaaaaatggggctcgagtgtgtcgacatcctgagcgagttattccgccggggtctacgccatgttctagccaccatactggcacagctgtccgacatggatttgatcaatgtgtcgaaggtgtcaaccacatggaaaaagattctcgaagacgataaaggggcattccaattatacagcaaagcaattcagcgagtaactgagaacaataacaagttttcgcctcacgcatcgacccgagagtatgtcatgtttcgcacaccactggcttcagttcagaaatcggctgctcaaacatctctgaaaaaagacgcccagactaaactgtccaatcagggcgaccagaagggcagtacgtacagtcgacataatgagtttagcgaggtggccaaaaccctcaaaaaaaacgagtccctgaaggcttgcataagatgcaacagccctgcgaagtacgactgctatctgcagcgtgccacctgcaaacgggaaggatgtgggttcgattattgcactaagtgcctgtgtaattaccacacgactaaagactgctccgacgggaagctgctcaaggcctcgtgtaaaatcggacccctgcctggcactaaaaaatcaaaaaagaatctgaggaggctttag

SEQ ID NO: 172923 - DNA, 1344 bp, Artificial Sequence
  derived and/or modified sequence
atgtctcggcgaccttgttcctgtgctctgaggcctccaagatgttcctgcagcgccagtccatcggctgttacagcagcaggcaggcccagaccaagcgactcttgcaaagaggaatcttccacactgagcgtgaagatgaaatgtgacttcaattgcaatcatgtccacagcggtttgaagcttgtcaaacccgatgatatcggacgcctggtatcttacacccctgcctatctagaagggagttgtaaagattgcattaaagattatgagcgtctgagttgtatcgggagtcccatcgtgtctcctcggatagtgcagctggagacagagtcaaagcgactgcacaacaaggagaaccagcacgtccagcaaacgctaaatagcactaatgaaattgaggcactcgaaacgtcaagactgtatgaagatagtgggtacagcagcttttctctccagagcgggttgtccgaacatgaggagggaagtctcctagaggaaaatttcggagactctctgcagtcatgcctgctccagatccagtccccagatcagtatccaaacaaaaacctcctccctgtccttcacttcgaaaaggttgtgtgcagcactctgaaaaaaaatgctaaacgcaacccaaaggtagaccgggagatgctcaaagaaataatcgctcgcggaaattttagacttcaaaacattatcggccgaaaaatgggccttgaatgcgtcgacatcctgagtgaactgttccggcgaggcctcaggcacgtactggccactattctggcccagctcagcgatatggatctgatcaatgtgtccaaggtcagcactacctggaaaaagatcctagaggatgataagggcgcattccagctgtattccaaagctatccagcgggtgaccgagaataataacaaattctccccccatgcatccacgcgcgagtatgtcatgttcaggacccccctggcctctgtgcagaaatctgccgcacagacttccttgaagaaggacgcacagaccaaactctctaatcaaggtgaccaaaaggggagcacttattctagacacaacgagttttctgaagtggccaaaaccttaaaaaagaacgagtcactcaaggcctgtatccggtgtaactctccagccaaatacgattgctatctccaacgtgccacctgcaagcgagagggatgcgggtttgattattgtaccaaatgcttatgtaactatcacaccactaaggactgcagtgacgggaaacttttgaaagcaagctgtaagattggccctctacccggaacgaagaaatccaagaagaacctacgcagactgtag

SEQ ID NO: 172924 - DNA, 1344 bp, Artificial Sequence
  derived and/or modified sequence
atgagcagaagaccctgcagctgcgccctgagaccccccagatgcagctgcagcgccagccccagcgccgtgaccgccgccggcagacccagacccagcgacagctgcaaggaggagagcagcaccctgagcgtgaagatgaagtgcgacttcaactgcaaccacgtgcacagcggcctgaagctggtgaagcccgacgacatcggcagactggtgagctacacccccgcctacctggagggcagctgcaaggactgcatcaaggactacgagagactgagctgcatcggcagccccatcgtgagccccagaatcgtgcagctggagaccgagagcaagagactgcacaacaaggagaaccagcacgtgcagcagaccctgaacagcaccaacgagatcgaggccctggagaccagcagactgtacgaggacagcggctacagcagcttcagcctgcagagcggcctgagcgagcacgaggagggcagcctgctggaggagaacttcggcgacagcctgcagagctgcctgctgcagatccagagccccgaccagtaccccaacaagaacctgctgcccgtgctgcacttcgagaaggtggtgtgcagcaccctgaagaagaacgccaagagaaaccccaaggtggacagagagatgctgaaggagatcatcgccagaggcaacttcagactgcagaacatcatcggcagaaagatgggcctggagtgcgtggacatcctgagcgagctgttcagaagaggcctgagacacgtgctggccaccatcctggcccagctgagcgacatggacctgatcaacgtgagcaaggtgagcaccacctggaagaagatcctggaggacgacaagggcgccttccagctgtacagcaaggccatccagagagtgaccgagaacaacaacaagttcagcccccacgccagcaccagagagtacgtgatgttcagaacccccctggccagcgtgcagaagagcgccgcccagaccagcctgaagaaggacgcccagaccaagctgagcaaccagggcgaccagaagggcagcacctacagcagacacaacgagttcagcgaggtggccaagaccctgaagaagaacgagagcctgaaggcctgcatcagatgcaacagccccgccaagtacgactgctacctgcagagagccacctgcaagagagagggctgcggcttcgactactgcaccaagtgcctgtgcaactaccacaccaccaaggactgcagcgacggcaagctgctgaaggccagctgcaagatcggccccctgcccggcaccaagaagagcaagaagaacctgagaagactgtag

SEQ ID NO: 172925 - protein, 522 aa, Artificial Sequence
  derived and/or modified sequence
MRLRVRLLKRTWPLEVPETEPTLGHLRSHLRQSLLCTWGYSSNTRFTITLNYKDPLTGDEETLASYGIVSGDLICLILQDDIPAPNIPSSTDSEHSSLQNNEQPSLATSSNQTSMQDEQPSDSFQGQAAQSGVWNDDSMLGPSQNFEAESIQDNAHMAEGTGFYPSEPMLCSESVEGQVPHSLETLYQSADCSDANDALIVLIHLLMLESGYIPQGTEAKALSMPEKWKLSGVYKLQYMHPLCEGSSATLTCVPLGNLIVVNATLKINNEIRSVKRLQLLPESFICKEKLGENVANIYKDLQKLSRLFKDQLVYPLLAFTRQALNLPDVFGLVVLPLELKLRIFRLLDVRSVLSLSAVCRDLFTASNDPLLWRFLYLRDFRDNTVRVQDTDWKELYRKRHIQRKESPKGRFVMLLPSSTHTIPFYPNPLHPRPFPSSRLPPGIIGGEYDQRPTLPYVGDPISSLIPGPGETPSQFPPLRPRFDPVGPLPGPNPILPGRGGPNDRFPFRPSRGRPTDGRLSFM

SEQ ID NO: 172926 - protein, 408 aa, Artificial Sequence
  derived and/or modified sequence
MQDEQPSDSFQGQAAQSGVWNDDSMLGPSQNFEAESIQDNAHMAEGTGFYPSEPMLCSESVEGQVPHSLETLYQSADCSDANDALIVLIHLLMLESGYIPQGTEAKALSMPEKWKLSGVYKLQYMHPLCEGSSATLTCVPLGNLIVVNATLKINNEIRSVKRLQLLPESFICKEKLGENVANIYKDLQKLSRLFKDQLVYPLLAFTRQALNLPDVFGLVVLPLELKLRIFRLLDVRSVLSLSAVCRDLFTASNDPLLWRFLYLRDFRDNTVRVQDTDWKELYRKRHIQRKESPKGRFVMLLPSSTHTIPFYPNPLHPRPFPSSRLPPGIIGGEYDQRPTLPYVGDPISSLIPGPGETPSQFPPLRPRFDPVGPLPGPNPILPGRGGPNDRFPFRPSRGRPTDGRLSFM

SEQ ID NO: 172927 - DNA, 72 bp, Artificial Sequence
  derived and/or modified sequence
ttgaatcgaatggaatcgaatggattggaaaggaatagaatggaatggaatggaattgactcaaatggaatg

SEQ ID NO: 172928 - DNA, 86 bp, Artificial Sequence
  derived and/or modified sequence
aaaatagaatgaaagagaatcaaatggaattgaatcgaatggaatcgaatggattggaaaggaatagaatggaatggaatggaatg

SEQ ID NO: 172929 - DNA, 71 bp, Artificial Sequence
  derived and/or modified sequence
agaatcaaatggaattgaatcgaatggaatcgaatggattggaaaggaatagaatggaatggaatggaatg

SEQ ID NO: 172930 - DNA, 79 bp, Artificial Sequence
  derived and/or modified sequence
aagggaattgaatagaatgaatccgaatggaatggaatggaatggaatggaatggaatggaatggaatggaatggaatg

SEQ ID NO: 172931 - DNA, 2195 bp, Artificial Sequence
  derived and/or modified sequence
cgcgctctcaggcagcgccgttgcgcgcggagtcatcgatcggccgaccccgagaggcccggttcctttaggccgcctgcccgcctccagctctcggggtcggctccaggaggcgccctcaggagaggggcgggcgctctattccagagaccgagtggcagggcggccactgtggcggggctctttccccgtttcgcctcagctacccctcagctccggtagtcgccagtccggggtcgtcgccgtttggggcgggagctgctcggccccgccgccgtccccgtcgccgcttccgggtccaggcccctcgggccgcctgccgccgtcatgaggctgcgggtgcggcttctgaagcggacctggccgctggaggtgcccgagacggagccgacgctggggcatttgcgctcgcacctgaggcagtccctgctgtgcacctgggggtacagttctaatacccgatttacaattacattgaactacaaggatcccctcactggagatgaagagaccttggcttcatatgggattgtttctggggacttgatatgtttgattcttcaagatgacattccagcgcctaatataccttcatccacagattcagagcattcttcactccagaataatgagcaaccctctttggccaccagctccaatcagactagcatgcaggatgaacaaccaagtgattcattccaaggacaggcagcccagtctggtgtttggaatgacgacagtatgttagggcctagtcaaaattttgaagctgagtcaattcaagataatgcgcatatggcagagggcacaggtttctatccctcagaacccatgctctgtagtgaatcggtggaagggcaagtgccacattcattagagaccttgtatcaatcagctgactgttctgatgccaatgatgccttgatagtgttgatacatcttctcatgttggagtcaggttacatacctcagggcaccgaagccaaagcactgtccatgccggagaagtggaagttgagcggggtgtataagctgcagtacatgcatcctctctgcgagggcagctccgctactctcacctgtgtgcctttgggaaacctgattgttgtaaatgctacactaaaaatcaacaatgagattagaagtgtgaaaagattgcagctgctaccagaatcttttatttgcaaagagaaactaggggaaaatgtagccaacatatacaaagatcttcagaaactctctcgcctctttaaagaccagctggtgtatcctcttctggcttttacccgacaagcactgaacctaccagatgtatttgggttggtcgtcctcccattggaactgaaactacggatcttccgacttctggatgttcgttccgtcttgtctttgtctgcggtttgtcgtgacctctttactgcttcaaatgacccactcctgtggaggtttttatatctgcgtgattttcgagacaatactgtcagagttcaagacacagattggaaagaactgtacaggaagaggcacatacaaagaaaagaatccccgaaagggcggtttgtgatgctcctgccatcgtcaactcacaccattccattctatcccaaccccttgcaccctaggccatttcctagctcccgccttcctccaggaattatcgggggtgaatatgaccaaagaccaacacttccctatgttggagacccaatcagttcactcattcctggtcctggggagacgcccagccagtttcctccactgagaccacgctttgatccagttggcccacttccaggacctaaccccatcttgccagggcgaggcggccccaatgacagatttccctttagacccagcaggggtcggccaactgatggccggctgtcattcatgtgattgatttgtaatttcatttctggagctccatttgtttttgtttctaaactacagatgtcaactccttggggtgctgatctcgagtgttattttctgattgtggtgttgagagttgcactcccagaaaccttttaagagatacatttatagccctaggggtggtatgacccaaaggttcctctgtgacaaggttggccttgggaatagttggctgccaatctccctgctcttggttctcctctagattgaagtttgttttctgatgctgttcttaccagattaaaaaaaagtgtaaatta

SEQ ID NO: 172932 - DNA, 1888 bp, Artificial Sequence
  derived and/or modified sequence
ggggggccttcacgggaggcccgggctcttccgggcgtcgcggagccggagggtgcaggcgacgggaagcgcgggtggtcggctggggtccggctcctggagaacatggcccggcctcccgggggctctggtcccctcctcgttctaatacccgatttacaattacattgaactacaaggatcccctcactggagatgaagagaccttggcttcatatgggattgtttctggggacttgatatgtttgattcttcaagatgacattccagcgcctaatataccttcatccacagattcagagcattcttcactccagaataatgagcaaccctctttggccaccagctccaatcagactagcatgcaggatgaacaaccaagtgattcattccaaggacaggcagcccagtctggtgtttggaatgacgacagtatgttagggcctagtcaaaattttgaagctgagtcaattcaagataatgcgcatatggcagagggcacaggtttctatccctcagaacccatgctctgtagtgaatcggtggaagggcaagtgccacattcattagagaccttgtatcaatcagctgactgttctgatgccaatgatgccttgatagtgttgatacatcttctcatgttggagtcaggttacatacctcagggcaccgaagccaaagcactgtccatgccggagaagtggaagttgagcggggtgtataagctgcagtacatgcatcctctctgcgagggcagctccgctactctcacctgtgtgcctttgggaaacctgattgttgtaaatgctacactaaaaatcaacaatgagattagaagtgtgaaaagattgcagctgctaccagaatcttttatttgcaaagagaaactaggggaaaatgtagccaacatatacaaagatcttcagaaactctctcgcctctttaaagaccagctggtgtatcctcttctggcttttacccgacaagcactgaacctaccagatgtatttgggttggtcgtcctcccattggaactgaaactacggatcttccgacttctggatgttcgttccgtcttgtctttgtctgcggtttgtcgtgacctctttactgcttcaaatgacccactcctgtggaggtttttatatctgcgtgattttcgagacaatactgtcagagttcaagacacagattggaaagaactgtacaggaagaggcacatacaaagaaaagaatccccgaaagggcggtttgtgatgctcctgccatcgtcaactcacaccattccattctatcccaaccccttgcaccctaggccatttcctagctcccgccttcctccaggaattatcgggggtgaatatgaccaaagaccaacacttccctatgttggagacccaatcagttcactcattcctggtcctggggagacgcccagccagtttcctccactgagaccacgctttgatccagttggcccacttccaggacctaaccccatcttgccagggcgaggcggccccaatgacagatttccctttagacccagcaggggtcggccaactgatggccggctgtcattcatgtgattgatttgtaatttcatttctggagctccatttgtttttgtttctaaactacagatgtcaactccttggggtgctgatctcgagtgttattttctgattgtggtgttgagagttgcactcccagaaaccttttaagagatacatttatagccctaggggtggtatgacccaaaggttcctctgtgacaaggttggccttgggaatagttggctgccaatctccctgctcttggttctcctctagattgaagtttgttttctgatgctgttcttaccagattaaaaaaaagtgtaaatta

SEQ ID NO: 172933 - DNA, 1569 bp, Artificial Sequence
  derived and/or modified sequence
atgcgcttgagggtgagacttctcaagaggacctggcccttggaagttccagagacagagcccacactggggcatctaagatcccaccttcgccagtctctgctgtgtacatggggctactcatctaacaccagatttacaatcacgctaaattacaaagatcccctcaccggagacgaggagactctggccagctatggcatcgtgtccggagatctcatctgtcttattctgcaagatgacatacccgccccaaatatccccagctccacagactctgagcattcgagtcttcagaacaacgaacagccaagccttgctacttcgtctaaccaaacctccatgcaagacgagcagccctcagacagctttcaaggccaggccgcgcaaagcggagtctggaatgatgatagtatgctcggcccttcccagaacttcgaggccgagtcaatccaggacaacgcccacatggccgaggggacgggcttctacccaagcgagccgatgttgtgctccgagagcgttgagggccaggttccccacagtcttgagacactataccaatctgcagactgtagcgatgcgaatgatgctcttatcgtgctgatacacttgctgatgctcgaatcagggtatattccccagggtaccgaggccaaagctctaagtatgcctgaaaaatggaaactgtctggcgtttataaactccagtatatgcatcctttatgtgagggttcttctgcgactcttacctgcgtcccattaggtaatctaattgtggtgaatgccaccttgaagatcaataacgagatccgttcggtcaagcgactacagctgctgcccgagagcttcatctgtaaggaaaaactgggggagaatgttgccaatatctacaaggacttgcagaaactgtccagattattcaaagaccaactggtgtacccccttctcgcttttactcgccaagcccttaacctgccagatgtgtttgggcttgttgtactgcccctggaacttaaactgcggatattccgactcctagatgtgcgatccgtgttgtcactgtcggcggtctgcagagacttattcaccgcctccaacgaccccctattgtggaggtttctttacttacgcgacttccgggacaatacagtgagggttcaggacactgactggaaggagctgtaccgcaaacgacacatccagcgcaaggagtctcctaagggaaggttcgtgatgctgcttccaagtagcacgcacaccatcccgttctacccaaaccccttgcatccccgcccatttcctagttcccgcctgcccccaggaataatagggggagaatacgatcagagaccaacactcccatacgtcggtgacccaatttctagtctcatccccgggcccggggaaaccccttcccagtttcccccactgagaccaagattcgatccggttgggcctctccctggccctaacccgatattgcctggccgaggcggccccaacgataggttcccattccggccctcaagaggcaggcctactgacggaaggctcagctttatgtag

SEQ ID NO: 172934 - DNA, 1569 bp, Artificial Sequence
  derived and/or modified sequence
atgaggctgcgggtgcggctgctgaagaggacctggcccctggaggtgcctgagacagagcccaccctgggccacctgcggagccacctgcggcagagcctgctgtgcacctggggctacagcagcaacacccgcttcaccatcaccctgaactacaaggaccccctgactggagatgaggagaccctggccagctatggcatcgtgtctggggacctgatctgcctgatcctgcaggatgacatcccagcccccaacatccccagcagcacagattctgagcacagcagcctgcagaacaatgagcagcccagcctggccaccagcagcaaccagacctccatgcaggatgagcagcccagcgacagcttccagggccaggccgcccagagcggcgtgtggaatgatgacagcatgctgggccccagccagaactttgaggccgagagcatccaggacaatgcccacatggccgagggcaccggcttctaccccagcgagcccatgctgtgcagcgagagcgtggagggccaggtgccccacagcctggagaccctgtaccagagcgctgactgcagtgatgccaatgatgccctgattgtgctgatccacctgctgatgctggagagcggctacatcccccagggcacagaggccaaggccctgtccatgcctgagaagtggaagctgtctggagtgtacaagctgcagtacatgcaccccctgtgtgagggcagcagcgccaccctgacctgtgtgcccctgggcaacctgattgtggtgaatgccaccctgaagatcaacaatgagatccgctctgtgaagaggctgcagctgctgcctgagagcttcatctgcaaggagaagctgggggagaatgtggccaacatctacaaggacctgcagaagctgagccgcctcttcaaggaccagctggtgtaccccctgctggccttcacccggcaggccctgaacctgcctgatgtgtttggcctggtggtgctgcccctggagctgaagctgcgcatcttccggctgctggatgtgcgctctgtgctgagcctgtctgctgtgtgccgggacctcttcaccgccagcaatgaccccctgctgtggaggttcctgtacctgcgggacttccgggacaacacagtgcgggtgcaggacacagactggaaggagctgtacaggaagaggcacatccagaggaaggagagccccaagggccgctttgtgatgctgctgcccagcagcacccacaccatccccttctaccccaaccccctgcacccccggcccttccccagcagccggctgcccccaggcatcatcggcggggagtatgaccagaggcccaccctgccctacgtgggggaccccatcagcagcctcatccctggccctggagagacccccagccagttcccccccctgcggcccaggtttgatcctgtgggccccctgcccggccccaaccccatcctgcccggccggggcggccccaatgaccgcttccccttccggcccagccggggccggcccacagatggccgcctgtccttcatgtag

SEQ ID NO: 172935 - DNA, 1569 bp, Artificial Sequence
  derived and/or modified sequence
atgcggctgcgggtgcggctgctgaagcggacctggcccctggaggttcccgagacagagcctacgcttggccacctcagatcccaccttcggcagagcctcctatgcacatgggggtatagcagtaacaccaggtttaccatcacattgaattacaaggatcctcttacgggagacgaggagacactcgcttcttacggaatagtctcaggcgatctgatctgtttaattcttcaagatgacatccccgccccaaatataccgtcgtcaacggacagtgaacacagctccctccagaacaatgagcagccctctctggctacctcttccaaccagacctcaatgcaggacgaacagccgagtgattcctttcagggacaggccgctcaaagcggcgtgtggaacgacgattctatgctcggtccatcccagaattttgaagctgagtccattcaggacaacgcccacatggccgaaggtaccgggttctacccaagtgaaccgatgctgtgtagtgaatccgtggagggtcaagtccctcactctctggagactttgtatcagagtgctgattgtagtgacgccaatgatgccctgatcgtgctcattcatctcttaatgctggaatcagggtatatcccacagggcacggaagctaaagccctcagcatgccagagaaatggaagctttcaggagtgtacaagctccaatacatgcatccactctgtgagggctcttccgctaccctgacctgcgtgcccctcggaaacctgattgtcgtcaacgcaactctgaaaataaataatgagatccgcagcgtaaagcgcctgcagctgctgcccgagagcttcatttgcaaagagaagttaggtgaaaatgtggcgaacatctacaaggatctccagaaactgtctaggttatttaaggaccagttggtatatcccctgctcgccttcacccggcaggccttaaatttgccagacgtttttggactggtggtcctcccattagaacttaagctccgtattttccgtttgctggatgtgaggagcgtcttatccctgtctgcggtgtgcagggatctgttcacagcatccaatgaccctctgctttggagatttctctatcttcgcgacttccgggacaataccgtgagggttcaggatacagattggaaggagctgtaccggaagaggcacatccagcggaaagagagcccgaaagggaggttcgttatgctgctaccatcaagcacccataccatccccttttaccctaatcctctacaccctcgccccttccctagctcccgcttgccacccggcataataggtggtgagtatgaccagcggcccacactcccatacgtcggcgatcccatcagttctctcatcccaggaccgggtgagacacctagtcagtttccgcccttgaggcctcgcttcgaccctgtgggaccactgccaggccccaaccccatcctacccggcaggggggggcctaatgaccgttttcctttccgacctagcagagggcggcccactgacggaagactcagtttcatgtag

SEQ ID NO: 172936 - DNA, 1569 bp, Artificial Sequence
  derived and/or modified sequence
atgcggctaagggtccgattgttaaagcgcacctggcctttagaagtgcctgagactgaaccgactctaggccacctgaggtcccatttgaggcagtctctcctgtgcacttggggatatagtagcaacactcggttcaccatcacgttgaactataaggatccactcaccggagacgaagaaactcttgccagttatggaatcgtgagtggtgacctgatctgtttgatcttgcaggacgacattccagcccctaatataccatcgtccacggattccgagcattcctccctgcagaacaacgaacagcctagtctggcgacaagctcaaatcagaccagcatgcaggacgagcagccatccgactctttccagggccaggccgctcagtccggagtgtggaatgacgattccatgctcggcccatctcaaaatttcgaggccgaatcaattcaggacaacgcgcacatggcggaggggacaggcttttacccgtctgaaccaatgctgtgctctgagagcgtcgagggccaagtgcctcattcactggagacactgtaccagtcggccgattgtagtgacgccaacgatgctctgatcgtcttgattcacctgctgatgctggagagcgggtatataccgcagggtacagaggctaaagcccttagcatgcccgaaaaatggaaactgtccggagtatacaagctccagtacatgcaccctttgtgtgagggatcttcggccaccttgacctgtgtgcccttgggcaacctcattgtcgtgaatgcgactttgaagataaataacgagattcgctctgttaaacggctgcagcttctcccagaaagcttcatctgcaaggaaaagttgggggagaacgtggccaacatttacaaagatctacagaagctctcccgcctgttcaaagaccagctcgtctacccgctgctcgcctttaccagacaggccttaaatctgccagacgtctttggcctcgtggtattgccgctcgagcttaagcttcgcatttttcgtttattagacgttcggtcagtactgtctctgtccgccgtctgcagagacttgttcaccgcctctaacgacccacttctatggaggttcctgtatctaagggacttcagagacaataccgtcagggtccaggatacagactggaaagagctataccggaaacgtcatatacagaggaaggaatcaccgaagggacgttttgtgatgcttctcccgtcttcgacccatacaatccccttctatccaaaccctcttcaccctagacccttcccatcttctcgtctgcccccagggataataggcggtgaatacgaccagaggcccacgctcccatacgtgggcgatcctatttcttcccttataccaggacctggcgagactcccagccagttccccccactccgaccacggttcgaccctgtgggcccactgcccggaccaaatcccattctacctggtcgaggtggacccaatgataggttccctttccgcccttcccggggacgacccactgatggcaggctgtcgttcatgtag

SEQ ID NO: 172937 - DNA, 1569 bp, Artificial Sequence
  derived and/or modified sequence
atgagactgagagtgagactgctgaagagaacctggcccctggaggtgcccgagaccgagcccaccctgggccacctgagaagccacctgagacagagcctgctgtgcacctggggctacagcagcaacaccagattcaccatcaccctgaactacaaggaccccctgaccggcgacgaggagaccctggccagctacggcatcgtgagcggcgacctgatctgcctgatcctgcaggacgacatccccgcccccaacatccccagcagcaccgacagcgagcacagcagcctgcagaacaacgagcagcccagcctggccaccagcagcaaccagaccagcatgcaggacgagcagcccagcgacagcttccagggccaggccgcccagagcggcgtgtggaacgacgacagcatgctgggccccagccagaacttcgaggccgagagcatccaggacaacgcccacatggccgagggcaccggcttctaccccagcgagcccatgctgtgcagcgagagcgtggagggccaggtgccccacagcctggagaccctgtaccagagcgccgactgcagcgacgccaacgacgccctgatcgtgctgatccacctgctgatgctggagagcggctacatcccccagggcaccgaggccaaggccctgagcatgcccgagaagtggaagctgagcggcgtgtacaagctgcagtacatgcaccccctgtgcgagggcagcagcgccaccctgacctgcgtgcccctgggcaacctgatcgtggtgaacgccaccctgaagatcaacaacgagatcagaagcgtgaagagactgcagctgctgcccgagagcttcatctgcaaggagaagctgggcgagaacgtggccaacatctacaaggacctgcagaagctgagcagactgttcaaggaccagctggtgtaccccctgctggccttcaccagacaggccctgaacctgcccgacgtgttcggcctggtggtgctgcccctggagctgaagctgagaatcttcagactgctggacgtgagaagcgtgctgagcctgagcgccgtgtgcagagacctgttcaccgccagcaacgaccccctgctgtggagattcctgtacctgagagacttcagagacaacaccgtgagagtgcaggacaccgactggaaggagctgtacagaaagagacacatccagagaaaggagagccccaagggcagattcgtgatgctgctgcccagcagcacccacaccatccccttctaccccaaccccctgcaccccagacccttccccagcagcagactgccccccggcatcatcggcggcgagtacgaccagagacccaccctgccctacgtgggcgaccccatcagcagcctgatccccggccccggcgagacccccagccagttcccccccctgagacccagattcgaccccgtgggccccctgcccggccccaaccccatcctgcccggcagaggcggccccaacgacagattccccttcagacccagcagaggcagacccaccgacggcagactgagcttcatgtag

SEQ ID NO: 172938 - protein, 232 aa, Artificial Sequence
  derived and/or modified sequence
MQLTFAWLHVFGRTLRMMNFSGKGCANPWGHCSIYNKNPPLGFSFRKLYMQLDEGSLTFNANPDEGVNYFMSKGILDDSPKEIAKFIFCTRTLNWKKLRIYLDERRDVLDDLVTLHNFRNQFLPNALREFFRHIHAPEERGEYLETLITKFSHRFCACNPDLMRELGLSPDAVYVLCYSLILLSIDLTSPHVKNKMSKREFIRNTRRAAQNISEDFVGHLYDNIYLIGHVAA

SEQ ID NO: 172939 - protein, 319 aa, Artificial Sequence
  derived and/or modified sequence
MGQGLWRVVRNQQLQQEGYSEQGYLTREQSRRMAASNISNTNHRKQVQGGIDIYHLLKARKSKEQEGFINLEMLPPELSFTILSYLNATDLCLASCVWQDLANDELLWQGLCKSTWGHCSIYNKNPPLGFSFRKLYMQLDEGSLTFNANPDEGVNYFMSKGILDDSPKEIAKFIFCTRTLNWKKLRIYLDERRDVLDDLVTLHNFRNQFLPNALREFFRHIHAPEERGEYLETLITKFSHRFCACNPDLMRELGLSPDAVYVLCYSLILLSIDLTSPHVKNKMSKREFIRNTRRAAQNISEDFVGHLYDNIYLIGHVAA

SEQ ID NO: 172940 - protein, 184 aa, Artificial Sequence
  derived and/or modified sequence
MGQGLWRVVRNQQLQQEGYSEQGYLTREQSRRMAASNISNTNHRKQVQGGIDIYHLLKARKSKEQEGFINLEMLPPELSFTILSYLNATDLCLASCVWQDLANDELLWQGLCKSTWGHCSIYNKNPPLGFSFRKLYMQLDEGSLTFNANPDEGVNYFMSKGILDDSPKEIAKFIFCTRTLNWKK

SEQ ID NO: 172941 - DNA, 1650 bp, Artificial Sequence
  derived and/or modified sequence
tcaaaattgggatagtcggcagttctggcccctgcagctggaggtaccctgagttctgagggtcgtagtgctgtttctggtattctcatcgcggtcacctctaccggtgtggacaagtaaagtttgaatcagcttctccatggcctgggcaccagttcccggctgagccattttccttttggctaaaagtccccgcccagaggccaattcgtcgcggcggcggtggagatcgcaggtcgctcaggcttgcagatgggtcaagggttgtggagagtggtcagaaaccagcagctgcaacaagaaggctacagtgagcaaggctacctcaccagagagcagagcaggagaatggctgcgagcaacatttctaacaccaatcatcgtaaacaagtccaaggaggcattgacatatatcatcttttgaaggcaaggaaatcgaaagaacaggaaggattcattaatttggaaatgttgcctcctgagctaagctttaccatcttgtcctacctgaatgcaactgacctttgcttggcttcatgtgtttggcaggaccttgcgaatgatgaacttctctggcaagggttgtgcaaatccatggggtcactgttccatatacaataagaacccacctttaggattttcttttagaaaattgtatatgcagctggatgaaggcagcctcacctttaatgccaacccagatgagggagtgaactactttatgtccaagggtatcctggatgattcgccaaaggaaatagcaaagtttatcttctgtacaagaacactaaattggaaaaaactgagaatctatcttgatgaaaggagagatgtcttggatgaccttgtaacattgcataattttagaaatcagttcttgccaaatgcactgagagaattttttcgtcatatccatgcccctgaagagcgtggagagtatcttgaaactcttataacaaagttctcacatagattctgtgcttgcaaccctgatttaatgcgagaacttggccttagtcctgatgctgtctatgtactgtgctactctttgattctactttccattgacctcactagccctcatgtgaagaataaaatgtcaaaaagggaatttattcgaaatacccgtcgcgctgctcaaaatattagtgaagattttgtagggcatctttatgacaatatctaccttattggccatgtggctgcataaaaagcacaattgctaggacttcagtttttacttcagactaaagctacccaaggacttagcagatatgggggttacatcagtgctggtcattgtagcctgagtatacaatcaagcttcagtgtgcaacctttttttcttttgccattttctattttagtaatttccttggggaactaaataattttgcagaatttttcctaattttgtttatcacgttttgcacaaagcagagccactgtctaacacagctgttaacgaatgataaactgacattatactctaaaagatggtgtatttgtgcattagatttgcctgaaaaactttatccatttccattctttatacaaataccatgtaatgtgtacatatttaactaaagagatttatagtcataattattttattgtaaagattttaactaaagtttttccttttctctc

SEQ ID NO: 172942 - DNA, 2577 bp, Artificial Sequence
  derived and/or modified sequence
gatttaaaagaatgaaaaggcggatctggtcattcgtctccgcccggggtctctgtaaggacggcggagagaggcgacctccgcccaataccaggcgcagccttgccgtctcctcggggctcaccaagcagccaccagcaaagaagccggtttcaaaggcccagcacgacagggagaggaaaacggagcatatgcaaccatacacagtcaccagagtccagcctcccgcaaccagtcgctacagccaggcgcctgcgcccagaagcgcttctcgcgccgaccgtttgtatttggaattgtgggttcctgcccgccacgcaccaccgcaagaccttcaaagctgggagcttctctgtgctccaggattcctcgctgccgattccacaccgcgttcaagactcctgtgaagagcgactccgctgagagcctcctcaatggccagtccacttctaacttgcagctgagaagtttttctgatcttgatggtcagagtggctcgtgctacgaagtgagaaacaaggaatctatagcgaatcgtaaacaacagaaataaaaatgcgtctccgttaagagtcggagcctaacgtcacttccggcaacaataggaaacgtcaaaattgggatagtcggcagttctggcccctgcagctggaggtaccctgagttctgagggtcgtagtgctgtttctggtattctcatcgcggtcacctctaccggtgtggacaagtaaagtttgaatcagcttctccatggcctgggcaccagttcccggctgagccattttccttttggctaaaagtccccgcccagaggccaattcgtcgcggcggcggtggagatcgcaggtcgctcaggcttgcagatgggtcaagggttgtggagagtggtcagaaaccagcagctgcaacaagaaggctacagtgagcaaggctacctcaccagagagcagagcaggagaatggctgcgagcaacatttctaacaccaatcatcgtaaacaagtccaaggaggcattgacatatatcatcttttgaaggcaaggaaatcgaaagaacaggaaggattcattaatttggaaatgttgcctcctgagctaagctttaccatcttgtcctacctgaatgcaactgacctttgcttggcttcatgtgtttggcaggaccttgcgaatgatgaacttctctggcaagggttgtgcaaatccacttggggtcactgttccatatacaataagaacccacctttaggattttcttttagaaaattgtatatgcagctggatgaaggcagcctcacctttaatgccaacccagatgagggagtgaactactttatgtccaagggtatcctggatgattcgccaaaggaaatagcaaagtttatcttctgtacaagaacactaaattggaaaaaactgagaatctatcttgatgaaaggagagatgtcttggatgaccttgtaacattgcataattttagaaatcagttcttgccaaatgcactgagagaattttttcgtcatatccatgcccctgaagagcgtggagagtatcttgaaactcttataacaaagttctcacatagattctgtgcttgcaaccctgatttaatgcgagaacttggccttagtcctgatgctgtctatgtactgtgctactctttgattctactttccattgacctcactagccctcatgtgaagaataaaatgtcaaaaagggaatttattcgaaatacccgtcgcgctgctcaaaatattagtgaagattttgtagggcatctttatgacaatatctaccttattggccatgtggctgcataaaaagcacaattgctaggacttcagtttttacttcagactaaagctacccaaggacttagcagatatgggggttacatcagtgctggtcattgtagcctgagtatacaatcaagcttcagtgtgcaacctttttttcttttgccattttctattttagtaatttccttggggaactaaataattttgcagaatttttcctaattttgtttatcacgttttgcacaaagcagagccactgtctaacacagctgttaacgaatgataaactgacattatactctaaaagatggtgtatttgtgcattagatttgcctgaaaaactttatccatttccattctttatacaaataccatgtaatgtgtacatatttaactaaagagatttatagtcataattattttattgtaaagattttaactaaagtttttccttttctctcaaactgagttctgaaatttatttgattctgatctgaaactattgtcttcgtaaaagttagatctgacttcagacagaaaccaataccagcttccttttcctttaaactttgaagagtgttgatttgttactatattactatgcaaaactggcagttatttttataatataaatttataatttgattttttattttaaaaactgggttaatcaagtctcggtaagtcctttaaaccatttaggatttttaaaacatcaaaatttatgatttacattcataggaataaaataaaatattattagaactctggtaaa

SEQ ID NO: 172943 - DNA, 928 bp, Artificial Sequence
  derived and/or modified sequence
ataggaaacgtcaaaattgggatagtcggcagttctggcccctgcagctggaggtaccctgagttctgagggtcgtagtgctgtttctggtattctcatcgcggtcacctctaccggtgtggacaagtaaagtttgaatcagcttctccatggcctgggcaccagttcccggctgagccattttccttttggctaaaagtccccgcccagaggccaattcgtcgcggcggcggtggagatcgcaggtcgctcagaccaagaaaaaacatgtttggtttcatttcgaagctccttagaaagaattctatagatcctctcaacatgataaagaagctttgaacaaaataaattcaaatttggaagaaaaggcttgcagatgggtcaagggttgtggagagtggtcagaaaccagcagctgcaacaagaaggctacagtgagcaaggctacctcaccagagagcagagcaggagaatggctgcgagcaacatttctaacaccaatcatcgtaaacaagtccaaggaggcattgacatatatcatcttttgaaggcaaggaaatcgaaagaacaggaaggattcattaatttggaaatgttgcctcctgagctaagctttaccatcttgtcctacctgaatgcaactgacctttgcttggcttcatgtgtttggcaggaccttgcgaatgatgaacttctctggcaagggttgtgcaaatccacttggggtcactgttccatatacaataagaacccacctttaggattttcttttagaaaattgtatatgcagctggatgaaggcagcctcacctttaatgccaacccagatgagggagtgaactactttatgtccaagggtatcctggatgattcgccaaaggaaatagcaaagtttatcttctgtacaagaacactaaattggaaaaaa

SEQ ID NO: 172944 - DNA, 699 bp, Artificial Sequence
  derived and/or modified sequence
atgcagctcaccttcgcgtggttacacgtgtttgggagaaccctccggatgatgaacttttcaggaaaagggtgtgcaaacccctgggggcattgctccatttacaataagaaccctccattggggtttagtttccggaagttatacatgcagctggacgagggtagtctgactttcaacgccaaccccgacgaaggtgtgaactatttcatgagcaaggggatcctcgatgactcacctaaagagatagctaaattcattttttgtacgcgcacgctaaactggaagaagttaagaatttacctggacgagaggcgggacgtgctcgacgacctggtaactctgcacaactttcgtaaccaatttcttcccaatgcactgagagagttctttcgacacattcacgccccggaagaacgcggcgaatatctagaaacattgattacaaagtttagccaccgcttctgcgcctgtaaccctgacctaatgagagaacttggcctgagccctgacgccgtttacgttctgtgctactcactgatcttgctctctattgatctcaccagtccgcatgtcaaaaacaagatgtccaagcgggagttcatcagaaataccagacgtgccgcacagaatatttccgaagattttgtagggcacctctatgacaacatctatcttatcgggcatgttgcagcatag

SEQ ID NO: 172945 - DNA, 960 bp, Artificial Sequence
  derived and/or modified sequence
atgggtcaggggctatggcgggtcgtgcgcaaccagcagctgcagcaagaggggtacagtgagcagggctacttgaccagggagcagagtcgtcggatggccgcctctaacattagtaacacgaaccaccgtaaacaggtacaggggggaatcgacatttatcacctgttaaaagcccgtaaatccaaggagcaagaggggtttattaatttggagatgttacccccagaactgagctttactatcctgtcatacctgaacgctactgatctctgtctcgcatcatgcgtctggcaggacttggccaacgacgaactgctgtggcaagggttgtgtaagtctacttgggggcactgtagcatttacaataagaacccacctcttggtttttcgttcagaaaactgtatatgcagctggatgaaggatctctgacattcaatgctaatccagacgaaggagttaattacttcatgagcaagggcatcctggatgactcccccaaggagatcgcaaaatttatcttctgcactcgcactctgaactggaagaaattgcgcatctacctcgatgaacgccgcgacgtgttggatgatctcgtcacactgcacaacttcaggaatcagttcctacctaatgccctccgggagtttttcaggcacattcatgctcccgaagagcgaggagagtatttggagacactcatcaccaagttttctcaccggttttgtgcttgtaaccctgatctcatgcgagagctgggacttagcccggacgccgtctatgtgctgtgttacagcctgattttgctttccatagacctaacgagccctcatgtgaaaaataaaatgtcaaagagagagtttatccggaacacacggagagccgctcagaacatctcagaagactttgtaggacatctgtacgacaacatttacttaattgggcacgtagccgcatag

SEQ ID NO: 172946 - DNA, 555 bp, Artificial Sequence
  derived and/or modified sequence
atgggacaaggactctggagagtcgtgagaaaccagcagcttcaacaggaaggctactcggagcagggttacctcactcgcgagcagtctcggcgaatggccgctagtaacatttccaacaccaaccaccgtaaacaggtgcagggcgggattgacatctaccacttgctaaaagccagaaaatcgaaagaacaggagggctttattaatctagagatgctgccacctgagttgagcttcactatccttagttatttaaacgcaacggacctttgcctggccagttgcgtgtggcaggacctggcaaacgacgaactgctatggcagggactttgcaaatcaacatggggtcactgttctatttataataaaaacccccctctgggatttagcttcagaaagctctatatgcagttggacgagggttctctaacctttaacgcaaaccctgatgagggcgtgaactattttatgtccaaaggcatccttgatgacagtcctaaggagatagctaagttcattttttgcacccgaacccttaactggaaaaagtag

SEQ ID NO: 172947 - DNA, 699 bp, Artificial Sequence
  derived and/or modified sequence
atgcagctgacctttgcctggctgcacgtgtttggaagaaccctgaggatgatgaacttcagcggcaagggctgtgccaacccctggggccactgcagcatctacaacaagaacccccccctgggcttctccttcaggaagctgtacatgcagctggatgagggcagcctgaccttcaatgccaacccagatgagggcgtgaactacttcatgagcaagggcatcctggatgacagccccaaggagatcgccaagttcatcttctgcaccaggaccctgaactggaagaagctgcgcatctacctggatgaaagaagagatgtgctggatgacctggtgaccctgcacaacttcaggaaccagttcctgcccaatgccctgcgggagttcttccgccacatccacgcccctgaggagcggggggagtacctggagaccctcatcaccaagttcagccaccgcttctgtgcctgcaacccagacctgatgagggagctgggcctgagcccagatgctgtgtatgtgctgtgctacagcctcatcctgctgagcattgacctgaccagcccccacgtgaagaacaagatgagcaagcgggagttcatccggaacacccggcgggccgcccagaacatcagcgaggactttgtgggccacctgtatgacaacatctacctgattggacatgtggccgcctag

SEQ ID NO: 172948 - DNA, 960 bp, Artificial Sequence
  derived and/or modified sequence
atgggccagggcctgtggagggtggtgaggaaccagcagctgcagcaggagggctacagcgagcagggctacctgacccgggagcagagcaggaggatggccgccagcaacatcagcaacaccaaccacaggaagcaggtgcagggcggcatcgacatctaccacctgctgaaggccaggaagagcaaggagcaggagggcttcatcaacctggagatgctgcccccagagctgtccttcaccatcctgagctacctgaatgccacagacctgtgcctggccagctgtgtgtggcaggacctggccaatgatgagctgctgtggcagggcctgtgcaagagcacctggggccactgcagcatctacaacaagaacccccccctgggcttctccttcaggaagctgtacatgcagctggatgagggcagcctgaccttcaatgccaacccagatgaaggagtgaactacttcatgagcaagggcatcctggatgacagccccaaggagatcgccaagttcatcttctgcaccaggaccctgaactggaagaagctgcgcatctacctggatgagaggagagatgtgctggatgacctggtgaccctgcacaacttcaggaaccagttcctgcccaatgccctgcgggagttcttccgccacatccacgcccctgaggagcggggggagtacctggagaccctcatcaccaagttcagccaccgcttctgtgcctgcaacccagacctgatgagggagctgggcctgagcccagatgctgtgtatgtgctgtgctacagcctcatcctgctgagcattgacctgaccagcccccacgtgaagaacaagatgagcaagcgggagttcatccggaacaccaggagagctgcccagaacatcagtgaagattttgtgggccacctgtatgacaacatctacctgattggccacgtggccgcctag

SEQ ID NO: 172949 - DNA, 555 bp, Artificial Sequence
  derived and/or modified sequence
atgggccagggcctgtggagggtggtgaggaaccagcagctgcagcaggagggctacagcgagcagggctacctgacccgggagcagagcaggaggatggccgccagcaacatcagcaacaccaaccacaggaagcaggtgcagggcggcatcgacatctaccacctgctgaaggccaggaagagcaaggagcaggagggcttcatcaacctggagatgctgcccccagagctgtccttcaccatcctgagctacctgaatgccacagacctgtgcctggccagctgtgtgtggcaggacctggccaatgatgagctgctgtggcagggcctgtgcaagagcacctggggccactgcagcatctacaacaagaacccccccctgggcttctccttcaggaagctgtacatgcagctggatgagggcagcctgaccttcaatgccaacccagatgaaggagtgaactacttcatgagcaagggcatcctggatgacagccccaaggagatcgccaagttcatcttctgcaccaggaccctgaactggaagaagtag

SEQ ID NO: 172950 - DNA, 699 bp, Artificial Sequence
  derived and/or modified sequence
atgcagctgaccttcgcctggctgcacgtgttcggccggaccctgagaatgatgaatttttctggaaaaggatgcgctaatccttggggccattgttctatttacaataagaaccccccactgggtttctcctttcgcaagctttatatgcagctggatgagggatctcttacgttcaatgctaatcctgatgaaggggtaaattactttatgtccaaaggaatcttagatgactcacctaaagagatagcaaaatttatcttttgcacccggactttaaattggaaaaagctgcgtatttatctggacgagcggcgcgacgtgctggacgatctcgtgaccctccataacttccggaaccaattcctccccaacgcactgcgggaattctttaggcacatacacgctcctgaagaaaggggtgaatatctggagaccctgatcaccaaattcagtcataggttctgtgcgtgtaacccggatctgatgagggagttaggtcttagcccagacgctgtctacgtcctctgctattcgctcatattgctcagcatcgatctgacatccccccatgtgaagaataagatgtccaaaagggagtttattcgtaacacccgaagggctgcccagaacatctccgaggattttgtgggccacctctatgataacatctacctgatcggccacgtggctgcatag

SEQ ID NO: 172951 - DNA, 960 bp, Artificial Sequence
  derived and/or modified sequence
atgggccagggcctgtggcgggtggtgcggaaccagcagctgcagcaagaaggctacagcgaacaggggtatttgacaagggagcaatccaggcggatggctgctagcaatatatctaacacaaaccacaggaagcaggttcagggagggatcgacatctatcatttactgaaggctaggaagtctaaggagcaagagggtttcatcaatctcgaaatgctgcccccagagctcagtttcacgattctgtcatatctgaatgctacagatttgtgtctggcctcctgcgtttggcaggaccttgccaatgacgagctgctgtggcaaggcctgtgtaagtcaacttggggacattgcagcatctataataagaatccgcctttaggcttctccttcagaaagctctatatgcagctggatgagggtagcctcacattcaacgccaacccggatgaaggagttaattattttatgtcaaagggcatactcgatgattctccgaaggaaatcgctaagttcatattttgcactcgaaccctcaactggaaaaaactgaggatatacctcgacgagaggagggatgtacttgacgacctggtgacccttcacaatttcagaaaccagttcttgccaaacgctctgcgagaattcttccgacacatacatgcccctgaagaaagaggagagtacctggaaacactgattaccaagttttcccatcgtttttgtgcttgcaatcccgatttaatgcgtgaactgggactatcgcccgatgccgtgtacgttctatgttattccttgattctactgtctatagatctcacctctccgcacgtgaaaaacaaaatgtccaagcgcgagttcattagaaatactcgcagagcagctcagaatatttccgaggacttcgtgggccatctgtacgacaatatctatcttatcggacacgtcgcagcctag

SEQ ID NO: 172952 - DNA, 555 bp, Artificial Sequence
  derived and/or modified sequence
atgggccagggcctgtggcgggtggtgcggaaccagcagctgcagcaggagggatattcagaacaggggtacctgacccgggagcaaagtagacgcatggcggccagtaacatttcaaacaccaatcaccgcaaacaggtgcagggtggtatagatatataccatcttctgaaggcccggaaatcaaaggagcaggaaggcttcattaatttggagatgctaccaccagagctgtcctttacaattctgtcttatctgaacgcgacagacttgtgcctggcatcttgcgtgtggcaggatttagccaatgacgagctcctgtggcagggcctgtgcaaatccacttggggccattgcagcatctacaacaaaaatcccccactgggattctcttttagaaagttgtatatgcagctggatgaaggttccctgaccttcaatgcgaacccagatgaaggtgttaactatttcatgtccaaaggaatattggacgactccccgaaagagatcgctaaattcatattttgtactagaaccctgaattggaagaaatag

SEQ ID NO: 172953 - DNA, 699 bp, Artificial Sequence
  derived and/or modified sequence
atgcagctcacatttgcatggttgcacgtatttggaaggacactgaggatgatgaatttttctggtaaagggtgcgccaacccctgggggcattgtagtatttataataagaacccccctttgggattttccttccgtaaactgtacatgcagcttgacgaggggagtctgacatttaacgccaacccggacgagggggtgaattactttatgagtaaggggatcctcgatgacagccccaaagaaatcgctaaattcatcttttgtactcggaccctgaactggaaaaaactgaggatttacctggacgagaggcgtgacgtgctggacgacctggtcactttacacaatttccgcaatcagtttttgcccaatgccctacgcgagtttttccggcacatccatgcccctgaggagcggggagagtacctagagacacttatcaccaagtttagtcatagattttgtgcatgtaaccccgacctgatgagggaactcggactgagcccagacgccgtatacgtcctgtgttattctttgattctgctgagcatagacttgacctcgccacacgtgaagaacaagatgagtaaaagggagttcattcgtaataccaggagggcagcccagaacatttctgaagactttgtaggtcatttgtacgataacatatacctgattgggcatgtggccgcttag

SEQ ID NO: 172954 - DNA, 960 bp, Artificial Sequence
  derived and/or modified sequence
atgggccaaggactctggcgagtggtgagaaaccaacagctgcagcaggagggatattcagagcagggctacctcactcgagagcagagtaggcgcatggctgccagtaatatcagcaatacgaatcatagaaagcaggtacaggggggaattgacatctatcacctcctaaaggcgagaaaaagcaaggagcaggagggattcataaacttggagatgcttccgcctgagctatcctttactatcctgtcatacctgaatgccacagatttatgcctcgcttcttgtgtctggcaagacctcgcaaatgacgagctgttgtggcagggcttgtgcaaaagcacatggggccattgctccatatataacaaaaaccctcctctcgggttctcattccgcaaactctatatgcaattggacgaggggtcgctgacctttaatgctaatcctgacgaaggtgtgaattatttcatgtccaaaggcatcctcgacgattctcctaaagaaatcgctaaatttattttctgtaccaggactctcaattggaaaaaactcaggatctacctggacgagagaagggatgtcttagatgacctggtgacacttcacaattttcgcaaccaatttttaccaaacgccctgagggagttttttaggcatattcatgcgccagaagagcggggagagtacctggagacactcatcaccaaattctcccacaggttttgcgcctgtaatcctgacctgatgcgagagctgggactctctccagatgcagtgtacgtgctttgctacagcctgattctgctcagtatagatctaacctcaccacacgtgaaaaataagatgtcaaagcgagagtttatccggaacacccggagagctgctcagaatatcagcgaggattttgtcgggcatctgtacgataatatttacctcatcggacacgtagcagcttag

SEQ ID NO: 172955 - DNA, 555 bp, Artificial Sequence
  derived and/or modified sequence
atgggtcaaggtctttggagagtggtgcggaaccagcaactgcagcaggaggggtactccgagcagggctacctaaccagggagcagagtaggcggatggccgcttcaaacatcagtaacacaaaccataggaagcaggtgcaaggaggtatcgacatttaccatttgctgaaggccaggaaatccaaagagcaggagggattcattaacctcgaaatgctgccccctgagctctccttcactatcctaagttacctcaatgccactgatctgtgcctggcttcctgtgtttggcaggatctcgctaacgatgaattgctttggcaggggttatgcaagtctacctggggacattgctccatatataacaagaatccaccattaggcttttcattccgaaagctgtacatgcagcttgatgaaggatctctgacttttaacgccaatcccgacgaaggggtgaattacttcatgtctaaagggattctcgacgactctccgaaggagatagccaagtttatcttttgtacaaggactcttaactggaaaaaatag

SEQ ID NO: 172956 - DNA, 699 bp, Artificial Sequence
  derived and/or modified sequence
atgcagctgaccttcgcctggctgcacgtgttcggcagaaccctgagaatgatgaacttcagcggcaagggctgcgccaacccctggggccactgcagcatctacaacaagaacccccccctgggcttcagcttcagaaagctgtacatgcagctggacgagggcagcctgaccttcaacgccaaccccgacgagggcgtgaactacttcatgagcaagggcatcctggacgacagccccaaggagatcgccaagttcatcttctgcaccagaaccctgaactggaagaagctgagaatctacctggacgagagaagagacgtgctggacgacctggtgaccctgcacaacttcagaaaccagttcctgcccaacgccctgagagagttcttcagacacatccacgcccccgaggagagaggcgagtacctggagaccctgatcaccaagttcagccacagattctgcgcctgcaaccccgacctgatgagagagctgggcctgagccccgacgccgtgtacgtgctgtgctacagcctgatcctgctgagcatcgacctgaccagcccccacgtgaagaacaagatgagcaagagagagttcatcagaaacaccagaagagccgcccagaacatcagcgaggacttcgtgggccacctgtacgacaacatctacctgatcggccacgtggccgcctag

SEQ ID NO: 172957 - DNA, 960 bp, Artificial Sequence
  derived and/or modified sequence
atgggccagggcctgtggagagtggtgagaaaccagcagctgcagcaggagggctacagcgagcagggctacctgaccagagagcagagcagaagaatggccgccagcaacatcagcaacaccaaccacagaaagcaggtgcagggcggcatcgacatctaccacctgctgaaggccagaaagagcaaggagcaggagggcttcatcaacctggagatgctgccccccgagctgagcttcaccatcctgagctacctgaacgccaccgacctgtgcctggccagctgcgtgtggcaggacctggccaacgacgagctgctgtggcagggcctgtgcaagagcacctggggccactgcagcatctacaacaagaacccccccctgggcttcagcttcagaaagctgtacatgcagctggacgagggcagcctgaccttcaacgccaaccccgacgagggcgtgaactacttcatgagcaagggcatcctggacgacagccccaaggagatcgccaagttcatcttctgcaccagaaccctgaactggaagaagctgagaatctacctggacgagagaagagacgtgctggacgacctggtgaccctgcacaacttcagaaaccagttcctgcccaacgccctgagagagttcttcagacacatccacgcccccgaggagagaggcgagtacctggagaccctgatcaccaagttcagccacagattctgcgcctgcaaccccgacctgatgagagagctgggcctgagccccgacgccgtgtacgtgctgtgctacagcctgatcctgctgagcatcgacctgaccagcccccacgtgaagaacaagatgagcaagagagagttcatcagaaacaccagaagagccgcccagaacatcagcgaggacttcgtgggccacctgtacgacaacatctacctgatcggccacgtggccgcctag

SEQ ID NO: 172958 - DNA, 555 bp, Artificial Sequence
  derived and/or modified sequence
atgggccagggcctgtggagagtggtgagaaaccagcagctgcagcaggagggctacagcgagcagggctacctgaccagagagcagagcagaagaatggccgccagcaacatcagcaacaccaaccacagaaagcaggtgcagggcggcatcgacatctaccacctgctgaaggccagaaagagcaaggagcaggagggcttcatcaacctggagatgctgccccccgagctgagcttcaccatcctgagctacctgaacgccaccgacctgtgcctggccagctgcgtgtggcaggacctggccaacgacgagctgctgtggcagggcctgtgcaagagcacctggggccactgcagcatctacaacaagaacccccccctgggcttcagcttcagaaagctgtacatgcagctggacgagggcagcctgaccttcaacgccaaccccgacgagggcgtgaactacttcatgagcaagggcatcctggacgacagccccaaggagatcgccaagttcatcttctgcaccagaaccctgaactggaagaagtag

SEQ ID NO: 172959 - protein, 413 aa, Artificial Sequence
  derived and/or modified sequence
MASCAEPSEPSAPLPAGVPPLEDFEVLDGVEDAEGEEEEEEEEEEEDDLSELPPLEDMGQPPAEEAEQPGALAREFLAAMEPEPAPAPAPEEWLDILGNGLLRKKTLVPGPPGSSRPVKGQVVTVHLQTSLENGTRVQEEPELVFTLGDCDVIQALDLSVPLMDVGETAMVTADSKYCYGPQGSRSPYIPPHAALCLEVTLKTAVDGPDLEMLTGQERVALANRKRECGNAHYQRADFVLAANSYDLAIKAITSSAKVDMTFEEEAQLLQLKVKCLNNLAASQLKLDHYRAALRSCSLVLEHQPDNIKALFRKGKVLAQQGEYSEAIPILRAALKLEPSNKTIHAELSKLVKKHAAQRSTETALYRKMLGNPSRLPAKCPGKGAWSIPWKWLFGATAVALGGVALSVVIAARN

SEQ ID NO: 172960 - DNA, 1766 bp, Artificial Sequence
  derived and/or modified sequence
ggccgaacctggttcccgaggcgcggcggccgcggctgggggcggggaggggggcgcaggaccccaagtgggggtcccggagccagagggccaattcctgtccccccagcagcatggcatcgtgtgctgaaccctctgagccctctgccccactgcccgccggggtcccaccgctcgaggacttcgaggtactggatggggttgaggatgcagagggtgaggaggaagaggaggaggaagaggaggaagaggatgacctgagtgagctgccaccgctggaggacatgggacaacccccggcggaggaggctgagcagcctggggccctggcccgagagttccttgctgccatggagcccgagcccgccccagccccggccccagaagagtggctggacattctggggaacgggctgttgaggaagaagacgctggtcccagggccgccaggttcgagccgcccggtcaagggccaggtggtcaccgtacatctgcagacgtcgctggagaatggcacacgggtgcaggaggagccggagctggtgttcactctgggtgactgtgacgtcatccaggccctggatctcagtgtcccactcatggacgtgggggagacggccatggtcactgctgactccaagtactgctacggcccccaaggcagcaggagcccatacatccccccgcacgcggccctgtgcctggaggtgaccctgaagacggctgtggacgggcctgacctggagatgctcacggggcaggagcgcgtggccctggccaaccggaagcgggagtgcggcaacgcccactaccagcgggcggacttcgtcctggccgccaactcctacgacctcgccatcaaggctatcacctccagcgccaaagtggacatgacgttcgaggaggaggcacagctcctgcagttgaaggtgaagtgtctgaacaacctggcggcctcgcagctgaagctcgaccactaccgcgcagccctgcgctcctgcagccttgtgctggagcaccagccagacaacatcaaggctctcttccgcaagggcaaggtgctggcccagcagggggagtacagtgaggccatccccatcctgagggcagccctgaagctggaaccttccaacaagacgatccacgcagagctctcaaagctggtgaagaagcatgcggcgcagcggagcacggagaccgccttgtaccggaaaatgctgggcaaccccagccggctgcctgctaagtgccctggcaagggtgcctggtccatcccatggaagtggctgtttggggcgactgctgttgccttggggggtgtggcactctctgtggtcatcgctgccaggaactgaccacctaggtggctgccaccccctctgcacaccatggaccctgccctgcgctccccaactcccccaggctccctgtccactgccctccctggtctggccccctcctccgggttaggggagcaaggattgggggtcgtgcagcccagccagcaggagggactgaggccctctaggaggaaagcccagagggagggggccctcattccttcagacccagttttcccccaccctccttaccccgctgggctaggtctccgccagggctggcctcagtttctcctcaacaggcctgggggcagcccttcccctgcctagtccccgcctgagtgccagccccccaccccgcctgccgccccctgtccaggttccctccccgccacagtgaaataaagcatcccaccctgcagtttc

SEQ ID NO: 172961 - DNA, 1242 bp, Artificial Sequence
  derived and/or modified sequence
atggccagctgtgcagaaccttctgaaccatcggcccccctgcctgcaggggttcctcctctcgaagactttgaagtgttagacggtgtcgaagatgccgagggggaagaggaggaagaggaagaggaggaggaggaggacgatctgtctgagctccctccattggaggacatgggtcagccgccagcggaagaagccgagcagcccggcgcactcgcccgagaatttcttgcggccatggagccagagccagcacccgcacccgcacccgaagaatggctggatattctcggcaacgggctgcttaggaaaaagacccttgtacccggaccaccggggagctccagacccgtcaaagggcaagttgtgactgtccacctgcagacgtcactcgaaaacggaacacgggtgcaggaagagcccgaactggtgtttaccctgggtgattgcgatgtgattcaggcgctcgatttatccgtcccgctcatggatgtgggtgaaactgctatggtgactgctgattccaagtactgttacggcccacaaggctctcgtagcccctacattcccccgcacgcagcgctgtgtctcgaggtcaccctcaagacggcagtcgatggcccggatctagaaatgctgaccggtcaggaaagagtggcgctggcaaacagaaaaagagagtgtgggaacgcccactaccagcgcgctgattttgtgttggctgccaacagttatgatttggccataaaagctatcacctcatcagcaaaggttgacatgaccttcgaggaagaagcgcagctgctgcagctgaaggtgaagtgtctgaataacctggcggcctcccaattaaagctggaccattaccgcgccgctctaagatcgtgctcgttggtgctcgagcaccagccagacaatatcaaggccctgttccgaaaaggcaaggtgcttgcgcagcagggcgaatactctgaagctattcccatcctcagagccgctctgaaactggaaccatcaaacaagaccatccatgctgaactatccaaactcgtcaagaagcacgccgcacagcgctccaccgagacagcactgtatcgcaagatgcttggaaatccaagtcgattacctgccaagtgtcctggcaagggggcatggagtataccctggaagtggctattcggagcgactgctgtggcgttgggaggcgtggcactctctgttgttatcgctgcacggaactag

SEQ ID NO: 172962 - DNA, 1242 bp, Artificial Sequence
  derived and/or modified sequence
atggccagctgtgccgagcccagcgagcccagcgcccccctgcctgctggggtgccccccctggaggactttgaggtgctggatggagtggaggatgctgagggggaggaggaggaggaggaggaggaggaggaggaggatgacctgtctgagctgccccccctggaggacatgggccagcccccagctgaggaggccgagcagcccggggccctggcccgggagttcctggccgccatggagcctgagcccgccccagccccagcccctgaggagtggctggacatcctgggcaatggcctgctgaggaagaagaccctggtgcccggccccccaggcagcagcaggcctgtgaagggccaggtggtgacagtgcacctgcagaccagcctggagaatggcaccagggtgcaggaggagcctgagctggtgttcaccctgggggactgtgatgtgatccaggccctggacctgtctgtgcccctgatggatgtgggggagacagccatggtgacagctgacagcaagtactgctacggcccccagggcagccgcagcccctacatcccccctcatgctgccctgtgcctggaggtgaccctgaagacagctgtggatggccctgacctggagatgctgaccggccaggagcgggtggccctggccaacaggaagagagaatgtggaaatgcccactaccagagagctgactttgtgctggccgccaacagctatgacctggccatcaaggccatcaccagcagcgccaaggtggacatgacctttgaggaggaggcccagctgctgcagctgaaggtgaagtgcctgaacaacctggccgccagccagctgaagctggaccactacagagctgccctgcggagctgcagcctggtgctggagcaccagcctgacaacatcaaggccctcttcaggaagggcaaggtgctggcccagcagggcgagtacagcgaggccatccccatcctgcgggccgccctgaagctggagcccagcaacaagaccatccatgctgagctgagcaagctggtgaagaagcatgctgcccagaggagcacagaaacagccctgtacaggaagatgctgggcaaccccagccggctgcctgccaagtgccctgggaagggggcctggagcatcccctggaagtggctgtttggagccacagctgtggccctgggcggcgtggccctgtctgtggtgattgctgccaggaactag

SEQ ID NO: 172963 - DNA, 1242 bp, Artificial Sequence
  derived and/or modified sequence
atggccagctgcgccgagcccagcgagcccagcgcccccctgcccgccggcgtgccacccctcgaggacttcgaggttctggacggcgtggaagatgccgagggtgaggaggaggaggaggaagaggaggaggaggaagatgatctcagcgagctgccccctctcgaggacatgggccagcctcccgcggaagaagccgagcagccgggggccctagcgagggagttcctcgccgcgatggagcccgagcccgcccccgctccagcccccgaagaatggcttgatatacttggaaacggtctgctgcgcaagaaaactctggttcccgggccaccaggctctagccgacctgtcaagggacaagtcgttacagtgcacttacagacttcactggaaaacggcacgcgcgttcaggaagaacccgagctggtgtttacactgggggactgcgatgttatacaggccctcgacctgtcagtaccccttatggatgtgggcgaaacggcgatggtcactgccgactctaagtactgctatggtccacagggaagccgcagcccatatattccaccccacgctgcactgtgtctggaagtcacactgaaaaccgctgttgacggaccggaccttgagatgctgacaggacaggaacgtgtggcccttgccaaccggaaacgcgagtgtggtaacgcacactaccagagagcggatttcgtgctggcggccaacagttatgatttagcgataaaagccatcacatcgagcgccaaggtggacatgacctttgaggaagaggcccaactcctgcagctgaaagttaagtgcttgaacaaccttgccgcttcccaactcaagctggatcactaccgggccgccctgcgatcatgcagtctggttctggagcatcaacccgacaacataaaggcacttttcagaaagggtaaggtactggcgcagcaaggagagtactctgaagccattcctatcctgcgagccgccttgaagctggagccgtctaacaagacaattcacgccgaactgtcaaagctcgtgaaaaagcacgctgcccagcggagtacggaaacagccctttatcgcaagatgctgggtaatccttcacgcctcccagccaagtgtccgggtaagggcgcctggtccataccctggaaatggctgttcggggccaccgctgtggccctaggcggcgtggcactctccgtcgtgattgcagctagaaattag

SEQ ID NO: 172964 - DNA, 1242 bp, Artificial Sequence
  derived and/or modified sequence
atggccagctgtgcagaaccatccgaaccgtctgctccccttccggcaggcgtacccccactcgaggatttcgaggtcttggacggcgtggaagacgcggagggagaggaggaagaagaggaggaggaggaggaagaagatgatctcagcgagctaccaccgttagaggacatgggacagcctcctgcagaagaggcggagcagcccggagctctcgcgcgtgagttcttagcggctatggaaccagaacccgcacctgcccctgcaccagaggagtggctcgacatcttaggaaatggcctgctgcgcaagaagactcttgtccccggtcccccaggatctagccgcccagtcaaaggacaggtcgtgactgtccatctgcaaaccagcctggagaacggcacccgtgtacaagaagagcctgagctggtgtttacactgggtgactgtgacgtgatacaggcactcgacttaagcgtgcccctgatggacgtaggggagactgcaatggtgaccgcggacagcaagtattgttatggtccacaaggttcacgctcgccatacattcctccccacgcagcactctgcctggaggtgactctgaaaacggcagtcgacggacctgacctcgagatgctgactgggcaagagagagttgctcttgccaatcggaagagggaatgcggcaatgcccactatcaaagggcagacttcgtcctcgccgcaaactcgtacgatctggcgatcaaagccatcacaagttctgccaaagttgatatgaccttcgaagaagaagctcaattgctccagcttaaggtgaaatgtctgaacaatttagcagcttcacagctcaaactagaccactatagggccgctctacgatcttgtagcctggttctggaacaccagcctgacaatatcaaggccctgtttcgaaaagggaaggtcctggctcagcagggtgagtacagcgaagctatccctatcttgcgggctgccttaaagctggagcctagcaacaagacaattcatgcggagctgagtaagctcgtaaagaagcatgccgcacagcgcagtaccgaaactgcactgtatcggaagatgctgggaaatcccagtcgactccctgctaagtgtccaggcaagggcgcatggagtatcccttggaagtggttgtttggggcaaccgcagtggctttgggcggagtggccctctccgtggtcatagctgcaaggaactag

SEQ ID NO: 172965 - DNA, 1242 bp, Artificial Sequence
  derived and/or modified sequence
atggccagctgcgccgagcccagcgagcccagcgcccccctgcccgccggcgtgccccccctggaggacttcgaggtgctggacggcgtggaggacgccgagggcgaggaggaggaggaggaggaggaggaggaggaggacgacctgagcgagctgccccccctggaggacatgggccagccccccgccgaggaggccgagcagcccggcgccctggccagagagttcctggccgccatggagcccgagcccgcccccgcccccgcccccgaggagtggctggacatcctgggcaacggcctgctgagaaagaagaccctggtgcccggcccccccggcagcagcagacccgtgaagggccaggtggtgaccgtgcacctgcagaccagcctggagaacggcaccagagtgcaggaggagcccgagctggtgttcaccctgggcgactgcgacgtgatccaggccctggacctgagcgtgcccctgatggacgtgggcgagaccgccatggtgaccgccgacagcaagtactgctacggcccccagggcagcagaagcccctacatccccccccacgccgccctgtgcctggaggtgaccctgaagaccgccgtggacggccccgacctggagatgctgaccggccaggagagagtggccctggccaacagaaagagagagtgcggcaacgcccactaccagagagccgacttcgtgctggccgccaacagctacgacctggccatcaaggccatcaccagcagcgccaaggtggacatgaccttcgaggaggaggcccagctgctgcagctgaaggtgaagtgcctgaacaacctggccgccagccagctgaagctggaccactacagagccgccctgagaagctgcagcctggtgctggagcaccagcccgacaacatcaaggccctgttcagaaagggcaaggtgctggcccagcagggcgagtacagcgaggccatccccatcctgagagccgccctgaagctggagcccagcaacaagaccatccacgccgagctgagcaagctggtgaagaagcacgccgcccagagaagcaccgagaccgccctgtacagaaagatgctgggcaaccccagcagactgcccgccaagtgccccggcaagggcgcctggagcatcccctggaagtggctgttcggcgccaccgccgtggccctgggcggcgtggccctgagcgtggtgatcgccgccagaaactag

SEQ ID NO: 172966 - protein, 325 aa, Artificial Sequence
  derived and/or modified sequence
MPRPGRNTYSDQKPPYSYISLTAMAIQSSPEKMLPLSEIYKFIMDRFPYYRENTQRWQNSLRHNLSFNDCFIKIPRRPDQPGKGSFWALHPSCGDMFENGSFLRRRKRFKVLKSDHLAPSKPADAAQYLQQQAKLRLSALAASGTHLPQMPAAAYNLGGVAQPSGFKHPFAIENIIAREYKMPGGLAFSAMQPVPAAYPLPNQLTTMGSSLGTGWPHVYGSAGMIDSATPISMASGDYSAYGVPLKPLCHAAGQTLPAIPVPIKPTPAAVPALPALPAPIPTLLSNSPPSLSPTSSQTATSQSSPATPSETLTSPASALHSVAVH

SEQ ID NO: 172967 - DNA, 978 bp, Artificial Sequence
  derived and/or modified sequence
atgccccggccgggccgcaacacctacagtgatcagaagccaccctacagctatatctccttgacagccatggccatccagagcagtccagaaaaaatgctgcccctctctgagatatacaaatttatcatggaccggttcccgtactaccgcgagaacactcagcgctggcagaacagcctgagacataacttgagcttcaacgattgtttcatcaagattccccgccggcctgatcagcccggtaagggcagtttctgggccctgcacccatcctgtggcgatatgttcgagaatgggagctttctgaggagacggaagaggtttaaagtgctgaaatcagaccacctcgctccctcaaagccagccgatgcagcacaatatcttcagcaacaggcaaagcttagactgtctgctttggcggcgagcgggactcacctcccacagatgcccgctgctgcatacaaccttggcggagtggcccagcctagtggctttaaacacccatttgccatcgagaacatcatcgcccgggaatacaagatgcccggcggccttgctttcagtgctatgcagccagtgcctgcggcctatcctctgccgaaccagctaacaacgatggggagctcactcggtaccggttggccccacgtttatgggtcagccggcatgattgacagtgctaccccaataagtatggcctccggggattactcagcatacggggtgccactcaaaccactgtgccacgctgccgggcagacactaccagcaataccagtaccaataaagccgacgcctgctgcagtgcccgcactgcccgctctacccgccccaatccccacgctgctgagcaatagccccccatcactctcacccacatcaagtcaaacagccacctcacaatcctccccggccacacccagcgagactctgacctccccagcctctgcccttcacagcgtggccgtgcattag

SEQ ID NO: 172968 - DNA, 978 bp, Artificial Sequence
  derived and/or modified sequence
atgccccggcccggcaggaacacctacagcgaccagaagccaccctacagctacatcagcctgacagccatggccatccagagcagccctgagaagatgctgcccctgtctgagatctacaagttcatcatggaccgcttcccctactaccgggagaacacccagcgctggcagaacagcctgcggcacaacctgtccttcaatgactgcttcatcaagatcccccggcggccagaccagcccgggaagggcagcttctgggccctgcaccccagctgtggggacatgtttgaaaatggcagcttcctgcggcggaggaagcgcttcaaggtgctgaagagtgaccacctggcccccagcaagccagcagatgctgcccagtacctgcagcagcaggccaagctgcggctgagcgccctggccgccagcggcacccacctgccccagatgcctgctgctgcctacaacctgggcggcgtggcccagcccagcggcttcaagcacccctttgccatcgagaacatcatcgcccgggagtacaagatgcctgggggcctggccttcagcgccatgcagcctgtgcctgctgcctaccccctgcccaaccagctgaccaccatgggcagcagcctgggcaccggctggccccacgtgtatggcagcgctggcatgattgattctgccacccccatctccatggccagcggggactacagcgcctatggagtgcccctgaagcccctgtgccacgccgccggccagaccctgcctgccatccctgtgcccatcaagcccaccccagctgctgtgcctgccctgcctgccctgcctgcccccatccccaccctgctgagcaacagcccccccagcctgagccccaccagcagccagacagccaccagccagagcagccctgccaccccatctgagaccctgaccagccctgccagcgccctgcacagcgtggccgtgcactag

SEQ ID NO: 172969 - DNA, 978 bp, Artificial Sequence
  derived and/or modified sequence
atgccccggcccggccggaacacctacagcgaccagaagcccccctattcttacatatccttaactgccatggcaattcagagttctccagaaaagatgcttcctctctcagagatctacaagttcatcatggataggttcccttattatagagagaacactcagcgatggcagaacagcctgaggcataacctatccttcaatgactgctttatcaagatacctagaaggccagaccagcccgggaagggatctttctgggccctgcacccttcatgcggcgacatgttcgagaacggatcatttctgcggcgccggaaaaggtttaaagtcttgaagtctgaccatcttgcacctagtaaaccggccgacgctgctcagtatctccaacaacaagccaaactgcgactttctgccctcgccgctagcggcacccatttgccacagatgcccgccgccgcttataacctggggggggttgcgcaaccatccggatttaaacatccgttcgctatagaaaatataatcgcacgagagtataagatgccaggcggcctggccttcagtgcaatgcagcctgtgcccgcagcttaccctttgcctaaccaactcactaccatgggttccagccttggtactgggtggccccatgtgtacggaagcgccggtatgattgacagcgccacacccatctcaatggcgtccggcgattacagtgcttatggggtgcctctgaagcctctctgccatgcagccggccaaacgttacccgctatcccagttcccattaaacctacccccgcagccgttccagccctgcccgcgctgcctgctcccatacctaccctgctttcgaattctccgccctcactttctcccacatcaagccaaaccgctacatcccagtcctcgccagccacaccctcggagacactcacaagtcctgccagcgctctccactctgtcgcggtgcactag

SEQ ID NO: 172970 - DNA, 978 bp, Artificial Sequence
  derived and/or modified sequence
atgcccaggcccggaagaaatacgtattcagaccagaaacccccttacagttacattagtctgacagccatggccatccagtcctcaccagagaaaatgctccctctgtctgagatttataaattcatcatggaccgattcccttattatcgagaaaatacacagagatggcaaaacagcctgcgacataacttgtccttcaacgattgctttatcaagatccctcgaagacctgatcaacccggaaagggctccttctgggctttgcacccaagctgcggggatatgtttgagaacggttccttcctgaggaggagaaagcggtttaaagtgctcaaaagcgatcacctggcaccatccaaacctgcggatgctgcccagtatctgcagcaacaggcgaagttacggttatccgccctcgctgcgagcggcactcacctgccccagatgccagccgcagcttacaacctggggggagttgctcaaccttcaggcttcaagcatcccttcgcaattgagaatattattgccagggaatacaagatgcccggtggcctggccttttctgctatgcagccagtacccgctgcgtatccacttccaaaccaacttacaactatggggtccagcctgggtacaggctggccccacgtatatggctcagccggtatgatcgattcagccaccccaattagcatggccagcggagattacagcgcttatggcgtgccactgaaacctctctgtcatgctgctggacagacacttccggctattccagtgccaataaagcctacccctgccgctgtgcccgcattgccagccctgcctgcccctatccctaccctgcttagtaactcaccgccaagcctgtcgcccacctcttcacagaccgctacttcacagtcctcccccgcaacaccgagcgaaactctgaccagtcctgctagcgcattgcactccgtggctgtgcactag

SEQ ID NO: 172971 - DNA, 1672 bp, Artificial Sequence
  derived and/or modified sequence
aaggcgattgtcatatgatagctaagaagtggcacattaatgaagcgccgctacaggggtcttttctgctcctgtcaccgcttaaaactatcagatggttcgagggaggacatggaggcagccacctagctcagcggagacgcggagcccacagcagcgccctccggagccctaacacgtcgctgccaccatccgcgccgggactccgcagccgagctcggccgcccgcaggacgctccaggagcgtcgcggaccgggcggcacgggacgctgcggggctgagctcaagagcccaggttcgcgccgagtccaaccggacccggacgctgcgcgcggagtgcgcgtcgagtgcgcgccgagagagaagcggcgcgcagcggcgtcctcccggatgcggacgcgcaacttgaagcaactttaagatccgagcagtccgccggcccgcgcggacccagagcaagaagagggcgaggaagaagatgcctcggcccggccgcaacacgtacagcgaccagaagccgccctactcgtacatctcgctgaccgctatggccatccagagctctcccgagaagatgctgccgctgagcgagatctacaagttcatcatggaccgcttcccctactacagggagaacacgcagcgctggcagaacagtctgcgccacaacctctccttcaacgactgcttcatcaagatcccgcggcggccggaccagccaggcaagggcagcttctgggcgctgcacccaagctgcggggacatgttcgagaacggcagcttcctgcggcgccgcaagcgcttcaaggtgcttaagtccgaccacctggcgcccagcaagccagccgacgcggcgcagtacctgcagcagcaggccaagctgcggctcagcgcgctggcggcctcgggcacgcacctgccacagatgcccgccgccgcctacaacttgggcggcgtggcgcagccctcgggcttcaagcaccccttcgccatcgagaacatcatcgcgcgggaatacaagatgcctggggggctggccttctccgccatgcagccggtgcccgctgcctacccgctccccaaccagttgactaccatgggcagctcgctgggcaccggctggccacacgtgtatggctccgccggcatgatcgactcggccacccccatctccatggcgagtggcgactacagcgcctacggcgtgccgttgaagccgctgtgccacgcggcgggccaaacgctgcccgccatccccgtgcccattaagcccacgccggccgccgtgcccgcgctgcctgcgctgccagcgcccatccccaccttgctctcgaactcgccgccctcgctcagccccacgtcctcgcaaacagccaccagccaaagcagccccgccacccccagcgaaacgctcaccagcccggcctccgccttgcactcggtggcggtgcactgacccgcaggagcccacgccccctctcgttctcctccccaccacctcactcgccttccctggctcccagtcctgccggcccccacctgggaccgccaccctaacttgttcatttcaccttcggccaacccgccttgccccaagagaactttgttttggacccaggagaccaaacacaaacttgcagatgggccgagaggcgcgtgggagttgtcctc

SEQ ID NO: 172972 - DNA, 978 bp, Artificial Sequence
  derived and/or modified sequence
atgcccagacccggcagaaacacctacagcgaccagaagcccccctacagctacatcagcctgaccgccatggccatccagagcagccccgagaagatgctgcccctgagcgagatctacaagttcatcatggacagattcccctactacagagagaacacccagagatggcagaacagcctgagacacaacctgagcttcaacgactgcttcatcaagatccccagaagacccgaccagcccggcaagggcagcttctgggccctgcaccccagctgcggcgacatgttcgagaacggcagcttcctgagaagaagaaagagattcaaggtgctgaagagcgaccacctggcccccagcaagcccgccgacgccgcccagtacctgcagcagcaggccaagctgagactgagcgccctggccgccagcggcacccacctgccccagatgcccgccgccgcctacaacctgggcggcgtggcccagcccagcggcttcaagcaccccttcgccatcgagaacatcatcgccagagagtacaagatgcccggcggcctggccttcagcgccatgcagcccgtgcccgccgcctaccccctgcccaaccagctgaccaccatgggcagcagcctgggcaccggctggccccacgtgtacggcagcgccggcatgatcgacagcgccacccccatcagcatggccagcggcgactacagcgcctacggcgtgcccctgaagcccctgtgccacgccgccggccagaccctgcccgccatccccgtgcccatcaagcccacccccgccgccgtgcccgccctgcccgccctgcccgcccccatccccaccctgctgagcaacagcccccccagcctgagccccaccagcagccagaccgccaccagccagagcagccccgccacccccagcgagaccctgaccagccccgccagcgccctgcacagcgtggccgtgcactag

SEQ ID NO: 172973 - protein, 378 aa, Artificial Sequence
  derived and/or modified sequence
MSSFDLPAPSPPRCSPQFPSIGQEPPEMNLYYENFFHPQGVPSPQRPSFEGGGEYGATPNPYLWFNGPTMTPPPYLPGPNASPFLPQAYGVQRPLLPSVSGLGGSDLGWLPIPSQEELMKLVRPPYSYSALIAMAIHGAPDKRLTLSQIYQYVADNFPFYNKSKAGWQNSIRHNLSLNDCFKKVPRDEDDPGKGNYWTLDPNCEKMFDNGNFRRKRKRKSDVSSSTASLALEKTESSLPVDSPKTTEPQDILDGASPGGTTSSPEKRPSPPPSGAPCLNSFLSSMTAYVSGGSPTSHPLVTPGLSPEPSDKTGQNSLTFNSFSPLTNLSNHSGGGDWANPMPTNMLSYGGSVLSQFSPHFYNSVNTSGVLYPREGTEV

SEQ ID NO: 172974 - DNA, 2296 bp, Artificial Sequence
  derived and/or modified sequence
gggtgcaggtgccaggcaggtggctccggccagcccagccccagcatgagctccttcgacctgccggcgccctccccacctcgctgcagcccccagttccccagcatcggccaggagccccccgagatgaacctctactatgagaacttcttccacccacagggcgtgcccagccctcagcggccctccttcgaggggggcggcgagtatggggccacccccaacccctacctctggttcaacgggcccaccatgaccccgccaccctacctgcccggccccaacgccagccccttcctgccccaggcctatggagtgcagaggccgctgctgcccagcgtgtcggggcttggggggagcgacctgggctggctgcccatcccctcgcaggaggagctgatgaagctggtgcggccaccctattcctactcggctctcatcgccatggccatccacggggcacccgacaagcgcctcactctcagccagatctaccagtacgtggccgacaacttccccttctacaacaagagcaaggccggctggcagaactccatccgccacaacctgtcgctcaacgactgcttcaagaaggtgccccgcgacgaggacgacccgggcaaagggaattactggaccctggaccccaactgtgagaaaatgttcgacaatggaaatttccgcaggaaaaggaagagaaaatcagatgtttcctctagcacagcctccttggccttagagaagacagagagcagtctcccggtggacagccccaagaccacggagcctcaggacatcttggatggagcctcaccagggggcaccaccagctccccagagaagcggccctcccctcccccatcaggcgccccttgccttaacagcttcctttcctctatgacagcctatgtgagcggggggagccccacgagccaccccttggtcacaccaggactgagccctgagcccagtgacaagacggggcagaactcactgaccttcaactccttctccccgctcaccaacctcagcaaccacagcggtgggggtgactgggcgaaccccatgcccaccaacatgctcagctatggaggatctgtgctcagccaattcagccctcacttctacaacagtgtcaacaccagtggtgtcctctaccccagggagggcaccgaggtctaggtacagaacagctcctgagccaggtggacatgccagagagaaaagcagtagaggtcctccatgccagccccacggtggtccatgactgcggaactgcccagacataagcaggagcctccgaggaatccaccctctttctagaacactggttaaggcttctgtttatcacacataggcccacacacagactcaccaactttgcaatagaaatactggtgcctgcagagcagcactaacagtggcaggtgctgtactaggctctgtactggccacacttactattgacagtcaccccgtaaggttcacaaaccaccccattgaacagatgaggaactgaggctcaaggaggttaagtaacatttccagggttatataaactagtaaatggcagagctaagagtcaaatccaggtctatgtgatcctcagagattggaggccgggatggagaattggttgagtagccaaggaaggtcagtgtgaaaagcttgctatggcaaatatagcgaaatctctccactgccttctgtccaccaacatttagtgccagcctaggcacaacttgtcctggtccaagtccttattctgcttgccccaacttacctgcagacactccttttgctaccactcaaggaaggaagtcaccagtggccttagtgcaggaaactcagccctggtggccctgcagaacaatgcatctgacatgtgcgatgcatccccatggagagacagcattgctccccagccctccagaaaccttgagcagatccagggatcagtgagaggagtggtgtgtacccctaaatcctcccaccccagcactgcccatctgtaaaatcttgtaaagcccagtttcctgtgtgcatgtcatggaccagtgagctggagatggctgaatcttccaagagaaacaaggttggataagcgcttccttttttttagcccaggagaggtggatgtttgtctgagaaaacaatggcctcaagggaggggccttgggcccaccctcacagggggtctctgtgtgatctcttgggatttctccttgtttttgtgagtacctgggaagtgttgtttgttttcttattttctttttaattaaaaaacaaacaaaca

SEQ ID NO: 172975 - DNA, 1990 bp, Artificial Sequence
  derived and/or modified sequence
gtcaggggcagctccggggtgcaggtgccaggcaggtggctccggccagcccagccccagcatgagctccttcgacctgccggcgccctccccacctcgctgcagcccccagttccccagcatcggccaggagccccccgagatgaacctctactatgagaacttcttccacccacagggcgtgcccagccctcagcggccctccttcgaggggggcggcgagtatggggccacccccaacccctacctctggttcaacgggcccaccatgaccccgccaccctacctgcccggccccaacgccagccccttcctgccccaggcctatggagtgcagaggccgctgctgcccagcgtgtcggggcttggggggagcgacctgggctggctgcccatcccctcgcaggaggagctgatgaagctggtgcggccaccctattcctactcggctctcatcgccatggccatccacggggcacccgacaagcgcctcactctcagccagatctaccagtacgtggccgacaacttccccttctacaacaagagcaaggccggctggcagaactccatccgccacaacctgtcgctcaacgactgcttcaagaaggtgccccgcgacgaggacgacccgggcaaagggaattactggaccctggaccccaactgtgagaaaatgttcgacaatggaaatttccgcaggaaaaggaagagaaaatcagatgtttcctctagcacagcctccttggccttagagaagacagagagcagtctcccggtggacagccccaagaccacggagcctcaggacatcttggatggagcctcaccagggggcaccaccagctccccagagaagcggccctcccctcccccatcaggcgccccttgccttaacagcttcctttcctctatgacagcctatgtgagcggggggagccccacgagccaccccttggtcacaccaggactgagccctgagcccagtgacaagacggggcagaactcactgaccttcaactccttctccccgctcaccaacctcagcaaccacagcggtgggggtgactgggcgaaccccatgcccaccaacatgctcagctatggaggatctgtgctcagccaattcagccctcacttctacaacagtgtcaacaccagtggtgtcctctaccccagggagggcaccgaggtctaggtacagaacagctcctgagccaggtggacatgccagagagaaaagcagtagaggtcctccatgccagccccacggtggtccatgactgcggaactgcccagacataagcaggagcctccgaggaatccaccctctttctagaacactggttaaggcttctgtttatcacacataggcccacacacagactcaccaactttgcaatagaaatactggtgcctgcagagcagcactaacagtggcaggtgctgtactaggctctgtactggccacacttactattgacagtcaccccgtaaggttcacaaaccaccccattgaacagatgaggaactgaggctcaaggaggttaagtaacatttccagggttatataaactagtaaatggcagagctaagagtcaaatccaggtctatgtgatcctcagagattggaggccgggatggagaattggttgagtagccaaggaaggtcagtgtgaaaagcttgctatggcaaatatagcgaaatctctccactgccttctgtccaccaacatttagtgccagcctaggcacaacttgtcctggtccaagtccttattctgcttgccccaacttacctgcagacactccttttgctaccactcaaggaaggaagtcaccagtggccttagtgcaggaaactcagccctggtggccctgcagaacaatgcatctgacatgtgcgatgcatccccatggagagacagcattgctccccagccctccagaaaccttgagcagatccagggatcagtgagaggagtggtgt

SEQ ID NO: 172976 - DNA, 1137 bp, Artificial Sequence
  derived and/or modified sequence
atgagtagctttgatctccctgcaccaagcccaccacggtgtagccctcagttcccaagtattgggcaagaaccacccgagatgaacctgtattacgagaactttttccacccacagggtgtgcctagcccccaaagacctagtttcgagggtggaggcgaatacggcgcaactcctaatccatatctttggtttaacgggccaaccatgacccctcctccttatctgcctggaccaaacgcttccccctttctgcctcaggcttacggggtccagcgacccttgttgccctctgtgtcaggactgggtgggtccgacctcggctggctgccaatccccagtcaggaagaattaatgaagctggttaggcccccctactcgtattcagctctgattgctatggctatccacggggccccggacaaacggctcacactctctcagatctaccaatatgtggcagataacttccctttctacaataagagtaaggcaggatggcagaattccatcaggcataatctgtctctgaatgactgctttaaaaaggttcctcgcgacgaagacgaccctgggaagggaaactactggacccttgaccccaactgtgaaaaaatgtttgataacggaaacttccgtcggaagcgtaagagaaagtctgatgtaagctctagcaccgcgtccctggccctggagaaaactgaatctagcctgcccgttgactctcccaaaaccaccgagcctcaggacatcttagacggcgcctccccgggtggaacaacgtccagcccagaaaagcggccctctcctcctccctcaggcgctccttgtctcaactcatttctttcaagtatgacagcttacgttagcggcggatccccgacgtctcaccccctggtgacccccggtctgagtccggaaccaagcgataagacaggacaaaacagcctgacattcaattcattttccccactaactaatctgagcaatcacagcggtggaggcgactgggccaacccgatgccgacaaacatgctgtcctatgggggctcagttctgtcgcagttctctccacacttttacaattctgttaacacaagcggtgtgctgtatcccagagaggggaccgaggtgtag

SEQ ID NO: 172977 - DNA, 1137 bp, Artificial Sequence
  derived and/or modified sequence
atgagcagctttgacctgcctgcccccagccccccacgctgcagcccccagttccccagcatcggccaggagcccccagagatgaacctgtactatgagaacttcttccacccccagggcgtgcccagcccccagaggcccagctttgaaggaggaggagaatatggagccacccccaacccctacctgtggttcaacggccccaccatgaccccaccaccctacctgcccggccccaatgccagccccttcctgccccaggcctatggagtgcagaggcccctgctgcccagcgtgtctggcctgggcggcagtgacctgggctggctgcccatccccagccaggaggagctgatgaagctggtgcggcccccctacagctacagcgccctgattgccatggccatccatggagccccagacaagaggctgaccctgagccagatctaccagtatgtggccgacaacttccccttctacaacaagagcaaggccggctggcagaacagcatccgccacaacctgagcctgaatgactgcttcaagaaggtgcccagagatgaagatgatcctggaaaaggaaactactggaccctggaccccaactgtgagaagatgtttgacaatggaaacttccggaggaagaggaagaggaagagtgatgtgagcagcagcacagccagcctggccctggagaagacagagagcagcctgcctgtggacagccccaagaccacagagccccaggacatcctggatggagccagccctgggggcaccaccagcagccctgagaagaggcccagccccccaccttctggggccccctgcctgaacagcttcctgagctccatgacagcctacgtgtctgggggcagccccaccagccaccccctggtgaccccaggcctgagccctgagcccagcgacaagacaggccagaacagcctgaccttcaacagcttcagccccctgaccaacctgagcaaccacagcggcggcggggactgggccaaccccatgcccaccaacatgctgtcctatggaggctctgtgctgagccagttcagcccccacttctacaacagcgtgaacaccagcggcgtgctgtacccccgggagggcacagaggtgtag

SEQ ID NO: 172978 - DNA, 1137 bp, Artificial Sequence
  derived and/or modified sequence
atgagcagcttcgacctgcccgcccccagccccccccggtgcagccctcagttcccttctattggccaagagccccccgagatgaatctgtattatgaaaacttctttcacccacagggtgtacctagcccgcaacgcccaagttttgaaggcggaggcgagtacggggcaaccccaaatccctacttgtggtttaacggaccgacaatgaccccacctccatacctgccaggaccaaacgcttctcccttcttaccacaggcgtacggcgtgcagcgcccactcttacctagcgtgtccggcctgggggggagcgacttgggatggctcccaatacctagccaggaagagctgatgaagctggtcaggcctccatattcttacagcgcactcatcgcaatggcaatccacggagctccagataaacggttgacccttagccaaatatatcagtacgtggccgataacttcccgttttataacaagagtaaggccggctggcagaatagtattcgacacaaccttagccttaatgattgcttcaaaaaggtgcccagagacgaggatgatccaggcaaggggaactattggactctggatccaaactgcgaaaagatgtttgacaacggtaacttcaggcggaagcggaagcgcaagtccgatgtgagctcttccaccgcatcccttgctttagagaagacagagagctctctgccagtggactccccaaaaacgacagaacctcaggatattctcgatggcgcctcccctggaggaactacatctagccctgagaaacggccctcgccgcccccttccggggccccatgcctgaattcattcctgtcgagcatgaccgcctacgtgagcggcggatctccaacgtcccaccctcttgttactccaggactgagcccggagccgtctgacaaaacaggacagaactccctgacatttaactcattctccccactcaccaatcttagtaatcattcagggggcggcgactgggccaatcctatgcccaccaacatgctatcgtatggaggcagtgtgctctctcaattttccccacatttctacaatagcgtgaacacctcaggagtcctataccctcgagagggcacggaagtgtag

SEQ ID NO: 172979 - DNA, 1137 bp, Artificial Sequence
  derived and/or modified sequence
atgagctcttttgaccttcctgcaccatccccacctaggtgttcaccccagttccccagcatcggtcaggagccccctgagatgaacctgtactatgaaaattttttccatccccagggagtcccgtcccctcaaaggcctagcttcgaaggtggaggcgaatatggcgcaaccccaaatccctatctgtggttcaatggacctaccatgaccccacctccttacctgcccggacctaacgcctcgccattcttgccccaggcttacggtgttcaacgcccactgctcccatccgtaagcggactggggggatcagatcttggctggctgcctatcccctctcaggaagagctcatgaagctggttaggccaccttactcgtattccgccctgatagccatggcgattcacggcgcacccgacaagagactgacgttgtcacaaatataccagtacgtcgcggacaatttcccattttataacaagtccaaggctggatggcagaatagcatacgacataacctgtccttgaatgattgctttaaaaaggtgcctcgggacgaggacgatccgggaaaaggcaattattggacattggaccctaattgcgagaagatgttcgataatgggaacttcagaaggaagaggaagcgcaaatccgatgtgtcctcctctaccgcctcacttgctctggagaagaccgaaagttctttgcctgttgattcacctaagaccaccgaaccccaggatattttggacggtgcctctcccggtgggactacctcatctcccgaaaagcgaccgtctccgccacccagcggagctccttgcctcaatagctttctaagctctatgacagcctacgtctcagggggttcacctacaagtcatcctctggttacccctgggctctctcccgaaccatctgataagaccggtcaaaacagcttaactttcaatagctttagccccctgaccaatctttctaaccactccggtggcggagattgggccaaccctatgcccaccaacatgttaagttacggtggttccgtgttaagccagttctctccgcatttttacaatagcgtcaatacctctggcgtgctgtaccctcgcgaagggaccgaggtgtag

SEQ ID NO: 172980 - DNA, 1137 bp, Artificial Sequence
  derived and/or modified sequence
atgagcagcttcgacctgcccgcccccagcccccccagatgcagcccccagttccccagcatcggccaggagccccccgagatgaacctgtactacgagaacttcttccacccccagggcgtgcccagcccccagagacccagcttcgagggcggcggcgagtacggcgccacccccaacccctacctgtggttcaacggccccaccatgaccccccccccctacctgcccggccccaacgccagccccttcctgccccaggcctacggcgtgcagagacccctgctgcccagcgtgagcggcctgggcggcagcgacctgggctggctgcccatccccagccaggaggagctgatgaagctggtgagacccccctacagctacagcgccctgatcgccatggccatccacggcgcccccgacaagagactgaccctgagccagatctaccagtacgtggccgacaacttccccttctacaacaagagcaaggccggctggcagaacagcatcagacacaacctgagcctgaacgactgcttcaagaaggtgcccagagacgaggacgaccccggcaagggcaactactggaccctggaccccaactgcgagaagatgttcgacaacggcaacttcagaagaaagagaaagagaaagagcgacgtgagcagcagcaccgccagcctggccctggagaagaccgagagcagcctgcccgtggacagccccaagaccaccgagccccaggacatcctggacggcgccagccccggcggcaccaccagcagccccgagaagagacccagccccccccccagcggcgccccctgcctgaacagcttcctgagcagcatgaccgcctacgtgagcggcggcagccccaccagccaccccctggtgacccccggcctgagccccgagcccagcgacaagaccggccagaacagcctgaccttcaacagcttcagccccctgaccaacctgagcaaccacagcggcggcggcgactgggccaaccccatgcccaccaacatgctgagctacggcggcagcgtgctgagccagttcagcccccacttctacaacagcgtgaacaccagcggcgtgctgtaccccagagagggcaccgaggtgtag

SEQ ID NO: 172981 - protein, 395 aa, Artificial Sequence
  derived and/or modified sequence
MEKSTDTDEDNVTRTEYSDKTTQFPSVYAVPGTEQTEAVGGLSSKPATPKTTTPPSSPPPTAVSPEFAYVPADPAQLAAQMLGKVSSIHSDQSDVLMVDVATSMPVVIKEVPSSEAAEDVMVAAPLVCSGKVLEVQVVNQTSVHVDLGSQPKENEAEPSTASSVPLQDEQEPPAYDQAPEVTLQADIEVMSTVHISSVYNDVPVTEGVVYIEQLPEQIVIPFTDQVACLKENEQSKENEQSPRVSPKSVVEKTTSGMSKKSVESVKLAQLEENAKYSSVYMEAEATALLSDTSLKGQPEVPAQLLDAEGAIKIGSEKSLHLEVEITSIVSDNTGQEESGENSVPQEMEGKPVLSGEAAEAVHSGTSVKSSSGPFPPAPEGLTAPEIEPEGESTAE

SEQ ID NO: 172982 - protein, 493 aa, Artificial Sequence
  derived and/or modified sequence
MISSKPRLVVPYGLKTLLEGISRAVLKTNPSNINQFAAAYFQELTMYRGNTTMDIKDLVKQFHQIKVEKWSEGTTPQKKLECLKEPGKTSVESKVPTQMEKSTDTDEDNVTRTEYSDKTTQFPSVYAVPGTEQTEAVGGLSSKPATPKTTTPPSSPPPTAVSPEFAYVPADPAQLAAQMLGKVSSIHSDQSDVLMVDVATSMPVVIKEVPSSEAAEDVMVAAPLVCSGKVLEVQVVNQTSVHVDLGSQPKENEAEPSTASSVPLQDEQEPPAYDQAPEVTLQADIEVMSTVHISSVYNDVPVTEGVVYIEQLPEQIVIPFTDQVACLKENEQSKENEQSPRVSPKSVVEKTTSGMSKKSVESVKLAQLEENAKYSSVYMEAEATALLSDTSLKGQPEVPAQLLDAEGAIKIGSEKSLHLEVEITSIVSDNTGQEESGENSVPQEMEGKPVLSGEAAEAVHSGTSVKSSSGPFPPAPEGLTAPEIEPEGESTAE

SEQ ID NO: 172983 - DNA, 1482 bp, Artificial Sequence
  derived and/or modified sequence
atgatcagttcgaagccacgactcgtagtcccatatggtctaaagacacttctggaaggcatctctcgggctgtccttaagaccaatccatcgaatataaaccagtttgccgcagcttatttccaggagctgacaatgtatcgggggaatacaacgatggacataaaggacctcgtgaagcaatttcaccagatcaaggttgaaaagtggtcagagggcacaacgcctcaaaaaaagcttgagtgtctaaaagaacctggaaaaacgtctgtcgaatccaaagttccgacgcagatggagaaatccactgatactgatgaagacaatgtcacccggaccgaatattctgacaagacaacacaatttccatctgtctatgccgtccccggcaccgagcaaacagaagcagtgggaggattgagcagcaaaccggccacaccaaagactacgacaccacccagctccccaccgccaactgcagtgagtcccgagtttgcgtatgtgccggcagaccccgctcagttggccgcacagatgttaggtaaggtgagctcaatccactccgatcagtctgacgtgttaatggtggacgttgccactagtatgcctgtggttataaaggaggtcccctcttcagaggctgcagaggatgtgatggtggccgcccctctggtctgtagtggcaaagtgttagaagtccaggttgtcaatcagacctcagttcacgtagacctcgggagccagcctaaggagaatgaggctgagccttctaccgcatccagcgtgcccctgcaggacgagcaagagccccctgcctacgatcaggcccctgaagttaccctccaagcagacatagaagttatgagcaccgtccacatctcgtctgtttacaacgatgtgcccgtgactgagggagtcgtttatatcgaacagctgcccgagcagattgtgattcccttcacagatcaggttgcctgcctgaaggagaatgagcagtccaaagaaaacgagcagagtcctagagtctcccctaaatccgttgtagaaaaaaccactagtggcatgtcgaagaaatcggtagaatcagtgaagcttgcccagttggaagaaaacgctaagtactctagcgtgtacatggaagccgaggctacggccctgctgtccgatacttcactcaagggacagcctgaagtccccgcgcagctcttggatgccgagggcgccattaaaattgggagtgaaaagagcttgcacctggaagtcgagatcacatcgatcgtctccgacaacactggacaagaagaatccggcgaaaatagcgttccccaagagatggaaggcaagcccgtgttgtctggggaggcagcagaagctgtacattcaggtacttctgtcaaaagttcctccggaccatttccgcccgcccccgaagggcttactgctcccgaaatcgaaccggaaggggagtctacagctgagtag

SEQ ID NO: 172984 - DNA, 1482 bp, Artificial Sequence
  derived and/or modified sequence
atgatcagcagcaagccccggctggtggtgccctacggcctgaagaccctgctggagggcatcagcagagctgtgctgaagaccaaccccagcaacatcaaccagtttgctgctgcctacttccaggagctgaccatgtaccggggcaacaccaccatggacatcaaggacctggtgaagcagttccaccagatcaaggtggagaagtggagcgagggcaccaccccccagaagaagctggagtgcctgaaggagcccgggaagacctctgtggagagcaaggtgcccacccagatggagaagagcacagacacagatgaagataatgtgaccaggacagagtacagcgacaagaccacccagttccccagcgtgtatgctgtgcctggaacagagcagacagaggccgtgggcggcctgagcagcaagccagccacccccaagaccaccaccccacccagcagccccccacccacagctgtgtccccagagtttgcctacgtgcctgctgaccctgcccagctggccgcccagatgctgggcaaggtgagcagcatccacagcgaccagagtgatgtgctgatggtggatgtggccacctccatgcctgtggtgatcaaggaggtgcccagcagcgaggccgcagaagatgtgatggtggccgcccccctggtgtgcagcggcaaggtgctggaggtgcaggtggtgaaccagacctctgtgcacgtggacctgggcagccagcccaaggaaaatgaggccgagcccagcacagccagctctgtgcccctgcaggatgagcaggagcccccagcctatgaccaggcccctgaggtgaccctgcaggccgacatcgaggtgatgagcacagtgcacatcagctctgtgtacaatgatgtgcctgtgacagaaggagtggtgtacatcgagcagctgcctgagcagatcgtcatccccttcacagaccaggtggcctgcctgaaggaaaatgagcagagcaaagaaaatgagcagagcccccgggtgagccccaagtctgtggtggagaagaccaccagcggcatgagcaagaagtctgtggagagcgtgaagctggcccagctggaggagaatgccaagtacagctctgtgtacatggaggccgaggccacagccctgctgagtgacaccagcctgaagggccagcctgaggtgcctgcccagctgctggatgctgagggcgccatcaagattggcagcgagaagagcctgcacctggaggtggagatcaccagcatcgtgtctgacaacacaggccaggaggagagcggggagaacagcgtgccccaggagatggagggcaagcctgtgctgagcggggaggccgctgaggccgtgcacagcggcacctctgtgaagagcagcagcggccccttccccccagcccctgagggcctgacagcccctgagattgagcctgagggggagagcacagctgagtag

SEQ ID NO: 172985 - DNA, 1482 bp, Artificial Sequence
  derived and/or modified sequence
atgatcagcagcaagccccggctggtggtgccctacggcctgaagactctgctggagggcatctcacgggccgtgctaaagaccaacccttccaatattaaccaattcgcagctgcctatttccaagaactcacgatgtaccggggaaacaccacaatggacattaaagaccttgtaaaacagtttcatcagatcaaagtagaaaaatggtcggaggggaccactccgcagaaaaaactcgaatgtctcaaggaaccaggcaagaccagcgttgaatcaaaggtgcctactcagatggagaaatcaaccgacactgacgaagataatgtcaccagaacggaatattcagacaagactacacagtttcccagtgtgtatgctgttcccggcacagaacagaccgaagctgtgggaggactgtcttccaagcccgcaacacccaagacaaccacacccccatcttccccccctcccacggctgtgtctcctgaattcgcatacgtgccagccgaccctgcacagctcgccgctcagatgctggggaaagtctctagcattcactctgatcagtctgacgtgctcatggtggacgtcgctaccagcatgcccgttgttatcaaagaggtgcccagctccgaagccgctgaggatgttatggtagccgccccacttgtatgttctgggaaggtgctggaggtgcaggtggtgaaccagacctccgtgcatgttgacctgggatctcagccaaaagagaatgaggccgaaccctcgactgccagttcggtgcccttgcaggatgaacaggagcccccagcctacgatcaggctcccgaagtgacactccaagcggatatcgaagtgatgtccactgtgcacatcagctctgtgtataatgacgtgcctgttacagagggagtcgtctacatagaacagttacccgagcagatcgtgattccttttacagaccaggtggcttgtctcaaagagaatgagcaatcgaaggagaacgagcagtctcctcgggtgtcgcccaagtctgtcgttgagaagaccacttccggcatgagtaaaaagtctgtcgaatctgtcaaactggcccagcttgaggaaaatgctaaatacagttccgtgtatatggaagccgaggcgacagccttgctcagcgatacctcgttgaaggggcaaccggaagtgccagctcagctgttggacgccgaaggcgccatcaaaattgggtctgagaaatctctccatttggaggtagagattacaagtattgtctctgacaacacgggtcaggaggagagtggcgaaaatagtgttccacaagagatggaaggaaagcccgttctgagcggcgaggccgcagaggcagtgcattcagggacctcggtgaaatctagtagtggcccattccctccggccccagaaggtttaaccgcaccagaaatcgagccggagggtgagtcaactgccgaatag

SEQ ID NO: 172986 - DNA, 1482 bp, Artificial Sequence
  derived and/or modified sequence
atgatttcatcaaaacccaggctggtggtgccatatgggctgaaaaccctgcttgaggggataagtagggccgtgctgaagactaacccatccaacataaaccagttcgccgcagcatacttccaggaacttacaatgtaccggggtaacactacaatggacatcaaggaccttgtgaagcagtttcaccagatcaaagtggagaaatggagcgagggaacaacaccccagaaaaagctggagtgtctcaaggagccgggtaaaaccagcgtggaatccaaggtgccgacacaaatggagaagtccaccgatacagacgaggacaacgttactcgcaccgagtatagcgataagactacccagtttccctccgtgtacgccgtcccaggaaccgagcaaacagaggctgtaggagggctgagttcgaaacccgcaacaccaaaaactacaacaccccctagcagtcctcccccaactgcggtctccccggaattcgcatacgtacccgcagatcctgcacaactcgccgctcaaatgctgggtaaagtgtcctcgatccactccgaccaatccgatgtgctgatggtcgatgtggccaccagtatgcccgttgtgattaaagaagtaccatcctccgaagcagcggaagacgtaatggtagctgctcctctcgtgtgttctggcaaggtcctggaagtccaagtagttaatcagaccagcgtgcacgttgatttaggctcacagcccaaagagaacgaagctgaaccatcaactgcatcatccgtgccacttcaggatgagcaggagccgcctgcatacgaccaggccccagaagtgactctgcaggcggacattgaggtaatgtcaactgtccacatttcctctgtctacaacgatgtgcctgtgacagagggcgtcgtatatattgagcagctgcccgaacagattgtaattccctttaccgaccaggtggcctgtctcaaagaaaatgaacaatccaaagagaacgagcagtcacctcgggtctctcctaaatctgtggtagagaagacaacatctggcatgtccaaaaaatctgtggaatcagtgaaactggctcagctcgaagagaacgcaaagtattcctctgtctacatggaggccgaggcgaccgccctgctcagcgatacttctctgaaggggcagcccgaggtgcctgcacaactcctcgacgctgagggcgctatcaaaatcgggagtgagaaaagcctacatcttgaagtggaaatcacaagtatagtttcggacaacacagggcaggaggagagcggagaaaattctgttcctcaggagatggagggaaaaccagtgctgagcggggaagcagctgaagccgtgcattctggcacatccgtgaaatcaagcagcgggccattccctccggcacccgagggacttacggctcccgagattgagccggagggtgagtcaaccgccgagtag

SEQ ID NO: 172987 - DNA, 2226 bp, Artificial Sequence
  derived and/or modified sequence
cttaagagcgcggccggaaagcagttgagttacagacatcctgccaaaatgatttcttcaaagcccagacttgtcgtaccctatggcctcaagactctgctcgagggaattagcagagctgttctcaaaaccaacccatcaaacatcaaccagtttgcagcagcttattttcaagaacttactatgtatagagggaatactactatggatataaaagatctggttaaacaatttcatcagattaaagtagagaaatggtcagaaggaacgacaccacagaagaaattagaatgtttaaaagaaccaggaaaaacatctgtagaatctaaagtacctacccagatggaaaaatctacagacacagacgaggacaatgtaaccagaacagaatatagtgacaaaaccacccagtttccatcagtttatgctgtgccaggcactgagcaaacggaagcagttggtggtctttcttccaaaccagccacccctaagactactaccccaccctcatcaccacctccaacagctgtctcaccagagtttgcctacgtcccagctgacccagctcagcttgctgctcagatgttaggtaaagtttcatctattcattctgatcaatctgatgtgttaatggtggatgtggcaaccagtatgcctgttgttatcaaggaggtgccaagctcagaggctgctgaagatgtcatggtggctgctcctcttgtgtgttctggaaaggtgctagaagtgcaggttgtgaaccaaacatctgtccatgtagatttgggttctcaacctaaagaaaatgaggctgaaccatcaacggcttcctcagtccccttgcaggatgaacaagaacctcctgcttatgatcaagctcctgaggtcactttgcaggctgatattgaggttatgtcaactgttcatatatcatctgtctataacgatgtgcctgtgactgaaggagttgtttatatcgagcaactgccagaacaaatagttatcccttttactgatcaagttgcttgtcttaaagaaaatgagcagtcaaaagaaaatgagcagtcaccacgagttagtcccaaatctgtagtagaaaagaccacctctggcatgtctaaaaaatctgtagagtctgtaaaacttgcacagttggaggagaatgcaaaatattcctcagtatatatggaggcagaagcaacagctctgctctctgacacatctttgaaaggtcagcctgaggtacctgcacaactcctggatgcagaaggtgctatcaaaataggctctgaaaaatctctgcaccttgaagtggagatcacttcaatagtctctgacaatactgggcaggaggagtctggggaaaactctgtaccccaggagatggaaggcaaacctgtgctctctggggaagctgcagaagcagtgcactcaggtacatctgtaaagtcatctagtggccccttccctcctgctccagaaggccttactgcaccagaaattgaaccagaaggggaatcaacagctgaataaggtttgatgaagccagcaatggcaacaagtgaacgaggacaaccaccaccatgttctaacatgtggaccctttattgtctaactgataagaatcaacaaggtcacccatcaccgccacctgcacctgggccttttccccaagcaaccctctatttacctaatcctaaggatccacagtttcagcagcatccaccaaaagtcacttttccaacttatgtgatgggcgacaccaagaagaccagtgccccaccttttatcttagtaggctcaaatgttcaggaagcacagggatggaaacctcttcctggacatgctgtcgtttcacagtcagatgtcttgagatatgttgcaatgcaagtgcccattgctgttcctgcagatgagaaataccagaaacataccctaagtccccagaatgctaatcctccaagtggacaagatgtccccaggccaaaaagccctgttttcctttctgttgctttcccagtagaagatgtagctaaaaaaagttcaggatctggtgacaaatgtgctccctttggaagttacggtattgctggggaggtaaccgtgactactgctcacaaacgtcgcaaagcagaaactgaaaactgatccagaaatgacgctgtctgggtcaacatttcagggaggagtctgccaccagtgtaatgtatcaataaacttcatgcaagc

SEQ ID NO: 172988 - DNA, 1482 bp, Artificial Sequence
  derived and/or modified sequence
atgatcagcagcaagcccagactggtggtgccctacggcctgaagaccctgctggagggcatcagcagagccgtgctgaagaccaaccccagcaacatcaaccagttcgccgccgcctacttccaggagctgaccatgtacagaggcaacaccaccatggacatcaaggacctggtgaagcagttccaccagatcaaggtggagaagtggagcgagggcaccaccccccagaagaagctggagtgcctgaaggagcccggcaagaccagcgtggagagcaaggtgcccacccagatggagaagagcaccgacaccgacgaggacaacgtgaccagaaccgagtacagcgacaagaccacccagttccccagcgtgtacgccgtgcccggcaccgagcagaccgaggccgtgggcggcctgagcagcaagcccgccacccccaagaccaccaccccccccagcagccccccccccaccgccgtgagccccgagttcgcctacgtgcccgccgaccccgcccagctggccgcccagatgctgggcaaggtgagcagcatccacagcgaccagagcgacgtgctgatggtggacgtggccaccagcatgcccgtggtgatcaaggaggtgcccagcagcgaggccgccgaggacgtgatggtggccgcccccctggtgtgcagcggcaaggtgctggaggtgcaggtggtgaaccagaccagcgtgcacgtggacctgggcagccagcccaaggagaacgaggccgagcccagcaccgccagcagcgtgcccctgcaggacgagcaggagccccccgcctacgaccaggcccccgaggtgaccctgcaggccgacatcgaggtgatgagcaccgtgcacatcagcagcgtgtacaacgacgtgcccgtgaccgagggcgtggtgtacatcgagcagctgcccgagcagatcgtgatccccttcaccgaccaggtggcctgcctgaaggagaacgagcagagcaaggagaacgagcagagccccagagtgagccccaagagcgtggtggagaagaccaccagcggcatgagcaagaagagcgtggagagcgtgaagctggcccagctggaggagaacgccaagtacagcagcgtgtacatggaggccgaggccaccgccctgctgagcgacaccagcctgaagggccagcccgaggtgcccgcccagctgctggacgccgagggcgccatcaagatcggcagcgagaagagcctgcacctggaggtggagatcaccagcatcgtgagcgacaacaccggccaggaggagagcggcgagaacagcgtgccccaggagatggagggcaagcccgtgctgagcggcgaggccgccgaggccgtgcacagcggcaccagcgtgaagagcagcagcggccccttcccccccgcccccgagggcctgaccgcccccgagatcgagcccgagggcgagagcaccgccgagtag

SEQ ID NO: 172989 - protein, 160 aa, Artificial Sequence
  derived and/or modified sequence
MVQAVRLIAEGKAPRLPQPEEGATYEGIQKKETAKINWDQPAEAIHNWIRGNDKVPGAWTEACEQKLTFFNSTLNTSGLVPEGDALPIPGAHRPGVVTKAGLILFGNDDKMVRARLWVTCLLKATHAPVLGLRPHRKTLGSSGENGKNQTQEGTLTLICP

SEQ ID NO: 172990 - DNA, 1518 bp, Artificial Sequence
  derived and/or modified sequence
atgaaaatcgcagtcatcggtcaatccctctttggccaggaagtatactgtcatctgcgcaaggagggccacgaggtggtgggagtcttcacagtgcctgacaaggatggtaaagcggatcctctgggtcttgaggctgagaaggacggtgtcccagtgtttaagtattcccgctggcgggccaaaggccaggcccttcccgatgtcgtcgccaagtaccaggctctgggcgctgaactgaacgtactgcccttttgctcacagttcatccctatggagatcatttctgcccccagacacggctcgattatttaccacccctcattacttccaagacataggggcgcgtcagctatcaattggacattgattcatggagataaaaagggcggtttttccatcttctgggccgacgacggtctggacactggcgacctgctactccagaaagagtgcgaagtgctcccagatgacacggtcagcacactgtataaccgttttctgtttcccgaaggcatcaagggtatggtgcaggccgtgagactaatcgcagagggaaaggcacctaggctgccccagcccgaggagggagcgacttacgaaggcatccagaagaaggaaacagcaaagattaactgggatcaaccagcagaggcaatacacaactggattcgcggtaacgacaaggtccccggcgcatggaccgaagcttgtgaacaaaagcttacattttttaattcaacccttaacacgagtggattggtgcccgagggggatgctctgcctatacctggggcccatcgccccggtgttgtgaccaaggctgggctaatcctgtttggcaacgatgataagatgctgcttgtgaagaatattcagttggaggacggaaaaatgatactcgcgtctaacttttttaagggagctgcatcctccgttctcgagctcacagaagctgagctggtaacggcagaggccgttagaagtgtttggcagagaatcctccccaaggtactggaggtggaggattccacggattttttcaagagcggcgcagcctctgtggatgtggtgagactcgtcgaggaagtgaaggagctctgcgacggcctagaacttgaaaatgaggacgtttatatggccagtacgtttggagacttcatccagctgctggtacgcaaacttagaggtgatgacgaagagggtgaatgttcaatagactatgttgaaatggcggtgaataagcgtacggtgcggatgccacaccagctgtttatcggcggggagtttgtagacgctgagggcgctaaaactagcgagacaatcaaccctacagatggatcggtgatctgtcaggtgtcgttggcacaggtgacagacgttgataaggccgtcgccgctgcaaaagatgcattcgaaaatggcagatggggcaaaatctcagcaagggatagagggcgtctcatgtatagagcgcctcctagccccagcacccgtccagatcctaccgccacgtag

SEQ ID NO: 172991 - DNA, 2709 bp, Artificial Sequence
  derived and/or modified sequence
atgaagatcgccgtgattggccagtccctgtttggccaggaagtgtactgtcacttgcgcaaggaaggacatgaagtggtgggcgtgtttactgttccggataaggatggtaaggctgacccactgggtctcgaggcagagaaggatggcgtccccgtattcaaatactccagatggcgagcgaagggtcaggcactgcccgacgttgtggctaaataccaggcattgggtgccgaacttaatgtactgcccttctgctcacagttcataccaatggaaattatatcagctccaagacatggctccataatttatcatccttccctgctccctcgccaccgaggcgccagcgctattaattggactctgatccacggggacaaaaagggcggattcagtatcttctgggctgacgatggactagacacaggggaccttcttttgcagaaggagtgcgaagtgcttccagatgatactgtaagcacactctataatcgatttttattcccagaaggcattaaagggatggttcaggccgttcgcttaatcgcggaaggaaaagctccccggctccctcaacccgaagaaggagctacctatgaaggcattcaaaagaaggaaaccgcaaagattaactgggatcagccggccgaagcaattcacaactggatcagagggaacgacaaggtgccgggcgcctggacagaagcctgcgagcagaaactgaccttcttcaactcgaccttaaacacctcggggttggttcccgaaggtgatgccttacctattcctggagcccatcgtcccggtgtggtgacaaaggccggactgattctgtttggcaacgacgataagatgcttctcgtgaagaatattcagctcgaggacgggaaaatgatcctggcaagcaattttttcaagggcgccgctagctctgtgctggaactaacagaggccgagctggttactgccgaggcagtgcgatccgtttggcaacgaatcctgcctaaagttctagaggtggaggactctaccgatttctttaagagcggggcggcctcagtggacgttgttcgattagtggaagaggtaaaggagctttgcgatggcctcgagcttgaaaatgaagacgtgtacatggcatctaccttcggtgacttcattcagctgcttgtccgaaagttacggggtgatgatgaagaaggggagtgcagcatcgactacgtcgagatggctgtcaataaaagaacagtgagaatgccacatcaactgttcatcggcggggagttcgttgatgccgaaggtgcaaaaacctctgaaacaatcaacccaacagacggatccgtgatctgccaggttagcctagcacaggtgactgatgtggataaggctgttgccgcggcgaaagatgcattcgaaaatgggagatggggaaagataagtgccagagatcgcgggagactaatgtaccggctggcagatcttatggagcagcaccaagaagagctggccactatcgaggccctcgacgcgggagccgtgtatacactcgctttgaagactcacgtgggcatgagcatccagacatttcgctattttgccggatggtgtgataaaatacagggcagcactatccccattaatcaggctagaccgaacaggaacctgacactgacgcgaaaagagcctgtgggcgtctgcgggattattatcccatggaactacccactcatgatgctgtcatggaaaaccgccgcatgcctggctgctggaaataccgtcgtgatcaagcctgctcaggtgacacccctgacggctctgaaattcgccgaactcactctgaaggccggaattcccaaaggagtagtgaatgtactccctgggagcgggtcactggtgggccagcggctgagtgatcaccccgacgttcgaaagatcggcttcacgggaagcaccgaagtgggtaaacatattatgaagagctgcgccatctccaacgtgaagaaggtgagcttggaattgggcggcaagtcacccctcatcatttttgccgattgcgatctgaacaaggcggtgcagatgggaatgagcagtgtgtttttcaacaagggcgagaactgtatcgccgccggcagactttttgtagaagattcaatccatgacgaatttgtaagacgggttgtggaagaagtgagaaaaatgaaagtcgggaatcctctggaccgtgatactgatcacgggccccagaatcaccacgcccacctagtcaaattgatggagtactgccaacacggtgtaaaggaaggagcgacgctggtttgcggcggaaaccaagtcccgcggccagggttcttcttcgaaccaactgtctttacagacgtggaggaccatatgtttatagctaaagaagaaagcttcgggcccgtgatgatcatcagcagattcgctgatggagacttggatgccgttctgagcagagctaacgcgaccgaattcggactggctagcggagtattcacaagagacattaataaagcactctatgtaagcgataaactgcaggcaggtacggtgtttgtcaacacatataacaaaacagacgtggccgcaccattcggaggattcaagcagagcggtttcggcaaggatctgggagaggcagcactcaacgagtaccttcgagtgaaaaccgtcacattcgagtactag

SEQ ID NO: 172992 - DNA, 483 bp, Artificial Sequence
  derived and/or modified sequence
atggttcaggccgtgcggcttattgccgaaggcaaagcaccgaggctacctcagccagaggaaggggccacctacgagggtatccagaagaaagagactgctaaaatcaattgggaccagcccgcagaggctatccataattggataagaggtaacgacaaggtccccggtgcctggactgaggcttgcgagcagaaactgaccttctttaattccaccctgaatacaagtggactcgtcccagagggcgacgccctacctattcctggcgcccatagacccggagtagtgacaaaggccggattgattttgttcggtaacgacgataaaatggtacgcgccagactctgggtcacttgtctcctgaaggccacgcatgcccctgtgctgggccttaggccgcatagaaagacccttggctccagcggagaaaacggaaaaaatcagacccaggagggtaccctgaccttgatttgtccctag

SEQ ID NO: 172993 - DNA, 2709 bp, Artificial Sequence
  derived and/or modified sequence
atgaagatagccgtgattggacagagcctgttcggacaggaagtgtattgccatctgcgtaaggagggccacgaggttgttggggtgtttaccgtgcctgacaaggacgggaaggcagacccactcggcttggaagctgagaaagacggcgtccccgtgttcaaatatagcagatggcgcgctaagggtcaagccttgccggacgttgttgccaaatatcaggctctgggcgctgagctcaacgtcctgcccttttgctcccaattcattcccatggaaatcatctctgctcctcgacatggatcaatcatatatcacccttcactcctgccacgacaccggggcgccagtgccattaactggacgctgatccacggagacaagaaaggcggcttcagcatcttctgggccgatgacgggttggatacaggggatctgttgctgcagaaagaatgcgaggtcctccctgacgataccgtctcaactctgtacaatcgatttctgttccctgaggggataaaggggatggttcaggcagtaagattgatagctgagggcaaggccccgagacttcctcaacccgaggagggggccacttatgaggggattcaaaaaaaagagacagcaaagataaactgggatcagccagccgaagcgatccataactggattagaggcaacgataaagtgcctggagcatggacggaggcctgtgagcaaaagctcacctttttcaactccacattaaatacctcaggcctggtacctgaaggcgatgccttgcctattccaggcgctcatagacccggggttgtgacaaaagccggcttgatattgttcggtaacgacgataagatgctcctggtcaaaaacattcagctggaggatgggaaaatgatcctggcatcaaatttcttcaaaggggccgcatcttctgtgctggaactcacagaggctgagttggtcactgctgaggcggttagatcagtttggcagcggatcctgccaaaagtcctggaagtggaggattctaccgatttttttaagtccggagccgcttccgtcgacgtggttaggctggttgaggaagtaaaggagctttgcgacggactggagctcgagaacgaggatgtatatatggcttcgacattcggtgattttatccaactcctggtgaggaaattgagaggagatgacgaggaaggggagtgctccatcgattacgtagaaatggcagtgaacaagaggaccgtaagaatgccccaccagctgttcatcggcggggagttcgtggacgccgagggcgccaagaccagtgaaactatcaacccaacagatggatcagtcatctgccaggtctcacttgcccaagtcactgatgtcgacaaggccgttgccgccgcaaaggacgcgttcgaaaatggccgatggggaaaaatcagcgccagggatcgcgggaggctgatgtaccgccttgcagacctcatggagcaacatcaggaagagcttgcaaccattgaggcactcgacgccggagccgtgtatactctggctctgaaaacacatgtaggaatgagtatccaaacattccgctactttgctgggtggtgtgataaaatccagggctcaacaatacctataaatcaggcgcgccctaatcgaaatcttactctgaccagaaaggaaccagtgggggtctgcggcataatcatcccatggaattaccccctcatgatgttatcttggaagacggccgcatgtctcgccgcgggaaatacagttgttatcaagcccgcccaagttactccactgaccgccctgaaatttgcagagctgacccttaaagctggcatccctaaaggcgtcgttaatgtgctgccaggcagtggttcgctagtcgggcagcggctcagtgaccaccccgatgtccgaaagatcggattcactggttctacagaagtggggaagcacatcatgaagtcatgtgctatttcaaatgttaaaaaagtgtccctggaattgggcggcaaatctcctctaatcatattcgccgattgcgacttgaataaagcagtgcagatggggatgagctcagttttttttaataagggtgagaattgtatcgccgccggccgactgtttgtagaggatagcattcacgatgaatttgtgcgaagggtggtggaggaagtgaggaaaatgaaggtcggcaacccgcttgatcgcgacaccgatcacggcccacagaatcatcatgcacacctggtgaaactgatggaatattgtcagcatggagtcaaagagggcgccacactggtatgtgggggtaaccaggttccacggccagggttcttctttgaacctacagtcttcaccgatgtggaggatcatatgttcatagccaaggaggaaagcttcggccccgttatgatcatctctagattcgcagatggggacctggatgccgttctgagtagagccaatgccaccgagttcgggctcgccagtggggtctttacaagggacattaacaaggcactgtacgttagcgacaaactccaggccgggaccgtctttgtgaacacatataacaaaacagacgtggccgccccttttggcggcttcaagcaaagcgggttcggcaaagacctgggggaagctgcactgaatgaatacctgcgggtcaagacggtgacatttgagtattag

SEQ ID NO: 172994 - DNA, 1518 bp, Artificial Sequence
  derived and/or modified sequence
atgaagattgctgtgattggccagagcctgtttggccaggaggtgtactgccacctgaggaaggagggccacgaggtggtgggcgtcttcaccgtgcctgacaaggatggcaaggctgaccccctgggcctggaggccgagaaggatggagtgcctgtgttcaagtacagccgctggagggccaagggccaggccctgcctgatgtggtggccaagtaccaggccctgggcgctgagctgaatgtgctgcccttctgcagccagttcatccccatggagatcatcagcgcccccaggcatggcagcatcatctaccaccccagcctgctgcccaggcacagaggagccagcgccatcaactggaccctcatccatggagacaagaagggcggcttcagcatcttctgggcagatgatggcctggacacaggagacctgctgctgcagaaggaatgtgaggtgctgcctgatgacacagtgtccaccctgtacaaccgcttcctgtttcctgagggcatcaagggcatggtgcaggccgtgcggctgattgctgagggcaaggccccccggctgccccagcctgaggagggcgccacctatgagggcatccagaagaaggagacagccaagatcaactgggaccagcctgctgaggccatccacaactggatcagaggaaatgacaaggtgcctggggcctggacagaggcctgtgagcagaagctgaccttcttcaacagcaccctgaacaccagcggcctggtgcctgaaggagatgccctgcccatccctggggcccacaggcctggggtggtgaccaaggccggcctcatcctgtttggaaatgatgacaagatgctgctggtgaagaacatccagctggaggatggcaagatgatcctggccagcaacttcttcaagggagctgccagctctgtgctggagctgacagaagctgagctggtgacagctgaggccgtgcgctctgtgtggcagaggatcctgcccaaggtgctggaggtggaggacagcacagacttcttcaagagcggggccgcctctgtggatgtggtgcggctggtggaggaggtgaaggagctgtgtgatggcctggagctggagaatgaagatgtgtacatggccagcaccttcggggacttcatccagctgctggtgaggaagctgcggggagatgatgaggagggagaatgttccattgattatgtggagatggctgtgaacaagaggacagtgaggatgccccaccagctgttcatcggcggggagtttgtggatgctgagggcgccaagaccagcgagaccatcaaccccacagatggcagcgtcatctgccaggtgtccctggcccaggtgacagatgtggacaaggctgtggccgccgccaaggatgcctttgaaaatggccgctggggcaagatcagcgcccgggaccggggccgcctgatgtaccgggccccacccagccccagcaccaggccagaccccacagccacctag

SEQ ID NO: 172995 - DNA, 2709 bp, Artificial Sequence
  derived and/or modified sequence
atgaagattgctgtgattggccagagcctgtttggccaggaggtgtactgccacctgaggaaggagggccacgaggtggtgggcgtcttcaccgtgcctgacaaggatggcaaggctgaccccctgggcctggaggccgagaaggatggagtgcctgtgttcaagtacagccgctggagggccaagggccaggccctgcctgatgtggtggccaagtaccaggccctgggcgctgagctgaatgtgctgcccttctgcagccagttcatccccatggagatcatcagcgcccccaggcatggcagcatcatctaccaccccagcctgctgcccaggcacagaggagccagcgccatcaactggaccctcatccatggagacaagaagggcggcttcagcatcttctgggcagatgatggcctggacacaggagacctgctgctgcagaaggaatgtgaggtgctgcctgatgacacagtgtccaccctgtacaaccgcttcctgtttcctgagggcatcaagggcatggtgcaggccgtgcggctgattgctgagggcaaggccccccggctgccccagcctgaggagggcgccacctatgagggcatccagaagaaggagacagccaagatcaactgggaccagcctgctgaggccatccacaactggatcagaggaaatgacaaggtgcctggggcctggacagaggcctgtgagcagaagctgaccttcttcaacagcaccctgaacaccagcggcctggtgcctgaaggagatgccctgcccatccctggggcccacaggcctggggtggtgaccaaggccggcctcatcctgtttggaaatgatgacaagatgctgctggtgaagaacatccagctggaggatggcaagatgatcctggccagcaacttcttcaagggagctgccagctctgtgctggagctgacagaagctgagctggtgacagctgaggccgtgcgctctgtgtggcagaggatcctgcccaaggtgctggaggtggaggacagcacagacttcttcaagagcggggccgcctctgtggatgtggtgcggctggtggaggaggtgaaggagctgtgtgatggcctggagctggagaatgaagatgtgtacatggccagcaccttcggggacttcatccagctgctggtgaggaagctgcggggagatgatgaggagggagaatgttccattgattatgtggagatggctgtgaacaagaggacagtgaggatgccccaccagctgttcatcggcggggagtttgtggatgctgagggcgccaagaccagcgagaccatcaaccccacagatggcagcgtcatctgccaggtgtccctggcccaggtgacagatgtggacaaggctgtggccgccgccaaggatgcctttgaaaatggccgctggggcaagatcagcgcccgggaccggggccgcctgatgtaccgcctggccgacctgatggagcagcaccaggaggagctggccaccatcgaggccctggatgctggagctgtgtacaccctggccctgaagacccacgtgggcatgagcatccagaccttccgctactttgctggctggtgtgacaagatccagggcagcaccatccccatcaaccaggcccggcccaacagaaacctgaccctgaccaggaaggagcctgtgggcgtgtgtggcatcatcatcccctggaactaccccctgatgatgctgtcctggaagacagctgcctgcctggccgccggcaacacagtggtgatcaagccagcccaggtgacccccctgacagccctgaagtttgctgagctgaccctgaaggccggcatccccaagggcgtggtgaatgtgctgcccggcagcggcagcctggtgggccagaggctgagtgaccacccagatgtgaggaagattggcttcaccggcagcacagaggtgggcaagcacatcatgaagagctgtgccatcagcaatgtgaagaaggtgtccctggagctgggcggcaagagccccctcatcatctttgctgactgtgacctgaacaaggctgtgcagatgggcatgagcagcgtcttcttcaacaagggggagaactgcatcgccgccggccgcctgtttgtggaggacagcatccatgatgaatttgtgagaagagtggtggaggaggtgaggaagatgaaggtgggcaaccccctggaccgggacacagaccacggcccccagaaccaccacgcccacctggtgaagctgatggagtactgccagcacggcgtgaaggagggcgccaccctggtgtgtggcggcaaccaggtgccccggcccggcttcttctttgagcccaccgtcttcacagatgtggaggaccacatgttcatcgccaaggaggagagctttggacctgtgatgatcatcagcagatttgctgatggagacctggatgctgtgctgagccgggccaatgccacagaatttggcctggccagcggggtcttcacccgggacatcaacaaggccctgtatgtgtctgacaagctgcaggccggcaccgtgtttgtgaacacctacaacaagacagatgtggccgccccctttggaggcttcaagcagagcggctttgggaaggacctgggggaggccgccctgaatgagtacctgcgggtgaagacagtgacctttgagtactag

SEQ ID NO: 172996 - DNA, 483 bp, Artificial Sequence
  derived and/or modified sequence
atggtgcaggccgtgcggctgattgctgagggcaaggccccccggctgccccagcctgaggagggcgccacctatgagggcatccagaagaaggagacagccaagatcaactgggaccagcctgctgaggccatccacaactggatcagaggaaatgacaaggtgcctggggcctggacagaggcctgtgagcagaagctgaccttcttcaacagcaccctgaacaccagcggcctggtgcctgaaggagatgccctgcccatccctggggcccacaggcctggggtggtgaccaaggccggcctcatcctgtttggaaatgatgacaagatggtgcgggcccggctgtgggtgacctgcctgctgaaggccacccacgcccctgtgctgggcctgcggccccacaggaagaccctgggcagcagcggggagaatggcaagaaccagacccaggagggcaccctgaccctcatctgcccctag

SEQ ID NO: 172997 - DNA, 1010 bp, Artificial Sequence
  derived and/or modified sequence
acaggtcccacctcctggctcccaggacgggtctgcaccaacctcagtttcggggctgcggctcacagaagtctaacctgcccgggacgcccgcaccaactcctgcgcgcggtccttccaaccctcctgctaccatgaagattgcagtgattggacagagcctgtttggccaggaagtttactgccacctgaggaaggagggccacgaagtggtgggtgtgttcactgttccagacaaggatggaaaggccgaccccctgggaccctcattcacggagataagaaaggggggttttccatcttctgggcggatgatggtctggacaccggagacctgctgctgcagaaggagtgtgaggtgctcccggacgacaccgtgagcacgctgtacaaccgcttcctcttccctgaaggcatcaaagggatggtgcaggccgtgaggctgatcgctgagggcaaagcccccagactccctcagcctgaggaaggagccacctatgaggggattcagaagaaggagacagccaagatcaactgggaccagccggcagaggccattcacaactggatccgcgggaacgacaaggtgccgggagcctggacagaggcctgtgaacagaaactgacatttttcaactcaacgctgaacacttcaggcctggtgcccgagggagacgctttgcccatcccaggagcccatcggccaggggtggtcaccaaagcaggactcatcctctttgggaatgatgacaaaatggtaagggcacggctgtgggtcacttgcctgctcaaagccacccatgctcctgtccttggactcaggcctcacaggaagaccctaggctcctctggagaaaatggaaaaaaccagacccaggaaggaacactgaccctgatttgtccctgaccacccggctggtcctgagcacagggtgtccgaggcagtttacccacttctctgttctgggaaagctgggctccctacccttcctggctaggcacccatctcc

SEQ ID NO: 172998 - DNA, 1518 bp, Artificial Sequence
  derived and/or modified sequence
atgaagatcgccgtgatcggccagagcctgttcggccaggaggtgtattgccatctgaggaaagagggccatgaggttgttggcgtgtttaccgtgcctgataaggacggcaaggccgaccccctaggtcttgaggccgaaaaagacggagtcccagtatttaaatatagtaggtggcgagccaagggacaagcactgcccgatgtagtggcaaagtaccaggccctcggcgcagagcttaacgtcctccctttctgttcacagttcatccccatggagataataagcgcccctcgccatggaagtattatctatcaccctagcctgctcccaaggcatcggggggccagcgcaatcaactggacattgatacacggggataagaaagggggtttctccatcttttgggcagacgacggccttgacaccggcgatctgctacttcagaaggagtgtgaggtcttacccgatgatacggtttctactctctataatcgattcctctttccggagggtattaaaggtatggtacaggccgtcagacttatagccgaagggaaggccccaaggttacctcaaccagaggagggagctacttatgagggaattcagaaaaaggagactgccaagatcaactgggatcagcccgccgaggcaattcataattggattagaggtaacgacaaagtgccaggcgcctggacagaagcctgcgagcagaagctcacattctttaatagcacattgaatacctctgggctggtgcccgagggagacgctctccctattcctggtgcccatcgaccaggcgtagtgaccaaagctgggctgattctttttggaaatgatgacaagatgctcctggtcaaaaacattcagctggaggacgggaagatgatactggcctcaaatttctttaagggggcagcttcttctgtgctcgagctcaccgaggctgagctggtgacggccgaggctgtgcgctcagtctggcagaggatcctacccaaagtgctcgaggtcgaggactccaccgacttttttaaaagcggcgctgcaagtgtcgacgttgtgagacttgtagaggaggtgaaagagctttgtgacggccttgagctcgagaatgaggatgtgtacatggcatcaacattcggagatttcatacaactgctggtgcgaaaactccgcggcgatgacgaagagggcgagtgtagcattgactacgtagaaatggctgtcaataagagaaccgttcgcatgcctcaccagctgtttatcggtggtgaatttgtagacgcggaaggcgcaaaaacctccgagaccatcaaccctactgacgggtctgtgatatgtcaggtaagcctagctcaggtgaccgatgtagataaagctgtggccgccgctaaagacgccttcgagaatggcagatggggcaaaatcagcgctagagacagagggcggctaatgtatcgagcgcccccatcacccagtacacgtccagaccccactgccacttag

SEQ ID NO: 172999 - DNA, 2709 bp, Artificial Sequence
  derived and/or modified sequence
atgaagatcgccgtgatcggccagagcctgttcggccaggaggtgtattgccatcttcgcaaggaggggcatgaagtcgtgggcgtgtttacggtcccggacaaagacgggaaggccgatcccctaggacttgaagctgaaaaggatggtgtaccggtgttcaaatatagccggtggcgggccaagggacaggcattgccagacgtcgtggctaaatatcaagcgctcggggcagagctgaatgtgttgccattctgttcacaattcatccctatggaaattatttctgcccccaggcacggtagcatcatataccatccatctctcttgccacgtcatcgaggagctagcgctatcaattggaccctcatccatggggacaagaagggagggtttagcatcttctgggccgacgacggattggataccggagatctgctgcttcaaaaagaatgcgaagtacttccagacgacaccgtgtcaaccctctacaataggttcctctttcccgagggaatcaagggaatggttcaagctgtgcgcctgatcgccgagggtaaggcgcctagactcccccaaccagaggagggagcaacctatgaaggaattcagaagaaagaaaccgcaaaaatcaattgggatcagcctgctgaggccatccacaactggatcaggggaaatgataaggtgcctggagcctggacggaggcgtgcgaacagaagctgacattcttcaactcaactctgaacacatcaggcctcgtgcccgagggagacgctttacctatccccggcgcgcacaggccaggagtggtgaccaaagctgggctcattctgtttgggaacgatgacaagatgctccttgttaaaaatatccagcttgaagatggaaagatgatccttgcctccaatttcttcaagggcgccgcgtcctctgtgctagagttgaccgaggctgagcttgtgactgctgaagccgtgcgaagcgtgtggcaacgcatcctacccaaagtcctggaggtcgaagactccaccgatttttttaagagcggagcagcctctgtggacgttgtcaggcttgtcgaggaggtgaaggaactctgcgatggcctggaattagaaaatgaggacgtttacatggcaagtacattcggagactttattcagctgttggtgcggaaactgcgcggggatgatgaggaaggagagtgttccatcgactacgtggagatggccgtaaataaaaggaccgttcgtatgccccaccagctcttcattggcggcgaattcgttgatgccgaaggcgctaaaacctcagagaccattaatcccacagacgggagtgtgatctgtcaggtcagccttgcacaggttacagacgttgataaggccgtggctgctgccaaggacgcttttgaaaatgggaggtggggcaaaatttctgctcgcgatcggggccgcctgatgtaccgcctcgcagacctaatggaacagcaccaggaagaactggccaccattgaggcactcgacgctggagccgtttacaccttggccctcaaaactcatgttggaatgtccatacaaacctttagatattttgccggctggtgcgacaaaatccaagggagcacaattcctattaatcaggctcgtcctaatagaaatctgaccctcactaggaaggagcctgtgggcgtgtgcggaataatcatcccttggaattaccctctgatgatgctgagctggaagaccgcagcttgcctcgctgcaggaaacacagtggtaatcaagcccgcccaggtgaccccacttactgccctcaagttcgctgaactaacactgaaagctggaattcccaagggggtggttaacgtactgcccggcagcggatctcttgtcggtcagaggctaagcgaccaccccgacgtccgtaaaataggttttacaggctctaccgaagttgggaagcacatcatgaagtcatgcgccattagcaatgtgaagaaggtcagcctggaactcggaggtaagagcccccttatcatttttgctgactgcgacttaaataaagcagtccagatggggatgtccagcgtgttcttcaacaagggcgaaaattgcattgccgcaggaaggctgttcgtggaggattccatacacgatgagttcgtccgccgggtcgttgaggaggtcagaaagatgaaggttggtaacccgctagatcgggacactgaccacggcccgcagaaccatcatgcccacttagtgaaactcatggagtattgtcagcacggcgtcaaagaaggtgctacgctcgtgtgtggcggtaaccaagtccctcgccccggcttttttttcgaaccaacagtcttcacagacgttgaggaccatatgttcattgccaaagaagaatcatttggtcctgtaatgatcatttctagatttgcagacggcgacctcgatgccgtcttgagccgggcaaatgccacagagttcgggctggctagtggagtttttactagagacattaacaaagcattgtatgtgagtgataagttgcaggctggtaccgtatttgtgaatacttacaataaaaccgacgtggccgcgccttttggcgggtttaaacagagcgggttcgggaaggacctcggcgaggcggccctgaatgagtatctccgagtgaaaaccgttacgttcgaatactag

SEQ ID NO: 173000 - DNA, 483 bp, Artificial Sequence
  derived and/or modified sequence
atggtgcaggccgtgcggctgatcgccgagggcaaggccccccggctcccccagcccgaagagggtgctacatacgaggggattcagaaaaaggaaactgccaaaatcaattgggatcagcccgcagaagctatccacaactggatcagaggaaacgataaagtcccgggagcgtggacggaggcctgtgagcagaaactgacctttttcaacagtaccctaaacaccagcggcttggtgccagagggtgacgctttgccaatcccaggcgcccatagaccaggggtggttacaaaagcaggccttattcttttcggaaacgacgacaagatggttcgggcgagactgtgggtgacatgtctcctgaaggcaacccacgctcctgtgctcgggcttcggccgcatcgtaagacgctcggatcgtcgggcgagaatggaaaaaatcagactcaggagggcacactaacactcatatgtccctag

SEQ ID NO: 173001 - DNA, 2709 bp, Artificial Sequence
  derived and/or modified sequence
atgaagatcgccgtgatcggccagagcctgttcggccaggaggtgtactgccatcttagaaaagagggtcacgaagtagtgggcgtgttcactgtccccgataaggacggtaaggctgaccccctcggcctggaagccgagaaagacggggtcccagtgtttaagtattcgagatggcgggcaaagggacaagcactgcctgatgtggtagcgaagtaccaagcacttggcgcggagctcaatgtactgcctttttgtagtcagtttattcccatggagatcatttccgctcccaggcacgggtctatcatctaccaccctagtcttctcccaaggcatcggggcgcatcagccatcaattggacactcatccacggggacaagaaaggtggcttcagtattttctgggccgatgatggcttggacactggcgacctgttgctgcaaaaagagtgtgaggtccttcccgatgacacagtctcaacactctataaccggttcctgttcccagaaggcatcaaggggatggtgcaggccgttagactgattgcggaggggaaggcacctcgcctcccacagcccgaagaaggcgccacatacgaagggatccaaaaaaaagagaccgccaaaattaattgggaccagccagcagaagccatccataattggattcgcggcaatgataaggtgcctggagcatggacagaggcgtgtgagcagaaactgacctttttcaatagcaccctgaacacttctggactcgtgcctgaaggggatgcattaccaattccaggggcccaccgcccaggcgtggttacgaaagctggattgatcctgttcggaaatgatgacaaaatgctgctagtcaagaacatccagttggaggacggaaagatgatactggcttcaaatttcttcaagggggcagccagcagtgtgcttgagctgaccgaggcagaacttgtgactgcggaggctgtgcggagtgtatggcagaggatcctcccgaaggtgctggaagtggaggactccactgacttttttaaaagcggggccgctagcgtggacgtggtgagactcgttgaggaagtgaaggaattgtgtgacgggctggagcttgagaacgaggacgtctacatggcctctacctttggggatttcatccagctgctggtgcgtaaactgcgtggtgatgacgaggagggcgagtgctctatcgactatgtcgagatggctgtgaacaagcgcaccgtgaggatgccccaccagctatttatcggcggcgagttcgtggacgcggaaggcgccaaaactagcgaaaccattaatccaactgatggttcagtgatatgccaggtgagcctggcacaagttaccgacgtcgacaaggctgtggctgccgccaaagacgcttttgagaacggccgctgggggaagatcagcgctagggaccggggtcgtctgatgtacagactggcagatctgatggagcaacaccaggaagaactagccacaattgaagcactagacgccggggccgtttatacactggcgctgaagactcacgtcggaatgagcatccagacctttcggtactttgctgggtggtgtgacaaaatacagggctctaccatcccaattaaccaggcacggccaaatagaaatctgaccttgactaggaaagagcctgttggcgtctgtggcattattatcccatggaactatccattaatgatgttgagctggaagactgcagcttgtctcgctgctggaaacacagtcgtgatcaagcccgctcaggtgactcctctgactgccctgaaatttgctgaacttactctgaaggctggcatccctaagggagtggtgaacgtactcccggggtcaggttctttggtcgggcagcgactgtccgaccatccagacgtgaggaagataggcttcactggatctaccgaagttggcaagcacataatgaagtcttgcgccatttctaacgttaaaaaggtgagcctggagttaggcggtaagtccccactaattattttcgctgattgtgacttgaacaaggcggttcagatgggaatgagctccgtgtttttcaacaaaggggaaaattgtatcgccgcaggcagattgtttgtagaggactcaattcatgacgagtttgtgcgccgagtggtagaggaagtcaggaaaatgaaggtgggcaatccactggatcgcgacaccgatcatggcccgcagaatcaccatgcacatctggtcaagctgatggagtactgtcaacatggcgtcaaagaaggcgcaaccctggtgtgcggtggcaatcaggtcccccgccctgggttcttcttcgagccaaccgttttcacagatgtggaggaccatatgtttatagctaaagaggagtccttcggacctgtgatgatcatttcacggtttgctgatggtgatctggatgcggtgctcagccgcgctaacgccacggagtttggactggcgtctggggtgtttacaagggatattaataaagctttatatgtgtccgacaagttgcaagctggtacagttttcgtgaatacatataacaaaacggatgtagccgccccttttggcggattcaagcagtcgggattcggcaaggaccttggggaggctgctctgaatgagtacctgcgcgtgaagaccgtaaccttcgagtattag

SEQ ID NO: 173002 - DNA, 1518 bp, Artificial Sequence
  derived and/or modified sequence
atgaaaatcgccgtcatcggccagtctctctttggacaagaagtgtactgtcacttgcgaaaggaagggcatgaggtcgtcggtgtgtttactgtaccagacaaggatgggaaggcggaccctttaggcctggaggccgaaaaggatggggtccctgtttttaaatactctaggtggagagcaaaaggtcaggcattgcccgatgtcgtggccaaatatcaggcactgggtgctgagttgaatgttctgcccttttgttctcagttcattccgatggagattataagcgctccccgacacggcagcatcatttatcatccctcgctccttccccgacatcggggtgctagcgcaataaattggaccctcatccacggggataagaagggagggttctccattttctgggcagacgacggcctcgataccggcgacttgctactgcaaaaagagtgcgaagttctgccagacgatacagtgtcaacgctatataaccgattcctgttcccagagggcattaaaggaatggtgcaggccgtccgcttgatagctgagggtaaggctccaaggctgccccagccagaggagggcgctacatacgagggcatacagaaaaaggaaacggccaagatcaactgggaccaacctgccgaagcgattcacaactggattagagggaacgacaaggtgccaggtgcctggactgaagcatgtgaacagaaactgaccttttttaactctacactgaacacatctggcctggtccccgagggggatgccctgcccatcccaggagcgcacaggcccggagttgtgaccaaggctggactgattctctttgggaatgatgataagatgctgctcgttaaaaacatccagctggaggatgggaagatgatcttagcctcaaacttcttcaagggtgccgcttcatcagtcctcgagctgacagaagccgaactcgtgaccgctgaagcagtccggtcggtgtggcagagaattctacctaaagtgctggaggtggaggactctaccgatttctttaagagtggcgcagcttcggttgacgtggtgcgactggtggaagaagtgaaggagttgtgtgacggtctggaacttgaaaacgaagatgtctatatggctagtaccttcggagacttcatccaactcctagtgcggaagctccgaggtgatgatgaagaaggggaatgctcaatcgactacgtcgaaatggccgtgaataaaagaactgtgcgtatgccccatcagttattcatcggtggcgagttcgttgacgccgaaggcgctaaaacctccgaaacaattaaccctacagacgggtccgtaatctgtcaggtatccctggctcaagtcacggacgttgacaaggcagtcgcagctgctaaggacgctttcgagaacgggagatggggcaaaatttctgctcgcgatcgtggtagattaatgtaccgcgctccaccttcaccttctactcgtcccgatcctaccgctacctag

SEQ ID NO: 173003 - DNA, 2709 bp, Artificial Sequence
  derived and/or modified sequence
atgaaaattgccgttattgggcagtccctgttcgggcaggaagtgtactgtcatttaagaaaggaggggcacgaggtggtcggtgtgttcacagtgcccgataaggatggcaaggcagacccactgggactggaagctgagaaggatggggtgccagtttttaagtactcaagatggagggccaaagggcaagctcttcctgatgtggttgctaagtatcaagcattgggcgcagagttgaatgttctgccgttctgctcccagttcattcccatggaaatcatctcggctccccgacacggctcaataatctatcatcccagtttgctccctcggcataggggcgctagcgcaatcaactggactctgatccatggcgataaaaaaggtggattctcaatcttctgggcggacgacgggcttgacaccggcgatcttctgctgcagaaggagtgtgaggtcctccctgatgacacagtaagcactttgtacaataggttcctgtttcccgaaggcatcaaggggatggtgcaggctgtacgactgatcgctgaaggcaaagcacccaggttgcctcagcctgaagaaggtgcgacctatgaggggatccagaaaaaagaaaccgccaaaataaattgggaccagcccgcagaggctatccacaattggatccgcggaaacgacaaggtgcctggggcttggactgaagcctgcgagcagaaacttacattcttcaactctactttgaacacctcaggtttggtgccagagggagacgccttgcccattccgggtgcgcataggcccggtgtggtcaccaaggcgggtctaatcctgtttggcaatgacgataagatgctgttggtcaaaaacattcagctagaagacggaaaaatgattcttgccagcaatttcttcaaaggggcagctagtagtgtcttagagctgaccgaggctgaattagttaccgccgaggccgttagaagtgtgtggcaacgtatcctccctaaggttcttgaggtggaggattccaccgactttttcaagtccggcgcagcctcagtggatgttgtgcgtctggtcgaggaagttaaagagctgtgtgacggcttagaattggaaaacgaagacgtgtacatggccagtactttcggagactttattcagctgcttgtgcgtaagctccggggagatgacgaagaaggcgaatgttcaatcgattacgtcgagatggccgtgaacaaacgcacagtgagaatgccccatcagttgttcataggaggtgagtttgtggatgcagagggagccaaaacctccgagacaattaacccaacggacggatctgttatttgtcaggtgagtctcgcacaggtcacagatgtagacaaggcagtggctgctgcgaaagacgcttttgagaacggcaggtggggtaagatcagcgcccgtgatcgaggcagactcatgtacagattggcagaccttatggagcaacaccaggaggagctagctacaattgaggccctcgacgccggtgccgtgtatacactcgccctgaagactcacgtgggaatgtccattcaaaccttcagatatttcgcaggatggtgtgacaagattcagggcagtacgatcccgattaatcaggctcgcccaaataggaacctgaccctcacgagaaaggaaccagtgggggtctgcggcattattataccttggaattatcctctgatgatgctgagctggaaaacagccgcttgtctggctgccggaaataccgttgtgatcaagcctgcacaagttaccccgctaacagccctcaagtttgctgagctcacacttaaggctggtattcccaagggagttgtaaacgttctgcccggatccgggagtctggtgggacagagactgagtgatcaccctgatgtgcgcaaaatcggttttacagggtccacggaggtcggtaagcacattatgaagagctgcgccataagcaatgtgaagaaagtctccctcgagttgggaggcaagtcccctctgatcatttttgccgactgtgatctaaataaggctgttcagatgggtatgagcagcgtgttcttcaataaaggcgagaattgcattgccgcaggtcgactgttcgtagaggactcgattcacgatgagttcgttcggcgagtggttgaggaggtgcgaaaaatgaaagtgggaaatcctctggaccgcgatactgatcacggtccacaaaatcatcacgcgcatttggtgaaattgatggaatactgccaacatggggtgaaggagggtgccactttagtgtgcggaggcaaccaggttcctcgacctggattcttctttgaacccaccgtgtttacagatgttgaagaccacatgttcattgccaaagaagagagtttcggcccagtgatgatcatttctagatttgccgatggagaccttgacgctgtgcttagcagggccaatgctacagaatttgggttagcctccggcgtcttcaccagagacatcaacaaagccctgtacgtgagtgacaagctgcaggctggcaccgtgttcgtcaacacttacaacaaaacagatgtcgccgctcctttcgggggtttcaagcagagcggctttggcaaagacctgggggaggccgctctcaacgagtatctgcgcgtgaagactgtgacctttgaatactag

SEQ ID NO: 173004 - DNA, 483 bp, Artificial Sequence
  derived and/or modified sequence
atggttcaggcggtccgacttatcgcggagggaaaggctcctcgcctgccgcagcccgaagaaggggcaacctacgaaggcatccaaaagaaagaaactgctaagattaattgggatcaacctgctgaagctattcacaattggatccgcggaaacgacaaggttcccggagcatggactgaggcgtgcgaacagaagttgacgttctttaatagcaccctgaatacaagtggcttagtgcctgaaggcgacgcactgccaatcccaggcgctcacagacccggagtagtgactaaagcaggcctcatcctatttggaaacgatgataaaatggtgcgcgctagactttgggtgacatgcctactgaaggccacacatgcgccagttcttgggctgcggccacatcgaaagaccctgggttccagcggcgagaacgggaaaaaccagacacaggaggggactcttacgctgatttgtccatag

SEQ ID NO: 173005 - DNA, 2709 bp, Artificial Sequence
  derived and/or modified sequence
atgaaaattgccgtgatcggccagtccctttttggccaggaagtgtactgtcacctgcgtaaagagggccacgaggtcgtgggcgtcttcacggtccccgataaagatggcaaggccgaccctctgggtctggaggcagagaaggacggagtcccagtgtttaaatatagccggtggagagcaaagggccaggccctgcccgatgttgtggcgaagtaccaagccctgggagctgagctgaacgtgctgcctttctgtagccagtttatccctatggagatcatcagtgcgccacgccatggctctattatctaccaccctagcttgctcccccgacatcggggagcatcagctatcaactggacactgattcacggggataagaaaggcggattctccatcttctgggcagacgatggtctggacaccggcgatctgctgctccagaaggagtgcgaggtgttgcccgacgacactgtcagcaccctgtacaatagatttctgttccccgagggaataaaagggatggtgcaggccgtgagactgatcgctgagggcaaagcgccacgcctaccgcaacctgaagagggcgctacgtatgagggaatacagaaaaaagaaacagcaaagatcaattgggaccagcccgcagaagctatacacaactggatcagaggcaacgataaggtgcctggagcgtggactgaggcatgcgagcagaagttgaccttttttaacagcactctgaatactagcgggctggtccctgagggagatgctctgcctattcctggagcccatcgccctggggtcgtgacgaaggctggcctcatcctgttcggtaacgacgacaagatgttgttagtgaaaaacatccaactggaagatggcaagatgatcctcgcctccaatttcttcaagggggcagcttcaagtgtgttggaactgaccgaggcagaacttgtcaccgccgaagctgtacgttcggtgtggcagcgcattctgcctaaggttctggaggtggaggattctactgacttcttcaaatctggcgcagccagcgtagatgttgtacggcttgtggaggaggttaaggaactgtgtgatgggctggaactggaaaatgaagacgtgtatatggcgtctacgttcggagacttcatccagctgctggttcgaaagctcaggggcgacgacgaggagggggagtgttccatcgattatgtagaaatggcggtaaacaagcggaccgtgagaatgccacaccagctgttcattggaggcgagtttgtggacgccgaaggcgcaaaaactagtgaaacaataaatcctacagatggtagtgtcatctgccaggtgtctcttgcgcaggtgactgacgtggacaaggccgtggccgcagccaaggacgcctttgaaaacggcaggtggggcaagattagtgcacgtgataggggcaggctgatgtataggctcgccgaccttatggagcagcatcaggaggagttagccaccatcgaggcactagacgccggagctgtttataccctggccctgaagacacatgtcggaatgagtatccaaaccttccgatattttgctggttggtgtgacaaaatccaggggagtacgatccctattaatcaggctcgacccaaccgcaacctgacactcacaagaaaagagccagttggggtgtgtggaatcataattccatggaactacccattaatgatgcttagttggaaaacggccgcatgcctcgccgctgggaacaccgtggtcatcaaaccggcacaagtgacgcccctgaccgccctgaaattcgccgaacttactctgaaggccggtataccaaagggtgttgttaatgtgttgcctgggagcggctcattggtcgggcagaggctgtccgatcaccctgatgtacgtaagattgggttcaccgggtctacagaggtggggaaacacattatgaaaagttgcgccattagcaacgtgaagaaggtatccctggagctcggcggaaagtctccactcataatctttgccgactgcgacctgaacaaagcagtgcagatgggtatgagtagcgtcttttttaacaaaggcgagaattgtatagctgcaggtcgactatttgtggaagacagtatccacgacgagtttgtccgaagagtggttgaggaggtccgtaaaatgaaagtggggaatccactggaccgggataccgatcacggccctcaaaaccatcatgctcaccttgtcaagctcatggagtattgtcaacacggggtcaaagaaggagccactttggtgtgcggcggtaatcaggtaccacgtcccggattcttcttcgagcccactgtttttactgatgtggaagaccacatgtttatcgctaaggaagagagtttcgggccagtgatgatcatcagccggttcgccgatggcgaccttgacgctgtcctttcccgcgctaacgctactgaattcggactggcctccggcgtttttacccgcgatataaacaaagccttgtatgtctcagacaaattgcaggctggcactgtgtttgtgaacacttacaacaagacagacgttgctgctccttttggcggttttaagcagtccggatttggtaaagatctgggcgaggcagcattaaatgagtatcttagggtaaaaaccgtgactttcgaatattag

SEQ ID NO: 173006 - DNA, 1518 bp, Artificial Sequence
  derived and/or modified sequence
atgaagatcgccgtgatcggccagagcctgttcggccaggaggtgtactgccacctgagaaaggagggccacgaggtggtgggcgtgttcaccgtgcccgacaaggacggcaaggccgaccccctgggcctggaggccgagaaggacggcgtgcccgtgttcaagtacagcagatggagagccaagggccaggccctgcccgacgtggtggccaagtaccaggccctgggcgccgagctgaacgtgctgcccttctgcagccagttcatccccatggagatcatcagcgcccccagacacggcagcatcatctaccaccccagcctgctgcccagacacagaggcgccagcgccatcaactggaccctgatccacggcgacaagaagggcggcttcagcatcttctgggccgacgacggcctggacaccggcgacctgctgctgcagaaggagtgcgaggtgctgcccgacgacaccgtgagcaccctgtacaacagattcctgttccccgagggcatcaagggcatggtgcaggccgtgagactgatcgccgagggcaaggcccccagactgccccagcccgaggagggcgccacctacgagggcatccagaagaaggagaccgccaagatcaactgggaccagcccgccgaggccatccacaactggatcagaggcaacgacaaggtgcccggcgcctggaccgaggcctgcgagcagaagctgaccttcttcaacagcaccctgaacaccagcggcctggtgcccgagggcgacgccctgcccatccccggcgcccacagacccggcgtggtgaccaaggccggcctgatcctgttcggcaacgacgacaagatgctgctggtgaagaacatccagctggaggacggcaagatgatcctggccagcaacttcttcaagggcgccgccagcagcgtgctggagctgaccgaggccgagctggtgaccgccgaggccgtgagaagcgtgtggcagagaatcctgcccaaggtgctggaggtggaggacagcaccgacttcttcaagagcggcgccgccagcgtggacgtggtgagactggtggaggaggtgaaggagctgtgcgacggcctggagctggagaacgaggacgtgtacatggccagcaccttcggcgacttcatccagctgctggtgagaaagctgagaggcgacgacgaggagggcgagtgcagcatcgactacgtggagatggccgtgaacaagagaaccgtgagaatgccccaccagctgttcatcggcggcgagttcgtggacgccgagggcgccaagaccagcgagaccatcaaccccaccgacggcagcgtgatctgccaggtgagcctggcccaggtgaccgacgtggacaaggccgtggccgccgccaaggacgccttcgagaacggcagatggggcaagatcagcgccagagacagaggcagactgatgtacagagccccccccagccccagcaccagacccgaccccaccgccacctag

SEQ ID NO: 173007 - DNA, 2709 bp, Artificial Sequence
  derived and/or modified sequence
atgaagatcgccgtgatcggccagagcctgttcggccaggaggtgtactgccacctgagaaaggagggccacgaggtggtgggcgtgttcaccgtgcccgacaaggacggcaaggccgaccccctgggcctggaggccgagaaggacggcgtgcccgtgttcaagtacagcagatggagagccaagggccaggccctgcccgacgtggtggccaagtaccaggccctgggcgccgagctgaacgtgctgcccttctgcagccagttcatccccatggagatcatcagcgcccccagacacggcagcatcatctaccaccccagcctgctgcccagacacagaggcgccagcgccatcaactggaccctgatccacggcgacaagaagggcggcttcagcatcttctgggccgacgacggcctggacaccggcgacctgctgctgcagaaggagtgcgaggtgctgcccgacgacaccgtgagcaccctgtacaacagattcctgttccccgagggcatcaagggcatggtgcaggccgtgagactgatcgccgagggcaaggcccccagactgccccagcccgaggagggcgccacctacgagggcatccagaagaaggagaccgccaagatcaactgggaccagcccgccgaggccatccacaactggatcagaggcaacgacaaggtgcccggcgcctggaccgaggcctgcgagcagaagctgaccttcttcaacagcaccctgaacaccagcggcctggtgcccgagggcgacgccctgcccatccccggcgcccacagacccggcgtggtgaccaaggccggcctgatcctgttcggcaacgacgacaagatgctgctggtgaagaacatccagctggaggacggcaagatgatcctggccagcaacttcttcaagggcgccgccagcagcgtgctggagctgaccgaggccgagctggtgaccgccgaggccgtgagaagcgtgtggcagagaatcctgcccaaggtgctggaggtggaggacagcaccgacttcttcaagagcggcgccgccagcgtggacgtggtgagactggtggaggaggtgaaggagctgtgcgacggcctggagctggagaacgaggacgtgtacatggccagcaccttcggcgacttcatccagctgctggtgagaaagctgagaggcgacgacgaggagggcgagtgcagcatcgactacgtggagatggccgtgaacaagagaaccgtgagaatgccccaccagctgttcatcggcggcgagttcgtggacgccgagggcgccaagaccagcgagaccatcaaccccaccgacggcagcgtgatctgccaggtgagcctggcccaggtgaccgacgtggacaaggccgtggccgccgccaaggacgccttcgagaacggcagatggggcaagatcagcgccagagacagaggcagactgatgtacagactggccgacctgatggagcagcaccaggaggagctggccaccatcgaggccctggacgccggcgccgtgtacaccctggccctgaagacccacgtgggcatgagcatccagaccttcagatacttcgccggctggtgcgacaagatccagggcagcaccatccccatcaaccaggccagacccaacagaaacctgaccctgaccagaaaggagcccgtgggcgtgtgcggcatcatcatcccctggaactaccccctgatgatgctgagctggaagaccgccgcctgcctggccgccggcaacaccgtggtgatcaagcccgcccaggtgacccccctgaccgccctgaagttcgccgagctgaccctgaaggccggcatccccaagggcgtggtgaacgtgctgcccggcagcggcagcctggtgggccagagactgagcgaccaccccgacgtgagaaagatcggcttcaccggcagcaccgaggtgggcaagcacatcatgaagagctgcgccatcagcaacgtgaagaaggtgagcctggagctgggcggcaagagccccctgatcatcttcgccgactgcgacctgaacaaggccgtgcagatgggcatgagcagcgtgttcttcaacaagggcgagaactgcatcgccgccggcagactgttcgtggaggacagcatccacgacgagttcgtgagaagagtggtggaggaggtgagaaagatgaaggtgggcaaccccctggacagagacaccgaccacggcccccagaaccaccacgcccacctggtgaagctgatggagtactgccagcacggcgtgaaggagggcgccaccctggtgtgcggcggcaaccaggtgcccagacccggcttcttcttcgagcccaccgtgttcaccgacgtggaggaccacatgttcatcgccaaggaggagagcttcggccccgtgatgatcatcagcagattcgccgacggcgacctggacgccgtgctgagcagagccaacgccaccgagttcggcctggccagcggcgtgttcaccagagacatcaacaaggccctgtacgtgagcgacaagctgcaggccggcaccgtgttcgtgaacacctacaacaagaccgacgtggccgcccccttcggcggcttcaagcagagcggcttcggcaaggacctgggcgaggccgccctgaacgagtacctgagagtgaagaccgtgaccttcgagtactag

SEQ ID NO: 173008 - DNA, 483 bp, Artificial Sequence
  derived and/or modified sequence
atggtgcaggccgtgagactgatcgccgagggcaaggcccccagactgccccagcccgaggagggcgccacctacgagggcatccagaagaaggagaccgccaagatcaactgggaccagcccgccgaggccatccacaactggatcagaggcaacgacaaggtgcccggcgcctggaccgaggcctgcgagcagaagctgaccttcttcaacagcaccctgaacaccagcggcctggtgcccgagggcgacgccctgcccatccccggcgcccacagacccggcgtggtgaccaaggccggcctgatcctgttcggcaacgacgacaagatggtgagagccagactgtgggtgacctgcctgctgaaggccacccacgcccccgtgctgggcctgagaccccacagaaagaccctgggcagcagcggcgagaacggcaagaaccagacccaggagggcaccctgaccctgatctgcccctag

SEQ ID NO: 173009 - protein, 308 aa, Artificial Sequence
  derived and/or modified sequence
MQELTLSPGPAKLTPTLDPTHRMELILSTSPAELTLDPACQPKLPLDSTCQPEMTFNPGPTELTLDPEHQPEETPAPSLAELTLEPVHRRPELLDACADLINDQWPRSRTSRLHSLGQSSDAFPLCLMLLSPHPTLEAAPVVVGHARLSRVLNQPQSLLVETVVVARALRGRGFGRRLMEGLEVFARARGFRKLHLTTHDQVHFYTHLGYQLGEPVQGLVFTSRRLPATLLNAFPTAPSPRPPRKAPNLTAQAAPRGPKGPPLPPPPPLPECLTISPPVPSGPPSKSLLETQYQNVRGRPIFWMEKDI

SEQ ID NO: 173010 - protein, 286 aa, Artificial Sequence
  derived and/or modified sequence
MELILSTSPAELTLDPACQPKLPLDSTCQPEMTFNPGPTELTLDPEHQPEETPAPSLAELTLEPVHRRPELLDACADLINDQWPRSRTSRLHSLGQSSDAFPLCLMLLSPHPTLEAAPVVVGHARLSRVLNQPQSLLVETVVVARALRGRGFGRRLMEGLEVFARARGFRKLHLTTHDQVHFYTHLGYQLGEPVQGLVFTSRRLPATLLNAFPTAPSPRPPRKAPNLTAQAAPRGPKGPPLPPPPPLPECLTISPPVPSGPPSKSLLETQYQNVRGRPIFWMEKDI

SEQ ID NO: 173011 - protein, 57 aa, Artificial Sequence
  derived and/or modified sequence
MELILSTSPAELTLDPACQPKLPLDSTCQPEMTFNPGPTELTLDPEHQPEETPAPSL

SEQ ID NO: 173012 - protein, 86 aa, Artificial Sequence
  derived and/or modified sequence
MELILSTSPAELTLDPACQPKLPLDSTCQPEMTFNPGPTELTLDPEHQPEETPAPSLAELTLEPVHRRPELLDACADLINDQWPRS

SEQ ID NO: 173013 - DNA, 927 bp, Artificial Sequence
  derived and/or modified sequence
atgcaggagctgaccctgagccccggccccgccaagctgacccccaccctggaccccacccacagaatggagctgatcctgagcaccagccccgccgagctgaccctggaccccgcctgccagcccaagctgcccctggacagcacctgccagcccgagatgaccttcaaccccggccccaccgagctgaccctggaccccgagcaccagcccgaggagacccccgcccccagcctggccgagctgaccctggagcccgtgcacagaagacccgagctgctggacgcctgcgccgacctgatcaacgaccagtggcccagaagcagaaccagcagactgcacagcctgggccagagcagcgacgccttccccctgtgcctgatgctgctgagcccccaccccaccctggaggccgcccccgtggtggtgggccacgccagactgagcagagtgctgaaccagccccagagcctgctggtggagaccgtggtggtggccagagccctgagaggcagaggcttcggcagaagactgatggagggcctggaggtgttcgccagagccagaggcttcagaaagctgcacctgaccacccacgaccaggtgcacttctacacccacctgggctaccagctgggcgagcccgtgcagggcctggtgttcaccagcagaagactgcccgccaccctgctgaacgccttccccaccgcccccagccccagaccccccagaaaggcccccaacctgaccgcccaggccgcccccagaggccccaagggcccccccctgcccccccccccccccctgcccgagtgcctgaccatcagcccccccgtgcccagcggcccccccagcaagagcctgctggagacccagtaccagaacgtgagaggcagacccatcttctggatggagaaggacatctag

SEQ ID NO: 173014 - DNA, 927 bp, Artificial Sequence
  derived and/or modified sequence
atgcaggagctgactttgtctccaggcccagccaagcttaccccaaccctggatccaacacatcgaatggagctgattctctccacttcccctgccgagctcaccctggatccggcctgccaacccaagctgccgctagattctacttgccagcctgaaatgactttcaaccccggtcctacagaattgacactcgatcccgaacatcagcctgaggagacgcccgcacccagcctggcggaactaaccctcgaaccagtgcacaggcgacctgagctgttggatgcatgtgccgatctaataaatgaccaatggccgcgcagccgcacaagcaggctgcattcattggggcagtcttcggacgccttcccgctctgcctgatgctcctgtcccctcacccaacattggaggcagcccccgtggtggtggggcacgcccgtttgtcccgggttctcaaccagcctcagagtctgctcgtggaaacggtagtcgtggcccgggcccttcgggggaggggcttcggccggcgcctgatggaaggtctagaggtgttcgcccgggctcgtggcttcaggaaactgcacttgacgacccacgaccaggtgcatttttatacgcacttgggttatcagctcggagagcccgtgcaaggactcgtttttacatcacgcaggctcccagcgactctgctcaacgccttccctaccgccccctctccccggccacctaggaaggcacccaacctcacggctcaagcagccccgcgcggacccaaggggcccccactgcctccaccacctccactgcctgagtgcctgacaatatctccaccagtgccctctggcccgccctctaagtctctgcttgagactcagtatcaaaatgtgcgggggaggccaattttttggatggaaaaggacatctag

SEQ ID NO: 173015 - DNA, 927 bp, Artificial Sequence
  derived and/or modified sequence
atgcaggagctgaccctgagccctggccctgccaagctgacccccaccctggaccccacccacaggatggagctgatcctgagcaccagccctgctgagctgaccctggaccctgcctgccagcccaagctgcccctggacagcacctgccagcctgagatgaccttcaaccctggccccacagagctgaccctggaccctgagcaccagcctgaggagaccccagcccccagcctggccgagctgaccctggagcctgtgcacagaagacctgagctgctggatgcctgtgccgacctgatcaatgaccagtggcccaggagcaggaccagccggctgcacagcctgggccagagcagtgatgccttccccctgtgcctgatgctgctgagcccccaccccaccctggaggccgcccctgtggtggtgggccacgcccggctgagccgggtgctgaaccagccccagagcctgctggtggagaccgtggtggtggcccgggccctgcggggccggggcttcggccggcggctgatggagggcctggaggtgtttgcccgggcccggggcttcaggaagctgcacctgaccacccatgaccaggtgcacttctacacccacctgggctaccagctgggggagcctgtgcagggcctggtgttcaccagccggcggctgcctgccaccctgctgaatgccttccccacagcccccagcccccggccccccaggaaggcccccaacctgacagcccaggccgccccccggggccccaagggcccccccctgcccccacctccacccctgcctgaatgtctgaccatcagcccccctgtgcccagcggcccccccagcaagagcctgctggagacccagtaccagaatgtgcggggccggcccatcttctggatggagaaggacatctag

SEQ ID NO: 173016 - DNA, 927 bp, Artificial Sequence
  derived and/or modified sequence
atgcaggagctgaccctgagccccggccccgccaagctgacccccactcttgatcccacgcaccgcatggagctcatactgtcgactagccctgctgagctgaccctcgatcctgcctgtcaacctaaacttccgctcgatagcacttgtcaaccggaaatgactttcaaccccggacctaccgagctaactctggaccctgaacatcagccagaggaaacccccgcacccagtctggccgaactgacgttggagccagtccatcgtaggcctgagctgttggatgcatgcgcggacctgattaatgaccagtggccgcggagccggacatcccggttgcactccttgggccagtcatcggacgccttccctctttgtctgatgctgctttcaccccaccccaccctcgaggctgcacctgtggtcgtcgggcatgcacgtctcagtcgcgttttgaatcagccgcagtccctgttggtcgagaccgtcgtggtagctcgtgctttacgaggtaggggctttggccgaagattgatggaggggttagaagtatttgctagggctagggggttcagaaaattacatctgactactcacgatcaggttcatttctacacccacctcggatatcagctgggagaacctgtacaggggctagtcttcacgagccgcagactgccagcaacgcttttgaacgccttccccaccgccccatcccccaggccaccaaggaaggcaccaaaccttacggctcaggccgcccctcgaggccccaaaggacccccactccctccacccccgccgctacccgaatgcttaaccatctcccccccagtaccctccggcccacctagcaagtccttacttgagacccagtaccagaatgtgagggggcggccgatattttggatggagaaagatatttag

SEQ ID NO: 173017 - DNA, 1330 bp, Artificial Sequence
  derived and/or modified sequence
aggggcgggttctaagcggcgacgcgcgggtgctgggaggccttagaacgccgtggcgtgccgcaggacgcgacggctgcagaacatccgccgcaccgctgggggccaacgttgtcggaccgaggagtccgaggtggcgactgagtgagatacccagctgtgcggagctaggacgcggaacatcccagaggccagcatcaacatgcaagagctgactctgagccctggcccagccaagctgacccctacactagaccctacacaccggatggagctgatcctgagtaccagcccagctgagctgactctggatcctgcgtgccagccaaagctgcccctggattccacatgccaaccagagatgaccttcaatcctggtccaactgagcttaccctggatcctgaacaccagccagaggagaccccagctcctagcctggctgagttgaccctggagcctgtgcaccgccgacccgagctcctggatgcttgtgctgacctcatcaatgatcagtggccccgcagccgcacctcccgcctgcactccctgggccagtcctcagatgccttccccctctgcctgatgctgctaagcccccaccccacacttgaagcagcacccgttgtggtgggccatgcccgcctgtcacgggtgctgaaccagccccagagcctcttagtggagacagtggtggtggcccgggccctgaggggccgtggctttggccgccgcctcatggagggcctggaggtctttgctcgggcccggggcttccgcaagctgcatctcaccacccatgaccaggtgcacttctatacccacctgggctaccagctgggtgagcctgtgcagggcctggtcttcaccagcagacggctgcctgccaccctgcttaatgccttccccacagccccctctccccggccacccaggaaggccccaaacctgactgcccaagctgccccaaggggtcccaagggacctccattgccaccaccccctcccctacctgagtgcctgaccatctcacccccagttccatcagggcccccttcaaaaagcctgctggagacacaatatcaaaatgtgagggggcgccccatattctggatggaaaaagacatctgaggccatccagggcaaggaactgtctttctggttcaatagactgccccgacagtctacaagcctcagcccactgaccatacctcagcccctagcccctggggggcagctttaacctgggcatgtttcctgggtaccagtggggccaggaggtggctctggctcagagccgtcagtgtggctgaataaaggctctcttgggta

SEQ ID NO: 173018 - DNA, 1163 bp, Artificial Sequence
  derived and/or modified sequence
gaccaaagggtgcggctgctgcagaggtggctgatgcaggcaagagctgactctgagccctggcccagccaagctgacccctacactagaccctacacaccggatggagctgatcctgagtaccagcccagctgagctgactctggatcctgcgtgccagccaaagctgcccctggattccacatgccaaccagagatgaccttcaatcctggtccaactgagcttaccctggatcctgaacaccagccagaggagaccccagctcctagcctggctgagttgaccctggagcctgtgcaccgccgacccgagctcctggatgcttgtgctgacctcatcaatgatcagtggccccgcagccgcacctcccgcctgcactccctgggccagtcctcagatgccttccccctctgcctgatgctgctaagcccccaccccacacttgaagcagcacccgttgtggtgggccatgcccgcctgtcacgggtgctgaaccagccccagagcctcttagtggagacagtggtggtggcccgggccctgaggggccgtggctttggccgccgcctcatggagggcctggaggtctttgctcgggcccggggcttccgcaagctgcatctcaccacccatgaccaggtgcacttctatacccacctgggctaccagctgggtgagcctgtgcagggcctggtcttcaccagcagacggctgcctgccaccctgcttaatgccttccccacagccccctctccccggccacccaggaaggccccaaacctgactgcccaagctgccccaaggggtcccaagggacctccattgccaccaccccctcccctacctgagtgcctgaccatctcacccccagttccatcagggcccccttcaaaaagcctgctggagacacaatatcaaaatgtgagggggcgccccatattctggatggaaaaagacatctgaggccatccagggcaaggaactgtctttctggttcaatagactgccccgacagtctacaagcctcagcccactgaccatacctcagcccctagcccctggggggcagctttaacctgggcatgtttcctgggtaccagtggggccaggaggtggctctggctcagagccgtcagtgtggctgaataaaggctctcttggg

SEQ ID NO: 173019 - DNA, 860 bp, Artificial Sequence
  derived and/or modified sequence
aggggcggatcctggggcttcctccctctagaccaaagggtgcggctgctgcagaggtggctgatgcagtggtggactaggaggactactggaagacagaaggccagcaagtagattgggtcggctgttttatagacctggtggttacagaccccctgtgaggggaggtcctgaggaggacaaatttgtagccagagcaggctggggccaggactcctaggttctgccccagccttaagcagctcatccatcactcccagcctccctccaatgtggggtagacacctggatctatctgccctgctctataggggatgggtctcttccaggtcacctgtgctatcaggtgagtgtgggacaaagtgcagcccaccactccccagttccagtatgcatggtcccccctgcactctgtcagcccttccctgctccaaccccaccctccctcctggcacagcccagcatggctgttatctacaggaggagagccactgtggtctgaagagatgctactgcctggagactggggtcttaacctccagcctggcactgagccacctgcaacctagcagcaggtgaccttggctcccagcctgactcagctgaacctggatcctgtgcataggcaagagctgactctgagccctggcccagccaagctgacccctacactagaccctacacaccggatggagctgatcctgagtaccagcccagctgagctgactctggatcctgcgtgccagccaaagctgcccctggattccacatgccaaccagagatgaccttcaatcctggtccaactgagcttaccctggatcctgaacaccagccagaggagaccccagctcctagcctg

SEQ ID NO: 173020 - DNA, 1464 bp, Artificial Sequence
  derived and/or modified sequence
aaaccaggggcgggttctaagcggcgacgcgcgggtgctgggaggccttagaacgccgtggcgtgccgcaggacgcgacggctgcagaacatccgccgcaccgctgggggccaacgttgtcggaccgaggagtccgaggtggcgactgagtgagatacccagctgtgcggagctaggacgcggaacatcccagaggccagcatcaacatgaggagagccactgtggtctgaagagatgctactgcctggagactggggtcttaacctccagcctggcactgagccacctgcaacctagcagcaggtgaccttggctcccagcctgactcagctgaacctggatcctgtgcataggcaagagctgactctgagccctggcccagccaagctgacccctacactagaccctacacaccggatggagctgatcctgagtaccagcccagctgagctgactctggatcctgcgtgccagccaaagctgcccctggattccacatgccaaccagagatgaccttcaatcctggtccaactgagcttaccctggatcctgaacaccagccagaggagaccccagctcctagcctggctgagttgaccctggagcctgtgcaccgccgacccgagctcctggatgcttgtgctgacctcatcaatgatcagtggccccgcagccgcacctcccgcctgcactccctgggccagtcctcagatgccttccccctctgcctgatgctgctaagcccccaccccacacttgaagcagcacccgttgtggtgggccatgcccgcctgtcacgggtgctgaaccagccccagagcctcttagtggagacagtggtggtggcccgggccctgaggggccgtggctttggccgccgcctcatggagggcctggaggtctttgctcgggcccggggcttccgcaagctgcatctcaccacccatgaccaggtgcacttctatacccacctgggctaccagctgggtgagcctgtgcagggcctggtcttcaccagcagacggctgcctgccaccctgcttaatgccttccccacagccccctctccccggccacccaggaaggccccaaacctgactgcccaagctgccccaaggggtcccaagggacctccattgccaccaccccctcccctacctgagtgcctgaccatctcacccccagttccatcagggcccccttcaaaaagcctgctggagacacaatatcaaaatgtgagggggcgccccatattctggatggaaaaagacatctgaggccatccagggcaaggaactgtctttctggttcaatagactgccccgacagtctacaagcctcagcccactgaccatacctcagcccctagcccctggggggcagctttaacctgggcatgtttcctgggtaccagtggggccaggaggtggctctggctcagagccgtcagtgtggctgaata

SEQ ID NO: 173021 - DNA, 1820 bp, Artificial Sequence
  derived and/or modified sequence
cggcgacgcgcgggtgctgggaggccttagaacgccgtggcgtgccgcaggacgcgacggctgcagaacatccgccgcaccgctgggggccaacgttgtcggaccgaggagtccgaggtggcgactgagtgagatacccagctgtgcggagctaggacgcggaacatcccagaggccagcatcaacattggtggactaggaggactactggaagacagaaggccagcaagtagattgggtcggctgttttatagacctggtggttacagaccccctgtgaggggaggtcctgaggaggacaaatttgtagccagagcaggctggggccaggactcctaggttctgccccagccttaagcagctcatccatcactcccagcctccctccaatgtggggtagacacctggatctatctgccctgctctataggggatgggtctcttccaggtcacctgtgctatcaggtgagtgtgggacaaagtgcagcccaccactccccagttccagtatgcatggtcccccctgcactctgtcagcccttccctgctccaaccccaccctccctcctggcacagcccagcatggctgttatctacaggaggagagccactgtggtctgaagagatgctactgcctggagactggggtcttaacctccagcctggcactgagccacctgcaacctagcagcaggtgaccttggctcccagcctgactcagctgaacctggatcctgtgcataggcaagagctgactctgagccctggcccagccaagctgacccctacactagaccctacacaccggatggagctgatcctgagtaccagcccagctgagctgactctggatcctgcgtgccagccaaagctgcccctggattccacatgccaaccagagatgaccttcaatcctggtccaactgagcttaccctggatcctgaacaccagccagaggagaccccagctcctagcctggctgagttgaccctggagcctgtgcaccgccgacccgagctcctggatgcttgtgctgacctcatcaatgatcagtggccccgcagccgcacctcccgcctgcactccctgggccagtcctcagatgccttccccctctgcctgatgctgctaagcccccaccccacacttgaagcagcacccgttgtggtgggccatgcccgcctgtcacgggtgctgaaccagccccagagcctcttagtggagacagtggtggtggcccgggccctgaggggccgtggctttggccgccgcctcatggagggcctggaggtctttgctcgggcccggggcttccgcaagctgcatctcaccacccatgaccaggtgcacttctatacccacctgggctaccagctgggtgagcctgtgcagggcctggtcttcaccagcagacggctgcctgccaccctgcttaatgccttccccacagccccctctccccggccacccaggaaggccccaaacctgactgcccaagctgccccaaggggtcccaagggacctccattgccaccaccccctcccctacctgagtgcctgaccatctcacccccagttccatcagggcccccttcaaaaagcctgctggagacacaatatcaaaatgtgagggggcgccccatattctggatggaaaaagacatctgaggccatccagggcaaggaactgtctttctggttcaatagactgccccgacagtctacaagcctcagcccactgaccatacctcagcccctagcccctggggggcagctttaacctgggcatgtttcctgggtaccagtggggccaggaggt

SEQ ID NO: 173022 - DNA, 765 bp, Artificial Sequence
  derived and/or modified sequence
agtcgttcgtttccagaccatgccgagccacacctgcccacagagtcgagctctcgaagtcctcattcccaaaagctccacagcctgtgacccactaggagggagggggaaaccgaggcccgggagagacggagaagccactctctgaggaccccggagccccgcccacagtgggtggggtcggcactgaaggggttaaggccgcggggaagccccgggctcagccctaggggcggatcctggggcttcctccctctagaccaaagggtgcggctgctgcagaggtggctgatgcaggaggagagccactgtggtctgaagagatgctactgcctggagactggggtcttaacctccagcctggcactgagccacctgcaacctagcagcaggtgaccttggctcccagcctgactcagctgaacctggatcctgtgcataggcaagagctgactctgagccctggcccagccaagctgacccctacactagaccctacacaccggatggagctgatcctgagtaccagcccagctgagctgactctggatcctgcgtgccagccaaagctgcccctggattccacatgccaaccagagatgaccttcaatcctggtccaactgagcttaccctggatcctgaacaccagccagaggagaccccagctcctagcctggctgagttgaccctggagcctgtgcaccgccgacccgagctcctggatgcttgtgctgacctcatcaatgatcagtggccccgcagcc

SEQ ID NO: 173023 - DNA, 583 bp, Artificial Sequence
  derived and/or modified sequence
aggggcggatcctggggcttcctccctctagaccaaagggtgcggctgctgcagaggtggctgatgcagtggtggactaggaggactactggaagacagaaggccagcaagtagattgggtcggctgttttatagacctggtggttacagaccccctgtgaggggaggtcctgaggaggacaaatttgtagccagagcaggctggggccaggactcctaggttctgccccagccttaagcagctcatccatcactcccagcctccctccaatgtggggtagacacctggatctatctgccctgctctataggggatgggtctcttccaggtcacctgtgctatcaggaggagagccactgtggtctgaagagatgctactgcctggagactggggtcttaacctccagcctggcactgagccacctgcaacctagcagcaggtgaccttggctcccagcctgactcagctgaacctggatcctgtgcataggcaagagctgactctgagccctggcccagccaagctgacccctacactagaccctacacaccggatggagctgatcctgagtaccagcccag

SEQ ID NO: 173024 - DNA, 927 bp, Artificial Sequence
  derived and/or modified sequence
atgcaggaactcacgctgtccccaggacctgctaaactgacccctaccttggacccaacccatagaatggaattaattctcagcaccagccccgctgagctgaccttagatcccgcttgtcagccaaaactccctctcgacagcacttgtcagccagagatgactttcaaccctggccctactgagcttaccctggatccagagcaccagcctgaggagacacccgctccttccctggcagaactcacactagaacccgtgcacaggcgccctgagctgctggatgcctgcgccgatctgatcaacgatcagtggccgcgttctaggacttcaaggctacattccctcggccagtcctctgacgcatttcctctgtgtctgatgctgctctctccacaccctactctggaggctgcacctgttgtggtaggacatgcgcgattatctagagtgctgaaccagccacagtccttgcttgtggagaccgtcgttgtagcacgggctttaagaggaaggggattcggcaggaggctcatggaggggctggaagtctttgccagggctaggggatttagaaaactccatttgactactcatgaccaggtacacttctacacacacctaggataccagttgggagaaccagtgcaagggctggtcttcacgagtaggcggctgcctgcgactctccttaacgccttccccacagccccatcccccaggcctcccagaaaagctccaaatctgactgcccaggctgcccctaggggtcctaagggtccacctcttcctccccctcctcctctaccagagtgcctaacaatttctcctccagtcccttccgggcctccatctaaatccctgctggaaacgcagtatcaaaacgtgcggggtagaccgattttctggatggagaaagatatttag

SEQ ID NO: 173025 - protein, 537 aa, Artificial Sequence
  derived and/or modified sequence
MAWRGAGPSVPGAPGGVGLSLGLLLQLLLLLGPARGFGDEEERRCDPIRISMCQNLGYNVTKMPNLVGHELQTDAELQLTTFTPLIQYGCSSQLQFFLCSVYVPMCTEKINIPIGPCGGMCLSVKRRCEPVLKEFGFAWPESLNCSKFPPQNDHNHMCMEGPGDEEVPLPHKTPIQPGEECHSVGTNSDQYIWVKRSLNCVLKCGYDAGLYSRSAKEFTDIWMAVWASLCFISTAFTVLTFLIDSSRFSYPERPIIFLSMCYNIYSIAYIVRLTVGRERISCDFEEAAEPVLIQEGLKNTGCAIIFLLMYFFGMASSIWWVILTLTWFLAAGLKWGHEAIEMHSSYFHIAAWAIPAVKTIVILIMRLVDADELTGLCYVGNQNLDALTGFVVAPLFTYLVIGTLFIAAGLVALFKIRSNLQKDGTKTDKLERLMVKIGVFSVLYTVPATCVIACYFYEISNWALFRYSADDSNMAVEMLKIFMSLLVGITSGMWIWSAKTLHTWQKCSNRLVNSGKVKREKRGNGWVKPGKGSETVV

SEQ ID NO: 173026 - DNA, 82 bp, Artificial Sequence
  derived and/or modified sequence
ccacataaaacaaaactacaagacaatgataaagttcacaacattaacacaatcagtaatggaaaagcctagtcaatggcag

SEQ ID NO: 173027 - DNA, 7383 bp, Artificial Sequence
  derived and/or modified sequence
gctgcgcagcgctggctgctggctggcctcgcggagacgccgaacggacgcggccggcgccggcttgtgggctcgccgcctgcagccatgaccctcgcagcctgtccctcggcctcggcccgggacgtctaaaatcccacacagtcgcgcgcagctgctggagagccggccgctgccccctcgtcgccgcatcacactcccgtcccgggagctgggagcagcgcgggcagccggcgcccccgtgcaaactgggggtgtctgccagagcagccccagccgctgccgctgctacccccgatgctggccatggcctggcggggcgcagggccgagcgtcccgggggcgcccgggggcgtcggtctcagtctggggttgctcctgcagttgctgctgctcctggggccggcgcggggcttcggggacgaggaagagcggcgctgcgaccccatccgcatctccatgtgccagaacctcggctacaacgtgaccaagatgcccaacctggttgggcacgagctgcagacggacgccgagctgcagctgacaactttcacaccgctcatccagtacggctgctccagccagctgcagttcttcctttgttctgtttatgtgccaatgtgcacagagaagatcaacatccccattggcccatgcggcggcatgtgtctttcagtcaagagacgctgtgaacccgtcctgaaggaatttggatttgcctggccagagagtctgaactgcagcaaattcccaccacagaacgaccacaaccacatgtgcatggaagggccaggtgatgaagaggtgcccttacctcacaaaacccccatccagcctggggaagagtgtcactctgtgggaaccaattctgatcagtacatctgggtgaaaaggagcctgaactgtgtgctcaagtgtggctatgatgctggcttatacagccgctcagccaaggagttcactgatatctggatggctgtgtgggccagcctgtgtttcatctccactgccttcacagtactgaccttcctgatcgattcttctaggttttcctaccctgagcgccccatcatatttctcagtatgtgctataatatttatagcattgcttatattgtcaggctgactgtaggccgggaaaggatatcctgtgattttgaagaggcagcagaacctgttctcatccaagaaggacttaagaacacaggatgtgcaataattttcttgctgatgtacttttttggaatggccagctccatttggtgggttattctgacactcacttggtttttggcagcaggactcaaatggggtcatgaagccattgaaatgcacagctcttatttccacattgcagcctgggccatccccgcagtgaaaaccattgtcatcttgattatgagactggtggatgcagatgaactgactggcttgtgctatgttggaaaccaaaatctcgatgccctcaccgggttcgtggtggctcccctctttacttatttggtcattggaactttgttcattgctgcaggtttggtggccttgttcaaaattcggtcaaatcttcaaaaggatgggacaaagacagacaagttagaaagactgatggtcaagattggggtgttctcagtactgtacacagttcctgcaacgtgtgtgattgcctgttatttttatgaaatctccaactgggcactttttcggtattctgcagatgattccaacatggctgttgaaatgttgaaaatttttatgtctttgttggtgggcatcacttcaggcatgtggatttggtctgccaaaactcttcacacgtggcagaagtgttccaacagattggtgaattctggaaaggtaaagagagagaagagaggaaatggttgggtgaagcctggaaaaggcagtgagactgtggtataaggctagtcagcctccatgctttcttcattttgaaggggggaatgccagcattttggaggaaattctactaaaagttttatgcagtgaatctcagtttgaacaaactagcaacaattaagtgacccccgtcaacccactgcctcccaccccgaccccagcatcaaaaaaccaatgattttgctgcagactttggaatgatccaaaatggaaaagccagttagaggctttcaaagctgtgaaaaatcaaaacgttgatcactttagcaggttgcagcttggagcgtggaggtcctgcctagattccaggaagtccagggcgatactgttttcccctgcagggtgggatttgagctgtgagttggtaactagcagggagaaatattaacttttttaaccctttaccattttaaatactaactgggtctttcagatagcaaagcaatctataaacactggaaacgctgggttcagaaaagtgttacaagagttttatagtttggctgatgtaacataaacatcttctgtggtgcgctgtctgctgtttagaactttgtggactgcactcccaagaagtggtgttagaatctttcagtgcctttgtcataaaacagttatttgaacaaacaaaagtactgtactcacacacataaggtatccagtggatttttcttctctgtcttcctctcttaaatttcaacatctctcttcttggctgctgctgttttcttcattttatgttaatgactcaaaaaaggtatttttatagaatttttgtactgcagcatgcttaaagaggggaaaaggaagggtgattcactttctgacaatcacttaattcagaggaaaatgagatttactaagttgacttacctgacggaccccagagacctattgcattgagcagtggggacttaatatattttacttgtgtgattgcatctatgcagacgccagtctggaagagctgaaatgttaagtttcttggcaactttgcattcacacagattagctgtgtaatttttgtgtgtcaattacaattaaaagcacattgttggaccatgacatagtatactcaactgactttaaaactatggtcaacttcaacttgcattctcagaatgatagtgcctttaaaaatttttttattttttaaagcataagaatgttatcagaatctggtctacttaggacaatggagactttttcagttttataaagggaactgaggacagctaatccaactacttggtgcgtaattgtttcctagtaattggcaaaggctccttgtaagatttcactggaggcagtgtggcctggagtatttatatggtgcttaatgaatctccagaatgccagccagaagcctgattggttagtagggaataaagtgtagaccatatgaaatgaactgcaaactctaatagcccaggtcttaattgcctttagcagaggtatccaaagcttttaaaatttatgcatacgttcttcacaagggggtacccccagcagcctctcgaaaattgcacttctcttaaaactgtaactggcctttctcttaccttgccttaggcgttctaatcatgagatcttggggacaaattgactatgtcacaggttgctctccttgtaactcatacctgtctgcttcagcaactgctttgcaatgacatttatttattaattcatgccttaaaaaaataggaagggaagcttttttttttctttttttttttttcaatcacactttgtggaaaaacatttccagggactcaaaattccaaaaaggtggtcaaattctggaagtaagcatttcctcttttttaaaaatttggtttgagccttatgcccatagtttgacatttccctttcttctttcctttttgtttttgtgtggttcttgagctctctgacatcaagatgcatgtaaagtcgattgtatgttttggaaggcaaagtcttggcttttgagactgaagttaagtgggcacaggtggcccctgctgctgtgcccagtctgagtaccttggctagactctaggtcaggctccaggagcatgagaattgatccccagaagaaccattttaactccatctgatactccattgcctatgaaatgtaaaatgtgaactccctgtgctgcttgtagacagttcccataactgtccacggccctggagcacgcacccaggggcagagcctgcccttactcacgctctgctctggtgtcttgggagttgtgcagggactctggcccaggcaggggaaggaagaccaggcggtaggggactggtcttgctgttagagtatagaggtttgtaatgcagttttcttcataatgtgtcagtgattgtgtgaccaaggcagcatctagcagaaagccaggcatggagtaggtgatcgatacttgtcaatgactaaataataacaataaaagagcacttgggtgaatctgggcacctgatttctgagttttgagttctggagctagtgttttgacaatgctttgggttttgacatgccttttccacaaatctcttgccttttcagggcaaagtgtatttgatcagaagtggccatttggattagtagccttagcaatgctacagggttataggcctctcctttcacattccagacaatggagagtgtttatggtttcaggaaaagaactttgtggctgaggggtcagttaccagtgaccttcaatcaactccatcacttcttaaatcggtatttgttaaaaaaatcagttattttatttattgagtgccgactgtagtaaagccctgaaatagataatctctgttcttctaactgatctaggatggggacgcacccaggtctgctgaactttactgttcctctgggaaaggagcagggacctctggaattcccatctgtttcactgtctccattccataaatctcttcctgtgtgagccaccacacccagcctgggtctctctacttttaacacatctctcatccctttcccaggattccttccaagtcagttacaggtggttttaacagaaagcatcagctctgcttcgtgacagtctctggagaaatcccttaggaagactatgagagtaggccacaaggacatgggcccacacatctgctttggctttgccggcaattcagggcttggggtattccatgtgacttgtataggtatatttgaggacagcatcttgctagagaaaaggtgagggttgtttttctttctctgaaacctacagtaaatgggtatgattgtagcttcctcagaaatcccttggcctccagagattaaacatggtgcaatggcacctctgtccaacctcctttctggtagattcctttctcctgcttcatataggccaaacctcagggcaagggaacatgggggtagagtggtgctggccagaaccatctgcttgagctacttggttgattcatatcctctttcctttatggagacccatttcctgatctctgagactgttgctgaactggcaacttacttgggcctgaaactggagaaggggtgacatttttttaatttcagagatgctttctgattttcctctcccaggtcactgtctcacctgcactctccaaactcaggttccgggaagcttgtgtgtctagatactgaattgagattctgttcagcaccttttagctctatactctctggctcccctcatcctcatggtcactgaattaaatgcttattgtattgagaaccaagatgggacctgaggacacaaagatgagctcaacagtctcagccctagaggaatagactcagggatttcaccaggtcggtgcagtatttgatttctggtgaggtgaccacagctgcagttagggaagggagccattgagcacagactttggaaggaaccttttttttgttgtttgtttgtttgtttgtttgtttgtttgtttgagacagggtcttgctctgtcacccaggctggggcgcaatggcacgatcttggctcactgcaacctctgcctcctgggttcaagtgattctcctgccacagcctcctgaggagctgggactacaggtgcgtgctaccacgcccagctacttctgtatttttagtagagacggggtttcactgtgttggccaggctggtctcgaactcctgacctcatgatctgcccgcctcagcctcccaaagtgctgggattacaagtgtgagccaccacacctggcctggaaggaacctcttaaaatcagtttacgtcttgtattttgttctgtgatggaggacactggagagagttgctattccagtcaatcatgtcgagtcactggactctgaaaatcctattggttcctttattttatttgagtttagagttcccttctgggtttgtattatgtctggcaaatgacctgggttatcacttttcctccagggttagatcatagatcttggaaactccttagagagcattttgctcctaccaaggatcagatactggagccccacataatagatttcatttcactctagcctacatagagctttctgttgctgtctcttgccatgcacttgtgcggtgattacacacttgacagtaccaggagacaaatgacttacagatcccccgacatgcctcttccccttggcaagctcagttgccctgatagtagcatgtttctgtttctgatgtaccttttttctcttcttctttgcatcagccaattcccagaatttccccaggcaatttgtagaggacctttttggggtcctatatgagccatgtcctcaaagcttttaaacctccttgctctcctacaatattcagtacatgaccactgtcatcctagaaggcttctgaaaagaggggcaagagccactctgcgccacaaaggttgggtccatcttctctccgaggttgtgaaagttttcaaattgtactaataggctggggccctgacttggctgtgggctttgggaggggtaagctgctttctagatctctcccagtgaggcatggaggtgtttctgaattttgtctacctcacagggatgttgtgaggcttgaaaaggtcaaaaaatgatggccccttgagctctttgtaagaaaggtagatgaaatatcggatgtaatctgaaaaaaagataaaatgtgacttcccctgctctgtgcagcagtcgggctggatgctctgtggcctttcttgggtcctcatgccaccccacagctccaggaaccttgaagccaatctgggggactttcagatgtttgacaaagaggtaccaggcaaacttcctgctacacatgccctgaatgaattgctaaatttcaaaggaaatggaccctgcttttaaggatgtacaaaagtatgtctgcatcgatgtctgtactgtaaatttctaatttatcactgtacaaagaaaaccccttgctatttaattttgtattaaaggaaaataaagttttgtttgtta

SEQ ID NO: 173028 - DNA, 1614 bp, Artificial Sequence
  derived and/or modified sequence
atggcttggaggggcgctggcccctcggtgcctggggctccaggaggcgtcgggctcagtcttggtctactgctgcagctgctacttctgcttggtcccgcaagggggtttggcgacgaggaagagagaaggtgcgaccctatcagaatttctatgtgccagaatttaggatataacgttactaaaatgcctaacctggtgggacacgaactacaaacagatgccgaactgcagctaacaacttttactcccctgatccagtacggatgttcgagtcagttacagttcttcttgtgtagtgtgtacgtgccaatgtgtacggaaaagatcaatatccctatcggcccctgtgggggaatgtgcctgtctgtgaagcggagatgcgagccagtcctaaaggaatttggtttcgcctggcctgaatccctaaattgttcaaaatttccccctcagaatgaccataaccacatgtgtatggagggtccaggcgacgaggaagttcccctccctcataaaaccccaatccagccaggagaggaatgtcactctgtcggcactaattctgatcaatacatttgggtgaagcgttcattaaactgcgtcttgaagtgcggatacgatgctgggctgtacagcaggtctgcgaaggaattcactgacatctggatggctgtttgggctagcttgtgctttatctccaccgcctttactgtgcttaccttcctgatagatagctctaggttttcttatcctgagagaccaatcatcttcctctctatgtgttacaacatttattctattgcatatatcgtgagacttactgtaggacgcgagcgtatttcttgtgatttcgaggaagcggctgaaccagtgctcattcaggagggcctcaagaataccggctgtgccatcatttttctcctgatgtactttttcgggatggcgtcgtctatttggtgggtcattctgacccttacttggtttctcgccgccggactgaagtggggacatgaagccatcgagatgcactctagttactttcatattgctgcatgggccatccctgccgtgaagacgatcgtcattctgatcatgagattggttgacgccgacgagcttactggactgtgctatgtgggaaaccaaaatctcgacgctcttacaggcttcgtcgttgctcctttgtttacctatctggtcatcgggactctcttcatcgctgccggtcttgtggctttattcaagattcgatcgaatctacagaaagacgggaccaagactgacaaattagagaggttaatggtgaaaattggggtcttttccgtgctgtacaccgtgcccgctacatgcgtgatcgcctgttatttctacgaaatctccaattgggctctgtttcgctactcagccgatgattcgaacatggctgttgagatgctgaagatttttatgagtctccttgtggggattactagcggaatgtggatttggtctgctaagaccctgcacacatggcagaagtgcagcaataggctcgtgaacagcggcaaggtcaagcgcgagaaaagaggcaatggctgggtaaaacctggcaaaggttccgaaacagtggtatag

SEQ ID NO: 173029 - DNA, 1614 bp, Artificial Sequence
  derived and/or modified sequence
atggcctggaggggggccggccccagcgtgcctggggcccctgggggcgtgggcctgagcctgggcctgctgctgcagctgctgctgctgctgggccctgcccggggctttggagatgaggaggagcggcgctgtgaccccatccgcatctccatgtgccagaacctgggctacaacgtgaccaagatgcccaacctggtgggccacgagctgcagacagatgctgagctgcagctgaccaccttcacccccctcatccagtatggctgcagcagccagctgcagttcttcctgtgcagcgtgtatgtgcccatgtgcacagagaagatcaacatccccatcggcccctgtggcggcatgtgcctgtctgtgaagaggcgctgtgagcctgtgctgaaggagtttggatttgcctggccagagagcctgaactgcagcaagtttcctccccagaatgaccacaaccacatgtgcatggagggccctggagatgaggaggtgcccctgccccacaagacccccatccagcctggagaggagtgccacagcgtgggcaccaacagcgaccagtacatctgggtgaagaggagcctgaactgtgtgctgaagtgtggctatgatgctggcctgtacagccgcagcgccaaggagttcacagacatctggatggctgtgtgggccagcctgtgcttcatcagcacagccttcaccgtgctgaccttcctgattgacagcagccgcttctcctacccagagcggcccatcatcttcctgtccatgtgctacaacatctacagcatcgcctacatcgtgcggctgactgtgggccgggagcgcatcagctgtgactttgaggaggccgctgagcctgtgctgatccaggagggcctgaagaacacaggctgtgccatcatcttcctgctgatgtacttcttcggcatggccagcagcatctggtgggtgatcctgaccctgacctggttcctggccgccggcctgaagtggggccacgaggccatcgagatgcacagcagctacttccacatcgccgcctgggccatcccagctgtgaagaccatcgtcatcctgatcatgaggctggtggatgctgatgagctgaccggcctgtgctacgtgggcaaccagaacctggatgccctgaccggctttgtggtggcccccctcttcacctacctggtgattggcaccctcttcatcgccgccggcctggtggccctcttcaagatccgcagcaacctgcagaaggatggcaccaagacagacaagctggagcggctgatggtgaagattggagtcttctctgtgctgtacacagtgcctgccacctgtgtgattgcctgctacttctatgagatcagcaactgggccctcttccgctacagcgcagatgacagcaacatggctgtggagatgctgaagatcttcatgagcctgctggtgggcatcaccagcggcatgtggatctggagcgccaagaccctgcacacctggcagaagtgcagcaaccggctggtgaacagcggcaaggtgaagcgggagaagagaggaaatggctgggtgaagccaggaaaaggaagtgaaacagtggtgtag

SEQ ID NO: 173030 - DNA, 1614 bp, Artificial Sequence
  derived and/or modified sequence
atggcctggcggggcgccggccccagcgtgcccggcgcccccggcggggtcggcctctccttaggccttctgctgcaattactgctgctgctagggccagcaagaggttttggagacgaagaggaacgtcgctgcgacccaattagaatatcaatgtgtcagaacctgggctataatgtcactaagatgcctaaccttgtaggccatgaacttcaaaccgacgcagaactgcaactgacgacatttactcctttgattcagtatgggtgctcttcccaactgcagtttttcctgtgttccgtgtacgtgccaatgtgcaccgagaaaatcaatattcccatcggcccttgcggtgggatgtgcttatctgtgaagcgccgatgcgagccggtgctcaaggaattcgggttcgcttggccagagagcctgaactgtagtaaattccccccacagaatgatcataatcatatgtgcatggagggaccaggggacgaggaggttccgttaccgcacaaaacacccattcaaccaggcgaagagtgccattccgtggggacaaactcagaccagtacatctgggtgaaacgctccctcaactgcgtcctgaagtgcgggtacgacgccgggctgtacagcagaagtgctaaagaatttaccgacatttggatggcagtgtgggcgtcactgtgcttcatcagcacagccttcacagtgcttacctttctgattgactcttcccgattctcctaccctgagcgacctatcattttcctcagcatgtgttataacatatacagcatcgcttacattgtgcgattgacagtcggtcgcgaacgtattagttgtgattttgaagaggcagcggagccagtgttaatccaggaggggctcaagaacaccggctgtgcgattatttttctcctaatgtatttcttcggtatggcaagctcaatttggtgggtgatcctgacactgacgtggttcttagccgccggtttaaagtgggggcatgaagccatcgagatgcactcttcttacttccatatagcggcttgggccattcccgcagtgaagacaatagtcatcctaatcatgcggcttgtggacgctgacgaactgacgggactttgctacgtggggaaccagaacttagatgccctcacagggttcgtggttgcgccactgtttacttatctggtcattgggactctgttcatcgcagctggcctggtggcccttttcaaaattaggtccaacttacagaaagacggaaccaagacggataaacttgagcgtttgatggtgaagataggtgtgttcagcgtgctctacactgtccctgcaacatgtgtgattgcttgttatttctatgagatctccaactgggcccttttcaggtattcggctgatgactctaacatggcggtggagatgctaaagatcttcatgtccctgttggttgggatcaccagcggcatgtggatttggtctgctaaaacactccatacttggcagaaatgctcaaataggctcgtgaatagcggcaaagtgaagcgcgaaaaacgtgggaatgggtgggtgaagcccggcaaaggttccgaaactgtcgtgtag

SEQ ID NO: 173031 - DNA, 1614 bp, Artificial Sequence
  derived and/or modified sequence
atggcctggcggggtgccggtccatcagtccccggagcacccggtggcgtgggcctctcactgggcctattgttgcagctccttttgttactcgggccagcacgcggattcggagacgaggaggagagacgttgtgatccaattcgcattagtatgtgtcaaaacctgggttataacgtaaccaagatgcctaacctggtaggccacgagcttcagacagatgctgagttacagctaactacctttacgcctctgattcagtacggctgctctagtcagctgcagttctttttgtgcagcgtgtatgtgccaatgtgcaccgaaaagatcaacattccaatcgggccatgtggtggaatgtgtctgagcgtgaagaggcgatgtgagccagttttaaaggaatttggtttcgcctggcctgagagcctcaactgctcgaaatttccgcctcagaatgaccacaaccatatgtgcatggaagggcctggcgacgaagaggtgcctctcccccataagacgcctattcagcctggcgaagagtgccatagtgttggcaccaactcagatcagtacatttgggtcaaacgcagtctgaactgtgttctcaagtgtggttacgatgccggattgtattctcgttctgctaaagagttcaccgatatttggatggctgtttgggcgtccctttgcttcatctctacggccttcaccgtactgacattcctcattgactcctctcgcttctcctaccccgagcggcctatcatcttcctgagtatgtgctacaatatctacagcattgcgtacattgttagactcacggttggcagagaacggatctcctgtgactttgaagaggccgcagaaccagtcctgatacaagaagggcttaaaaacaccggctgcgcgattattttccttctcatgtacttcttcggcatggcctcaagcatctggtgggtcatcctgacacttacttggttcctcgcggcagggctgaagtggggacacgaagccattgagatgcactctagctactttcacattgccgcttgggcaatccctgctgttaaaacaatcgtcatcctgatcatgcgcctagtcgacgctgacgaactgaccgggctgtgttatgtcggcaatcaaaacctggacgcgctgacaggttttgtggtggcacccctgttcacctaccttgtgatcgggaccttattcatcgccgctgggcttgtggctcttttcaagataagaagtaacctacagaaggacggtacgaaaaccgacaaactggagcgactgatggtgaaaatcggcgtgttcagcgtgttgtatactgtgccggcaacctgcgtgattgcatgctatttctacgaaatttctaactgggcgttgttccgctattcggccgacgacagtaatatggctgtagagatgctgaaaatcttcatgagccttctggtgggcattacttccggaatgtggatatggagcgcaaagactctccatacgtggcagaagtgcagcaacaggttggtgaactctggcaaggtgaagagggaaaaacgcggaaatggatgggtgaaacctgggaaggggtcggaaaccgttgtttag

SEQ ID NO: 173032 - DNA, 1614 bp, Artificial Sequence
  derived and/or modified sequence
atggcctggagaggcgccggccccagcgtgcccggcgcccccggcggcgtgggcctgagcctgggcctgctgctgcagctgctgctgctgctgggccccgccagaggcttcggcgacgaggaggagagaagatgcgaccccatcagaatcagcatgtgccagaacctgggctacaacgtgaccaagatgcccaacctggtgggccacgagctgcagaccgacgccgagctgcagctgaccaccttcacccccctgatccagtacggctgcagcagccagctgcagttcttcctgtgcagcgtgtacgtgcccatgtgcaccgagaagatcaacatccccatcggcccctgcggcggcatgtgcctgagcgtgaagagaagatgcgagcccgtgctgaaggagttcggcttcgcctggcccgagagcctgaactgcagcaagttccccccccagaacgaccacaaccacatgtgcatggagggccccggcgacgaggaggtgcccctgccccacaagacccccatccagcccggcgaggagtgccacagcgtgggcaccaacagcgaccagtacatctgggtgaagagaagcctgaactgcgtgctgaagtgcggctacgacgccggcctgtacagcagaagcgccaaggagttcaccgacatctggatggccgtgtgggccagcctgtgcttcatcagcaccgccttcaccgtgctgaccttcctgatcgacagcagcagattcagctaccccgagagacccatcatcttcctgagcatgtgctacaacatctacagcatcgcctacatcgtgagactgaccgtgggcagagagagaatcagctgcgacttcgaggaggccgccgagcccgtgctgatccaggagggcctgaagaacaccggctgcgccatcatcttcctgctgatgtacttcttcggcatggccagcagcatctggtgggtgatcctgaccctgacctggttcctggccgccggcctgaagtggggccacgaggccatcgagatgcacagcagctacttccacatcgccgcctgggccatccccgccgtgaagaccatcgtgatcctgatcatgagactggtggacgccgacgagctgaccggcctgtgctacgtgggcaaccagaacctggacgccctgaccggcttcgtggtggcccccctgttcacctacctggtgatcggcaccctgttcatcgccgccggcctggtggccctgttcaagatcagaagcaacctgcagaaggacggcaccaagaccgacaagctggagagactgatggtgaagatcggcgtgttcagcgtgctgtacaccgtgcccgccacctgcgtgatcgcctgctacttctacgagatcagcaactgggccctgttcagatacagcgccgacgacagcaacatggccgtggagatgctgaagatcttcatgagcctgctggtgggcatcaccagcggcatgtggatctggagcgccaagaccctgcacacctggcagaagtgcagcaacagactggtgaacagcggcaaggtgaagagagagaagagaggcaacggctgggtgaagcccggcaagggcagcgagaccgtggtgtag

SEQ ID NO: 173033 - protein, 217 aa, Artificial Sequence
  derived and/or modified sequence
MAYPGYGGGFGNFSIQVPGMQMGQPVPETGPAILLDGYSGPAYSDTYSSAGDSVYTYFSAVAGQDGEVDAEELQRCLTQSGINGTYSPFSLETCRIMIAMLDRDHTGKMGFNAFKELWAALNAWKENFMTVDQDGSGTVEHHELRQAIGLMGYRLSPQTLTTIVKRYSKNGRIFFDDYVACCVKLRALTDFFRKRDHLQQGSANFIYDDFLQGTMAI

SEQ ID NO: 173034 - DNA, 654 bp, Artificial Sequence
  derived and/or modified sequence
atggcctaccccggctacggcggcggcttcggcaacttcagcatccaggtgcccggcatgcagatgggccagcccgtgcccgagaccggccccgccatcctgctggacggctacagcggccccgcctacagcgacacctacagcagcgccggcgacagcgtgtacacctacttcagcgccgtggccggccaggacggcgaggtggacgccgaggagctgcagagatgcctgacccagagcggcatcaacggcacctacagccccttcagcctggagacctgcagaatcatgatcgccatgctggacagagaccacaccggcaagatgggcttcaacgccttcaaggagctgtgggccgccctgaacgcctggaaggagaacttcatgaccgtggaccaggacggcagcggcaccgtggagcaccacgagctgagacaggccatcggcctgatgggctacagactgagcccccagaccctgaccaccatcgtgaagagatacagcaagaacggcagaatcttcttcgacgactacgtggcctgctgcgtgaagctgagagccctgaccgacttcttcagaaagagagaccacctgcagcagggcagcgccaacttcatctacgacgacttcctgcagggcaccatggccatctag

SEQ ID NO: 173035 - DNA, 654 bp, Artificial Sequence
  derived and/or modified sequence
atggcataccctggttatggagggggttttgggaatttttcaatacaggtgcccggcatgcagatgggacagcccgtccccgagactgggcctgctatcctcttggacgggtacagcggaccagcttattcagacacatattcatcagccggggacagtgtgtatacatatttctctgccgtggctggtcaggatggagaggtggacgcagaagagcttcagcgctgccttacgcagtctggcattaacggcacatacagtccgtttagtttagagacctgtcgtattatgatcgcaatgctggacagagaccatactgggaaaatgggatttaatgccttcaaggagctttgggctgcgctcaatgcctggaaggaaaatttcatgacagtagaccaagacggctccggtaccgtggaacaccatgagctgcggcaggcaattggccttatgggataccggctttcaccacagacgttgaccactatagtgaagagatatagtaaaaacggcaggattttttttgacgattacgtagcctgttgcgtcaaactgagagccttgaccgactttttccggaagagagatcacctgcagcaaggatccgctaactttatttacgacgatttcctccagggtaccatggctatttag

SEQ ID NO: 173036 - DNA, 1992 bp, Artificial Sequence
  derived and/or modified sequence
ggcctgcggaagggggcgggttcggaggagtgaactgtgcggttagtgcgcctttcagcctcacctgcagctgcgcctccttgcacctgcgcctgtgctttttctcccagcactgcggacgcgactcgagggtgacgctcgctccgctcgtcccgctcgtcatggcctacccgggatacggaggagggtttggaaattttagcattcaggtgccaggaatgcagatgggacagccagtgccagaaacaggcccagctatactcctcgatggatactctgggccagcatattcagacacttattcctcagctggtgactccgtgtatacttacttcagtgctgttgctggacaggatggtgaagtggatgctgaagaacttcagagatgtttgacacagtctggaattaatggaacttactctcccttcagtttggaaacctgcagaattatgattgccatgttggatagagatcacacaggaaaaatgggatttaatgcattcaaagagctatgggcagctcttaatgcctggaaggaaaacttcatgactgttgatcaagatggaagtggcacagtagaacatcatgagttgcgtcaagccattggtcttatgggttataggttgagtcctcaaacattaactactattgttaaacgttatagcaagaatggcagaattttctttgatgattatgttgcttgctgtgtgaagcttcgagcattgacagatttctttaggaaaagagaccacttgcaacaagggtctgcgaatttcatatatgacgattttttgcagggcactatggcaatttgaatgcttagaattttaaacctgaagagacactgtgaattcttttgtttggaagaagtgaactggactactttaaaacttttaagggttttctatgttcttcctacctgttaaacctcttccctttctgtgtgtttttattttagcagatagttcaaagcaataaaagatttcttttttaatttgaggtattactgcttttggaaaagttattttataaatatgtgcatattgtcataaaatattgtatgattaattgatttaaataatgcttagccttaattttagataatgtaaatttagaggaatgtactttacaagatagattgtataagaagccaaataatgaaagcctagaaaaaactaatttatacttatctgaaggttacaaattagacttttaaattttctttgtagttggtggtgtttgagggttggctagaaatgaaagcctggattttgtgccatgtttgtaatatagtttgttccttgatcaaataatcagagaaaagaaacttaaagatctttgtctgtgaagaagaaaattatctccctagttcaatctgtagtgaaataagactacagaaggcattgttttttccttttttattttttgtattatatatttttcttaaatatgttttattgtcttctctaagcaaaaagttcttaataaacatagtatttctctctgcgtcctatttcattagtgaagacatagttcacctaaaatggcatcctgctctgaatctagactttttagaaatggcatatgtttttgatgatatgtcaacattcaaaattgtcctaattaaattgttgtttaaatgtaatgtcaactctttataaacttaaaaataaacaagtaattaaccactctaattgttcagaaattttacatttgacttatttgacaacattaacattagtggtggctttgccattaaaaacccagtaagtattttgagtgcatctatgtgatgtggtgttttgagcatagtaggcaccacagcaacttttctgcgtggtactaaaactgccgaaaatgcgacgtagaatcaccagatctttagtgtttaatatccctggtataagatgttataattaatgtaatttctttcttggcaaacacctcatgtctgtcttagtgaagatttaataaaccacttatttttcttat

SEQ ID NO: 173037 - DNA, 654 bp, Artificial Sequence
  derived and/or modified sequence
atggcctacccaggctacggcggcggcttcggcaacttcagcatccaggtgcccggcatgcagatgggccagcctgtgcctgagactggacctgccatcctgctggatggctacagcggccctgcctacagcgacacctacagcagcgctggggacagcgtgtacacctacttctctgctgtggccggccaggatggagaggtggatgctgaggagctgcagcgctgcctgacccagagcggcatcaatggcacctacagccccttcagcctggagacctgccgcatcatgattgccatgctggaccgggaccacacaggcaagatgggcttcaatgccttcaaggagctgtgggccgccctgaatgcctggaaggagaacttcatgacagtggaccaggacggcagcggcaccgtggagcaccacgagctgcggcaggccatcggcctgatgggctaccgcctgagcccccagaccctgaccaccatcgtgaagcgctacagcaagaatggccgcatcttctttgatgattatgtggcctgctgcgtgaagctgcgggccctgacagacttcttcaggaagagggaccacctgcagcagggcagcgccaacttcatctatgatgacttcctgcagggcaccatggccatctag

SEQ ID NO: 173038 - DNA, 654 bp, Artificial Sequence
  derived and/or modified sequence
atggcctaccccggctacggcggcggcttcggcaacttcagcatccaggtgcctggaatgcagatgggccaacccgtgcctgagaccgggcctgctattctgttagatggttattccggacctgcctattcggatacatattcatctgccggagatagcgtctacacatatttcagcgccgttgcagggcaggatggcgaggtcgacgccgaagagctccagagatgtcttacgcagtctgggattaacgggacctattctcctttttctttagaaacttgcaggatcatgattgcaatgctcgatcgggatcatactggcaagatgggattcaacgctttcaaagaactctgggccgccctgaatgcttggaaggaaaacttcatgactgtcgaccaggatggaagtgggacagttgagcatcacgagcttcgtcaagccatcggtctcatggggtaccgcttatctccccaaacactgactactattgtgaagcggtatagtaaaaatgggagaatttttttcgacgactacgtagcatgttgcgtgaaactgagggcactgacagatttttttcggaaacgggaccatctgcagcagggctctgcgaatttcatatacgatgactttcttcagggtacaatggccatctag

SEQ ID NO: 173039 - DNA, 654 bp, Artificial Sequence
  derived and/or modified sequence
atggcttacccgggttatggtggaggtttcgggaatttttcgattcaggtgccagggatgcaaatgggtcagccagtgccagaaactgggccagccatcttattggacggatattctggtccagcctatagtgacacctactcatcggctggcgacagtgtgtatacatacttctccgctgtcgcaggccaagacggagaagtggatgccgaagaactccagcgttgcctgacccaaagcgggataaacggcacatacagcccctttagcttagaaacctgtcgcataatgatcgcaatgctggatagggatcacaccggcaagatgggctttaatgcgtttaaggagttatgggctgctctgaacgcgtggaaagaaaactttatgacagtggatcaagacggcagcggtacagttgagcaccacgagttaagacaggccatcggcctcatgggttatcggctgagtccccagacgctgacgactatcgttaaacgatattccaaaaatggcaggattttcttcgacgactacgtggcttgttgtgtgaagctgagagcgttaacggatttcttccggaagagagatcacttacagcaaggctccgccaacttcatctacgatgactttctgcagggaaccatggccatctag

SEQ ID NO: 173040 - protein, 335 aa, Artificial Sequence
  derived and/or modified sequence
MKLKLKNVFLAYFLVSIAGLLYALVQLGQPCDCLPPLRAAAEQLRQKDLRISQLQAELRRPPPAPAQPPEPEALPTIYVVTPTYARLVQKAELVRLSQTLSLVPRLHWLLVEDAEGPTPLVSGLLAASGLLFTHLVVLTPKAQRLREGEPGWVHPRGVEQRNKALDWLRGRGGAVGGEKDPPPPGTQGVVYFADDDNTYSRELFEEMRWTRGVSVWPVGLVGGLRFEGPQVQDGRVVGFHTAWEPSRPFPVDMAGFAVALPLLLDKPNAQFDSTAPRGHLESSLLSHLVDPKDLEPRAANCTRVLVWHTRTEKPKMKQEEQLQRQGRGSDPAIEV

SEQ ID NO: 173041 - DNA, 1008 bp, Artificial Sequence
  derived and/or modified sequence
atgaagctgaaactcaaaaacgtattcctcgcatacttcttggtgtccatcgctgggctcttgtatgcactggtgcagctgggacaaccgtgcgattgcctgccccccctcagagccgcggccgagcagctgcggcagaaggacctgaggatctcgcagcttcaggctgagttgcggaggcccccgccagctcctgcccagcctccagaacctgaggctctgccaacgatttacgtggtgacacccacatatgctaggctcgttcagaaagccgagttggttcgattatctcagacgctcagcttagtacctcgcctacactggctgctcgtggaagatgctgaggggcccacccccctggttagcggcctgctggcggctagcggactcctgtttacacaccttgttgttctaacacccaaggcgcagcgcctgagagagggggagccgggttgggtgcacccccggggtgttgagcaacgaaataaagctttggactggctcagggggcgggggggcgctgtgggcggggagaaggatccccccccaccgggaacccagggagtggtgtattttgccgacgacgataacacctatagccgcgaattgttcgaggagatgcgttggacaaggggtgtgagcgtttggcctgtggggctcgtaggggggctccgcttcgaagggccacaggtacaggatggaagggtggtcgggttccacactgcctgggagccaagcaggccttttccagtggatatggccggtttcgcggtcgcactgcccctcctcctggacaaacccaacgcacagttcgattcaacagcccctcgcggccacctcgagagctcactcctgtcacatctggtggacccaaaggacctggaacctagggcagccaactgtacccgagttcttgtgtggcacacaagaactgaaaagccaaaaatgaagcaagaggagcaactgcagaggcagggcagaggatccgacccagccatcgaggtatag

SEQ ID NO: 173042 - DNA, 1008 bp, Artificial Sequence
  derived and/or modified sequence
atgaagctgaagctgaagaatgtgttcctggcctacttcctggtgtccattgctggcctgctgtatgccctggtgcagctgggccagccctgtgactgcctgccccccctgcgggctgctgctgagcagctgcggcagaaggacctgcgcatcagccagctgcaggccgagctgcggcggcccccaccagccccagcccagcccccagagcctgaggccctgcccaccatctacgtggtgacccccacctacgcccggctggtgcagaaggccgagctggtgcggctgagccagaccctgagcctggtgccccggctgcactggctgctggtggaggatgctgagggccccacccccctggtgtctggcctgctggccgccagcggcctgctcttcacccacctggtggtgctgacccccaaggcccagaggctgcgggagggggagcccggctgggtgcacccccggggcgtggagcagaggaacaaggccctggactggctgcggggccggggcggcgctgtgggcggggagaaggaccccccacctcctggcacccagggcgtggtgtactttgctgatgatgacaacacctacagccgggagctgtttgaggagatgcgctggacccggggcgtgtctgtgtggcctgtgggcctggtgggcggcctgcgctttgagggcccccaggtgcaggacggccgggtggtgggcttccacacagcctgggagcccagccggcccttccctgtggacatggccggctttgctgtggccctgcccctgctgctggacaagcccaatgcccagtttgacagcacagccccccggggccacctggagagcagcctgctgagccacctggtggaccccaaggacctggagccccgggccgccaactgcaccagggtgctggtgtggcacaccaggacagagaagcccaagatgaagcaggaggagcagctgcagaggcagggccggggcagtgaccctgccatcgaggtgtag

SEQ ID NO: 173043 - DNA, 1008 bp, Artificial Sequence
  derived and/or modified sequence
atgaagctgaagctgaagaacgtgttcctggcctacttcctggtgtcaatcgcaggcctgctctacgccctggtccaactcggtcaaccttgtgactgcctgccaccactgagggccgccgcggagcagttgagacagaaggacctgaggatatctcagctgcaggctgaactgcggcggccaccacccgcacccgcacagccccctgaaccagaagctctgccaaccatctacgtggtgacgcccacttacgcccgattagttcagaaggcagaactggtgagactgtcccagactttgtcactggtgccgcggttgcattggttgctggttgaggacgccgaggggccgacacctcttgtttccggattactggccgcaagtgggctgctcttcacccacttggtagtcctgacccccaaagcacagcggttgcgagagggcgagccagggtgggtacatccacggggcgtagagcaaagaaataaggcactcgattggttacggggacggggcggcgccgtgggcggcgaaaaggaccccccccctcctggaacgcagggagtcgtctatttcgccgacgacgataacacatattccagggaactgttcgaggagatgaggtggaccagaggagtgtctgtctggccagtaggcctggtgggaggcttgcgttttgagggccctcaagtgcaagacgggagggtggtaggcttccacaccgcctgggaaccctctcggcctttccccgtggacatggccggcttcgccgtggccctcccacttctgcttgataaaccaaacgcacagtttgatagcacggctcccagaggccaccttgagtccagcttgctctcacatttagtcgatcccaaggatctggaacccagagccgcaaattgcacgcgggtcctggtctggcatacgcgcacagagaaaccaaaaatgaagcaggaagagcagttacagcgccagggcagagggtcagacccagctattgaggtgtag

SEQ ID NO: 173044 - DNA, 1008 bp, Artificial Sequence
  derived and/or modified sequence
atgaagctaaagctgaaaaatgtgttcctggcgtacttcctcgttagtatcgctggcctcctgtacgccctggtacaactgggccagccatgtgattgtctccccccactacgggctgctgccgagcagttaaggcaaaaggatctgcggattagccagctacaagctgagctccgaaggcccccacctgccccagcacagcctcccgagcccgaagcactgcctacaatttacgtggttaccccaacatacgccaggctggtccagaaggcagagctggtccgcctttcacagacactctctcttgtgccacggttacattggctgctcgtggaagatgctgaggggcctacccctcttgtaagtggtcttctcgccgctagcgggctgctgtttacacatttagtggtgctgacacctaaggcacagaggctacgtgagggggaacccggttgggtccacccgagaggggtggagcagagaaacaaagcgctggattggttgagaggaagaggcggagctgttgggggagagaaggacccccctccaccaggtactcagggggtcgtgtacttcgcagacgacgacaacacttattctcgcgagctgttcgaagagatgcgttggacacgaggggtctctgtatggcctgttggactggtcgggggactgcggtttgagggccctcaagtccaagatggccgagtcgtcggtttccacacagcttgggaacccagtcgccctttcccagtggacatggctggatttgcagttgctctgccgcttctgctcgacaagcctaacgctcaatttgattctacggccccaagaggacacctcgagagctctttactgagtcacctggttgaccctaaggaccttgagccacgggcagctaactgcactagggtcttggtctggcacacgaggaccgagaaacccaagatgaagcaggaggaacagctgcagcgtcaggggagggggagcgatcccgcaattgaggtgtag

SEQ ID NO: 173045 - DNA, 1641 bp, Artificial Sequence
  derived and/or modified sequence
gggaccggaaatcaagtctacaaggcgggggggtgcacagatgaccggaagcgtgccctggcggcgctgccagccccagctgggagctggtaggggagtgcgaggaaggcgggacgcagggcggagccgctgcaggggcggggcctgcggacaggagccggggtttggggcgggaacccctcgtcccctgcagaccccgcctgctcgggcgcgggcggcggcgcggccatgaagctgaagctgaagaacgtgtttctcgcctacttcctggtgtcgatcgccggcctcctctacgcgctggtacagctcggccagccatgtgactgccttcctcccctgcgggcagcagccgagcagctacggcagaaggatctgaggatttcccagctgcaagcggaactccgacggccaccccctgcccctgcccagccccctgaacccgaggccctgcctactatctatgttgttacccccacctatgccaggctggtacagaaggcagagctggtacgactgtcccagacactgagcctggtgccccggctgcattggctgctggtggaggatgctgagggtcccaccccgctggtctcagggctgctggctgcctctggcctcctcttcacacacctggtggtcctcacgcccaaagcccagcggcttcgggagggcgagcctggctgggttcatccccgtggtgtcgagcagcggaacaaggccctggactggctccggggcagagggggtgctgtgggtggggagaaggacccaccaccaccagggacccaaggagtcgtctactttgctgacgatgacaacacctacagccgggagctgtttgaggagatgcgctggacccgtggtgtctcagtgtggcctgtggggctggtgggcggcctgcgattcgagggccctcaggtacaggacggccgggtagtgggcttccacacagcatgggagcccagcaggcccttccctgtggatatggctggatttgccgtggccctgcccttgctgttagataagcccaatgcccaatttgattccaccgctccccggggccacctggagagcagtcttctgagccaccttgtggatcccaaggacctggagccacgggctgccaactgcactcgggtactggtgtggcatactcggacagagaagcccaagatgaagcaggaggagcagctgcagcggcagggccggggctcagacccagcaattgaggtgtgatggcggccccaccccaactaccacctcttttcaggcacagaccttgtgggactgggccccaggcctgcccaggatgtggttttccaagtcctgacccttggagccagaagtggcccctctgcccctccaggcccagggcatggtcctgctgcttcacccctcccctagcctgccgtgtggcactgcccacaggctggggacaagcagcccttgtgttgagtcaggttggccctgtctagggtggaacagaaggacagatggacccaggagggagggcagctgagtaactgggtaacttattggggctgggcatgcactggggggctggaggagctgggctggacccttcccacctgagcatgctgacccccttcctacctccagaataaagaatctcaacctgga

SEQ ID NO: 173046 - DNA, 1008 bp, Artificial Sequence
  derived and/or modified sequence
atgaagctgaagctgaagaacgtgttcctggcctacttcctggtgagcatcgccggcctgctgtacgccctggtgcagctgggccagccctgcgactgcctgccccccctgagagccgccgccgagcagctgagacagaaggacctgagaatcagccagctgcaggccgagctgagaagacccccccccgcccccgcccagccccccgagcccgaggccctgcccaccatctacgtggtgacccccacctacgccagactggtgcagaaggccgagctggtgagactgagccagaccctgagcctggtgcccagactgcactggctgctggtggaggacgccgagggccccacccccctggtgagcggcctgctggccgccagcggcctgctgttcacccacctggtggtgctgacccccaaggcccagagactgagagagggcgagcccggctgggtgcaccccagaggcgtggagcagagaaacaaggccctggactggctgagaggcagaggcggcgccgtgggcggcgagaaggacccccccccccccggcacccagggcgtggtgtacttcgccgacgacgacaacacctacagcagagagctgttcgaggagatgagatggaccagaggcgtgagcgtgtggcccgtgggcctggtgggcggcctgagattcgagggcccccaggtgcaggacggcagagtggtgggcttccacaccgcctgggagcccagcagacccttccccgtggacatggccggcttcgccgtggccctgcccctgctgctggacaagcccaacgcccagttcgacagcaccgcccccagaggccacctggagagcagcctgctgagccacctggtggaccccaaggacctggagcccagagccgccaactgcaccagagtgctggtgtggcacaccagaaccgagaagcccaagatgaagcaggaggagcagctgcagagacagggcagaggcagcgaccccgccatcgaggtgtag

SEQ ID NO: 173047 - protein, 1203 aa, Artificial Sequence
  derived and/or modified sequence
MAACGRVRRMFRLSAALHLLLLFAAGAEKLPGQGVHSQGQGPGANFVSFVGQAGGGGPAGQQLPQLPQSSQLQQQQQQQQQQQQPQPPQPPFPAGGPPARRGGAGAGGGWKLAEEESCREDVTRVCPKHTWSNNLAVLECLQDVREPENEISSDCNHLLWNYKLNLTTDPKFESVAREVCKSTITEIKECADEPVGKGYMVSCLVDHRGNITEYQCHQYITKMTAIIFSDYRLICGFMDDCKNDINILKCGSIRLGEKDAHSQGEVVSCLEKGLVKEAEEREPKIQVSELCKKAILRVAELSSDDFHLDRHLYFACRDDRERFCENTQAGEGRVYKCLFNHKFEESMSEKCREALTTRQKLIAQDYKVSYSLAKSCKSDLKKYRCNVENLPRSREARLSYLLMCLESAVHRGRQVSSECQGEMLDYRRMLMEDFSLSPEIILSCRGEIEHHCSGLHRKGRTLHCLMKVVRGEKGNLGMNCQQALQTLIQETDPGADYRIDRALNEACESVIQTACKHIRSGDPMILSCLMEHLYTEKMVEDCEHRLLELQYFISRDWKLDPVLYRKCQGDASRLCHTHGWNETSEFMPQGAVFSCLYRHAYRTEEQGRRLSRECRAEVQRILHQRAMDVKLDPALQDKCLIDLGKWCSEKTETGQELECLQDHLDDLVVECRDIVGNLTELESEDIQIEALLMRACEPIIQNFCHDVADNQIDSGDLMECLIQNKHQKDMNEKCAIGVTHFQLVQMKDFRFSYKFKMACKEDVLKLCPNIKKKVDVVICLSTTVRNDTLQEAKEHRVSLKCRRQLRVEELEMTEDIRLEPDLYEACKSDIKNFCSAVQYGNAQIIECLKENKKQLSTRCHQKVFKLQETEMMDPELDYTLMRVCKQMIKRFCPEADSKTMLQCLKQNKNSELMDPKCKQMITKRQITQNTDYRLNPMLRKACKADIPKFCHGILTKAKDDSELEGQVISCLKLRYADQRLSSDCEDQIRIIIQESALDYRLDPQLQLHCSDEISSLCAEEAAAQEQTGQVEECLKVNLLKIKTELCKKEVLNMLKESKADIFVDPVLHTACALDIKHHCAAITPGRGRQMSCLMEALEDKRVRLQPECKKRLNDRIEMWSYAAKVAPADGFSDLAMQVMTSPSKNYILSVISGSICILFLIGLMCGRITKRVTRELKDRLQYRSETMAYKGLVWSQDVTGSPA

SEQ ID NO: 173048 - protein, 1179 aa, Artificial Sequence
  derived and/or modified sequence
MAACGRVRRMFRLSAALHLLLLFAAGAEKLPGQGVHSQGQGPGANFVSFVGQAGGGGPAGQQLPQLPQSSQLQQQQQQQQQQQQPQPPQPPFPAGGPPARRGGAGAGGGWKLAEEESCREDVTRVCPKHTWSNNLAVLECLQDVREPENEISSDCNHLLWNYKLNLTTDPKFESVAREVCKSTITEIKECADEPVGKGYMVSCLVDHRGNITEYQCHQYITKMTAIIFSDYRLICGFMDDCKNDINILKCGSIRLGEKDAHSQGEVVSCLEKGLVKEAEEREPKIQVSELCKKAILRVAELSSDDFHLDRHLYFACRDDRERFCENTQAGEGRVYKCLFNHKFEESMSEKCREALTTRQKLIAQDYKVSYSLAKSCKSDLKKYRCNVENLPRSREARLSYLLMCLESAVHRGRQVSSECQGEMLDYRRMLMEDFSLSPEIILSCRGEIEHHCSGLHRKGRTLHCLMKVVRGEKGNLGMNCQQALQTLIQETDPGADYRIDRALNEACESVIQTACKHIRSGDPMILSCLMEHLYTEKMVEDCEHRLLELQYFISRDWKLDPVLYRKCQGDASRLCHTHGWNETSEFMPQGAVFSCLYRHAYRTEEQGRRLSRECRAEVQRILHQRAMDVKLDPALQDKCLIDLGKWCSEKTETGQELECLQDHLDDLVVECRDIVGNLTELESEDIQIEALLMRACEPIIQNFCHDVADNQIDSGDLMECLIQNKHQKDMNEKCAIGVTHFQLVQMKDFRFSYKFKMACKEDVLKLCPNIKKKVDVVICLSTTVRNDTLQEAKEHRVSLKCRRQLRVEELEMTEDIRLEPDLYEACKSDIKNFCSAVQYGNAQIIECLKENKKQLSTRCHQKVFKLQETEMMDPELDYTLMRVCKQMIKRFCPEADSKTMLQCLKQNKNSELMDPKCKQMITKRQITQNTDYRLNPMLRKACKADIPKFCHGILTKAKDDSELEGQVISCLKLRYADQRLSSDCEDQIRIIIQESALDYRLDPQLQLHCSDEISSLCAEEAAAQEQTGQVEECLKVNLLKIKTELCKKEVLNMLKESKADIFVDPVLHTACALDIKHHCAAITPGRGRQMSCLMEALEDKRVRLQPECKKRLNDRIEMWSYAAKVAPADGFSDLAMQVMTSPSKNYILSVISGSICILFLIGLMCGRITKRVTRELKDR

SEQ ID NO: 173049 - DNA, 3612 bp, Artificial Sequence
  derived and/or modified sequence
atggcggcctgtggcagagtaagacggatgttcagactgtccgccgctctgcatcttttgttgctattcgcagccggtgccgaaaagttgccaggacagggggtacatagccaggggcaagggccaggggctaatttcgtgagttttgtgggccaggctgggggaggcggacccgcagggcagcaactgccacagctgccacagtccagtcagttacagcagcagcaacagcagcagcagcagcaacagcagccccaaccgccccagcctccgttccccgcaggggggccccctgctcgccgggggggagcgggtgcaggcggcggttggaagctggcagaggaggagagttgcagagaagatgtgacacgagtctgccccaaacatacctggtcaaataatttagcagtcctggagtgtctgcaagacgtgagggagcctgagaacgagatcagctctgattgcaatcacctgctgtggaactacaagctaaatcttacaactgaccctaagtttgagagcgtggcaagagaagtctgcaagtcaaccattaccgaaattaaggagtgcgctgacgagcccgtggggaagggatacatggtgtcatgcctggtagaccatagaggcaacatcactgaataccagtgccatcagtatataacgaagatgactgcaatcattttctcggactatcggctgatttgtggcttcatggatgattgtaagaacgacataaacattctgaaatgcggctccatacggttgggcgagaaagatgcccatagtcagggagaagtcgtctcatgtctggagaagggtctcgtgaaggaggctgaagaacgcgagccaaagattcaggtttctgaactgtgtaaaaaggccatactgcgcgtggcggagctgtcttccgacgatttccatttggatcgacacctctacttcgcctgcagggacgatagagagcgcttttgtgaaaatactcaggcaggggaaggtcgggtctataaatgcctgttcaatcataagttcgaggagtccatgtcagaaaaatgcagggaagccctgacaacccggcagaagctgattgcgcaagattataaggttagttacagtcttgctaaaagctgtaaatccgacctgaagaagtatcgttgtaatgtggagaacttacctcgctcaagagaggcccggctatcttacctgctgatgtgtcttgaaagtgccgtgcaccgaggcaggcaggttagctccgagtgccagggcgaaatgttagactatcggaggatgttaatggaggatttctccctgagtccagagattatactgtcttgccgtggggagattgaacaccattgttccggcctccataggaaggggcgtactcttcattgcctgatgaaggtggtcaggggagagaaaggcaatctcggaatgaactgccaacaggcactgcaaactctgattcaagagactgaccctggcgctgactacagaattgatcgggccctcaatgaggcttgcgagtcagtgattcagacggcttgcaaacatattcgcagcggagatcccatgatcctgtcgtgcctgatggagcacctgtacactgaaaaaatggtggaggattgcgaacaccgcctgctggagctgcagtacttcatatcaagagactggaagctagatcccgtgttataccgcaagtgccaaggtgacgcatctcggctctgtcacacccacggctggaacgaaacctcagaatttatgccgcagggggctgttttcagttgtctgtatcgacatgcttatcgcactgaagagcaagggcgtcggctgagccgcgagtgccgggccgaagtacaaaggattctgcaccaaagagcaatggatgtgaaactggatcctgccctgcaagacaagtgcctgatagacctaggcaagtggtgtagcgagaagacagaaaccggacaggagctggagtgtctgcaggatcaccttgacgatttggtggtggaatgtagggacattgtggggaacctcacggaactggaatcagaggatattcaaattgaggctctcctaatgagagcttgcgagccgattatccagaacttctgccacgatgtcgccgataatcagattgattcgggagatcttatggagtgccttattcagaacaagcatcagaaggacatgaacgaaaaatgcgcaattggcgtgacccactttcagttagttcagatgaaggatttccggttctcttacaagtttaagatggcatgcaaagaagatgttctgaagctctgccccaacattaaaaaaaaagtggatgtggtgatttgcttgagtacgactgttcgaaatgacacccttcaagaggctaaggagcatcgtgtcagtcttaaatgccgtaggcagttgagggttgaggagctggaaatgaccgaggatattagattagaacctgatctgtacgaagcctgtaaaagtgatatcaaaaacttctgttctgccgttcaatacggaaatgcccagattatcgagtgcctgaaggagaataaaaaacagctgtctaccaggtgtcaccaaaaggtctttaaactgcaggaaacagagatgatggacccggagttggattacacactgatgagagtctgtaagcagatgattaaaaggttttgtccagaggctgactcgaagaccatgttgcaatgcctgaaacaaaacaaaaacagcgaactgatggatccaaagtgtaagcagatgatcaccaaacgccagattacgcaaaacactgattaccgactcaacccaatgttaaggaaagcatgtaaagccgatatccctaagttctgtcatggcattcttacaaaggccaaggatgacagcgaactcgagggacaggtgatctcctgtcttaaactcagatatgcagaccagcggctttccagtgattgtgaggaccaaatcagaatcattatacaggagtccgcgctggactaccggctcgacccccaactgcagctccattgctccgatgaaatatcatccttgtgcgcagaggaggccgcggcacaggaacaaaccggccaggtggaagaatgcctgaaagtgaacttgctgaagatcaaaaccgaactctgtaaaaaagaagtgctgaatatgcttaaagagagcaaggctgacatcttcgtggacccggtcctccataccgcctgtgcccttgatatcaaacaccactgcgcagccatcactccaggcagaggacgacagatgagctgtcttatggaggcgttggaagataaacgtgtgagactccagccggagtgcaaaaagcgactgaacgacagaatcgaaatgtggtcgtatgcagcgaaagttgcccctgcagacggcttctctgacctggcaatgcaggtcatgaccagtccaagcaagaactacattctgagtgtcatatctgggtctatatgcattctgttcctgattggcctgatgtgtgggaggattaccaaacgagtgacccgcgaactcaaggataggctgcagtatagatctgaaacaatggcttataaaggtcttgtctggagtcaggacgtgacgggcagccccgcttag

SEQ ID NO: 173050 - DNA, 8288 bp, Artificial Sequence
  derived and/or modified sequence
atttaaatacgcggcgccggcgagtgcgtcgagctcgccgcggactcaagatggcggcgtgtggacgtgtacggaggatgttccgcttgtcggcggcgctgcatctgctgctgctattcgcggccggggccgagaaactccccggccagggcgtccacagccagggccagggtcccggggccaactttgtgtccttcgtagggcaggccggaggcggcggcccggcgggtcagcagctgccccagctgcctcagtcatcgcagcttcagcagcaacagcagcagcagcaacagcaacagcagcctcagccgccgcagccgcctttcccggcgggtgggcctccggcccggcggggaggagcgggggctggtgggggctggaagctggcggaggaagagtcctgcagggaggacgtgacccgcgtgtgccctaagcacacctggagcaacaacctggcggtgctcgagtgcctgcaggatgtgagggagcctgaaaatgaaatttcttcagactgcaatcatttgttgtggaattataagctgaacctaactacagatcccaaatttgaatctgtggccagagaggtttgcaaatctactataacagagattaaagaatgtgctgatgaaccggttggaaaaggttacatggtttcctgcttggtggatcaccgaggcaacatcactgagtatcagtgtcaccagtacattaccaagatgacggccatcatttttagtgattaccgtttaatctgtggcttcatggatgactgcaaaaatgacatcaacattctgaaatgtggcagtattcggcttggagaaaaggatgcacattcacaaggtgaggtggtatcatgcttggagaaaggcctggtgaaagaagcagaagaaagagaacccaagattcaagtttctgaactctgcaagaaagccattctccgggtggctgagctgtcatcggatgactttcacttagaccggcatttatattttgcttgccgagatgatcgggagcgtttttgtgaaaatacacaagctggtgagggcagagtgtataagtgcctctttaaccataaatttgaagaatccatgagtgaaaagtgtcgagaagcacttacaacccgccaaaagctgattgcccaggattataaagtcagttattcattggccaaatcctgtaaaagtgacttgaagaaataccggtgcaatgtggaaaaccttccgcgatcgcgtgaagccaggctctcctacttgttaatgtgcctggagtcagctgtacacagagggcgacaagtcagcagtgagtgccagggggagatgctggattaccgacgcatgttgatggaagacttttctctgagccctgagatcatcctaagctgtcggggggagattgaacaccattgttccggattacatcgaaaagggcggaccctacactgtctgatgaaagtagttcgaggggagaaggggaaccttggaatgaactgccagcaggcgcttcaaacactgattcaggagactgaccctggtgcagattaccgcattgatcgagctttgaatgaagcttgtgaatctgtaatccagacagcctgcaaacatataagatctggagacccaatgatcttgtcgtgcctgatggaacatttatacacagagaagatggtagaagactgtgaacaccgtctcttagagctgcagtatttcatctcccgggattggaagctggaccctgtcctgtaccgcaagtgccagggagacgcttctcgtctttgccacacccacggttggaatgagaccagtgaatttatgcctcagggagctgtgttctcttgtttatacagacacgcctaccgcactgaggaacagggaaggaggctctcacgggagtgccgagctgaagtccaaaggatcctacaccagcgtgccatggatgtcaagctggatcctgccctccaggataagtgcctgattgatctgggaaaatggtgcagtgagaaaacagagactggacaggagctggagtgccttcaggaccatctggatgacttggtggtggagtgtagagatatagttggcaacctcactgagttagaatcagaggatattcaaatagaagccttgctgatgagagcctgtgagcccataattcagaacttctgccacgatgtggcagataaccagatagactctggggacctgatggagtgtctgatacagaacaaacaccagaaggacatgaacgagaagtgtgccatcggagttacccacttccagctggtgcagatgaaggattttcggttttcttacaagtttaaaatggcctgcaaggaggacgtgttgaagctttgcccaaacataaaaaagaaggtggacgtggtgatctgcctgagcacgaccgtgcgcaatgacactctgcaggaagccaaggagcacagggtgtccctgaagtgccgcaggcagctccgtgtggaggagctggagatgacggaggacatccgcttggagccagatctatacgaagcctgcaagagtgacatcaaaaacttctgttccgctgtgcaatatggcaacgctcagattatcgaatgtctgaaagaaaacaagaagcagctaagcacccgctgccaccaaaaagtatttaagctgcaggagacagagatgatggacccagagctagactacaccctcatgagggtctgcaagcagatgataaagaggttctgtccggaagcagattctaaaaccatgttgcagtgcttgaagcaaaataaaaacagtgaattgatggatcccaaatgcaaacagatgataaccaagcgccagatcacccagaacacagattaccgcttaaaccccatgttaagaaaagcctgtaaagctgacattcctaaattctgtcacggtatcctgactaaggccaaggatgattcagaattagaaggacaagtcatctcttgcctgaagctgagatatgctgaccagcgcctgtcttcagactgtgaagaccagatccgaatcattatccaggagtccgccctggactaccgcctggatcctcagctccagctgcactgctcagacgagatctccagtctatgtgctgaagaagcagcagcccaagagcagacaggtcaggtggaggagtgcctcaaggtcaacctgctcaagatcaaaacagaattgtgtaaaaaggaagtgctaaacatgctgaaggaaagcaaagcagacatctttgttgacccggtacttcatactgcttgtgccctggacattaaacaccactgcgcagccatcacccctggccgcgggcgtcaaatgtcctgtctcatggaagcactggaggataagcgggtgaggttacagcccgagtgcaaaaagcgcctcaatgaccggattgagatgtggagttacgcagcaaaggtggccccagcagatggcttctctgatcttgccatgcaagtaatgacgtctccatctaagaactacattctctctgtgatcagtgggagcatctgtatattgttcctgattggcctgatgtgtggacggatcaccaagcgagtgacacgagagctcaaggacaggctacaatacaggtcagagacaatggcttataaaggtttagtgtggtctcaggatgtgacaggcagtccagcctgacctttctgcacactccagacaaacttcccagacaagctcctttgtgcctctacgtggagagggtgtggaaagttatcacattaaaagatggaggatttgctctgttttttttctttctgtccatttgctgcgtgtacccactctagtaggcattggctaaatgttgtattttggcgattcatcaacctttgcagaatatgggctttatagaagcaatattcttggccatcccgcctcattcctccagtgtggagatgacaagtctgggtgtgagagggaggggtccgggcatcatggttcagcgtggcactcctttggttgagtttggggcatgagatcacagtggctgcacaagagagcagtgtgtacagtaggagagacatttatgtaatatatattttattaacctgttagatgtccacaaagtattataaatcacgtgcctaaaactgtccatgtagaccaaggcctgccctcggcgccccccactcttgcctctgctctgcacagtccacgtgcactgcaggaccggagcgacacatgtcttccctgaagggtgttcagtacaaggcgtgtcagtttgtggatcagttgatccaagttactccttgtctaacctgactgacatatatttgaatactgtggttttctttcttttttttctatttgctgcccttcctggaggcagtgggttccagaagccaactgattgtccccctgccaagtcaccaagggaagctgctaagctgcttagtcccctcggtcctgcttgtagggtcttcctgattgtcaacagctgtctgggatgcttcagtctcctaaaactggaaacgcagggtgcgagcagcacacactgcctcccgccactgccagccggagtgagcggcccgagagtctctgcaggttcccctgggggctgggggccgctgaggcctaatatcaagagccaggaatgtcatgtacatggaggtgcctacggacgtgcctggtgtggtttgcaggtaggatggatgttcactgtttgaccgggtggggtatccttcctctctgcagtctccttcccagtatgcgtaaacacccttatagttctaattgtgttgatatttctgttctttctgaattgagagaaaatcccattcgttgtctgcagatttggaagtttgatgaggaatttggttcttgaaacatctgtctttttttttttttttgagacagagtatctctctgttgcccaggctgcagtgcagtggcgcgatctcagctccctgcaacctccacctcctgggttcaagcaattctctgcctcagcctcctgagtagctgggattccaggcacccgccaccacgcctggcttatttttgtatttttagtagagatggggtttcaccatcttggccaggctggtcttgaactcctgatctcatgatccacccgcctcagcttcccaaagtgctgggattacaggtgtgagccaccctgcctggccaaaacatttgtcatctttataaatggtcagaatagaaaagttagctctgccagtatcttcaattacttattacaagaatgtctttcatcatcttacttggagcattttccaatgactggctcttgagagccccaggcagggccccgagcaagtttttctaagtgccaaggccagcaaagtctgaactggccgcactcattaagtccctcatttggcaaaacaaaacagggcctggggcacccctggttcctggccttataggtcagtcaactggctgagaaatggtcaagaaaagaaacaatgacccttctgtggatgtgagtggatgatggactctggcctgtgtctactctcctgatgtgtagcccaccaacagtaatagaagtagagggtagggggttttgccaaggctaaggcttcaggtacttgctaacagttatagcagctgggtcactgtcatctggacttaccagttcatgccagtgtccctgtgacttatgcatagtgtgcgccacagccctctagaggtacctggagcccggactgccaggctggaggctctggggtactgaaggtgagctgtctgggcaaactattaagaacaagacgaactgttcacaatggagcttctcccacagatggggagctctgtgaggccttcacctgggtgcatgttggacttccattgctgttgctgttgtccctagacaagcccgttagcaagaagcaccggcaggggagccatgcactccataggcttgggatcacccccgggaaagcgatcttccccgggctaccacccccagctgcagttctgtgttagtgcatccttcaaagctaggagaattctagggtgaccagtgagctaatgttgagtgagcaggtattgacttgaacacactgcaggcctttggctgtctcatgctgtccttactcttcttgggaacagtgagtcactcagctggccagggtggggatgcatcctggtgaagagacagctttccctgaagatgctacagaaagttactgtcagatttcatttgtttctgtttcctgagatcaactaacagaagaatctaatggtgagagtgtcttcattcatgttttacgttttatcaaggcacactggaaagggaattatgtggctgacttcccttggccttcccaagagaagattctgttcttatgtcagtgtggcttctggaagtgtctcctatcctcccatcctccaggcctgtggtgtgacttctgccccgaagttcctactatagtgagtcatctggggagaggccactgaaaagaggccttcccttcccatttcctcccctgcctccttagaacacactctaagtcagaacttaatctaagaagaaggaagctggaccaggaaccttggaagtcagccagccctagaacagtcagcctaaattttggccgtaatggcttttttggttttttgttttgtttctgagatggagtctcactccgttgccaggctggagtgctgtggcgctatctcagcttaccgaatcctccgactccctggttcaagcgattgtcctgcctcagcctccggagtagctgggattacaggcatgcaccaccacacccagctaatttttgtatttttagtagagacggggtttcaccgtgttgtccaggatggtctccatctcctgacctcatgatgtgcccacttcggccttccaaagtggccgcaaagtggcccacttcggccaaagtgcacttcggccttccaaagtgcattacaggcgtgagccaccacgcccggcctggccttttttttttttttcttttgagacacagtttcactcgttgcccaggctggagtgcagtggcgcaatctcggctcactgcaacttctgcctcctaggttcaagcagttctcctgcctcagcctcccaagtagttgggattacgggcatgcaccaccatgcctggataattttttcttatttttagtagagacaggatttcatcatgttggccacgctggtttcgaactcctgaccacatgtggtccacccaccttggcctcaattatgtgcattttggtatatttacttgtatttcaacatcttgtgagtttgaaaaacctgaaaggccagaatgcttccttttatttctcaccatttgggcagcacctaagtggttttgtaaaatgcagcatctggtgctgtgggtctctctcaggccttgagggacacttccttcctccccactcgcctcctctccactagactttggttcctagagggcgtggggccgggtctgaggttcttgcctgccttccctcccattggtctttggttgctcatccctctaactgcaccccttcttggtccttcctccacagacttcagataatagataagtcattagcaaaccagaccgaatctttagggtgaagagctccccaaagccatctggtgaggtcattgtggggaccagggactgattatttgtcacctggatcacaaagatgggactgtctgctcaggctggtggtgacaggatcctgacccgtggtcctctcccgctccctctgctccaccaggacacatgtataggacactgtgctgtgtgcagtggagaaatctccctgggccaggggaaagttcagacagtgcctctagattgtgttttgcctcctccaatgtagagttgacatctggaccccagagcccagcagggctttctgtcagacatgctagggtggtagaaatgggccctccaggtccccctgcagtgcactgggcagagacctccggaaagccggcagcgggagcgcttcctgggcagcttcccccagcacagtgttcccaaaccagtccatccggaaaacagtctgtacagcaaatgctgtgtgagatcttaggcttttcactttttttgttttgttttgtttttgaaagaaagaaaaaaatacaattaacaagcctcttttgtaaatgggtttcctttctatgtataaaatcgtggtggtcccttgtttttacatgttcatgctgtgtaattttgagatgttactgagatatgttctgaacataatgtgcatttttttctgtacagatgaaatgggagaatttaataaagagtttgcaggtttttacttgtt

SEQ ID NO: 173051 - DNA, 3612 bp, Artificial Sequence
  derived and/or modified sequence
atggccgcctgtggccgggtgcggaggatgttccggctgtctgctgccctgcacctgctgctgctgtttgctgctggagctgagaagctgcccggccagggcgtgcacagccagggccagggccctggggccaactttgtgtcctttgtgggccaggccggcggcggcggccctgctggccagcagctgccccagctgccccagagcagccagctgcagcagcagcagcagcagcagcagcagcagcagcagccccagcccccccagccccccttccctgctgggggccccccagcccggcggggcggggccggggccggcggcggctggaagctggccgaggaggagagctgccgggaggatgtgaccagggtgtgccccaagcacacctggagcaacaacctggccgtgctggagtgcctgcaggatgtgcgggagccagaaaatgagatcagcagtgactgcaaccacctgctgtggaactacaagctgaacctgaccacagaccccaagtttgagagcgtggcccgggaggtgtgcaagagcaccatcacagagatcaaggaatgtgctgatgagcctgtgggcaagggctacatggtgtcctgcctggtggaccaccggggcaacatcacagagtaccagtgccaccagtacatcaccaagatgacagccatcatcttcagtgactaccgcctcatctgtggcttcatggatgactgcaagaatgacatcaacatcctgaagtgtggcagcatccggctgggggagaaggatgcccacagccagggcgaggtggtgtcctgcctggagaagggcctggtgaaggaggccgaggagcgggagcccaagatccaggtgtctgagctgtgcaagaaggccatcctgcgggtggccgagctgagcagtgatgacttccacctggacagacacctgtactttgcctgcagagatgaccgggagcgcttctgtgagaacacccaggccggggagggccgggtgtacaagtgcctcttcaaccacaagtttgaggagagcatgtctgagaagtgccgggaggccctgaccacccggcagaagctgattgcccaggactacaaggtgtcctacagcctggccaagagctgcaagagtgacctgaagaagtaccgctgcaatgtggagaacctgcccaggagccgggaggcccggctgagctacctgctgatgtgcctggagagcgctgtgcaccggggccggcaggtgtcctctgagtgccagggcgagatgctggactacagaaggatgctgatggaggacttcagcctgagccctgagatcatcctgagctgccgcggggagattgagcaccactgcagcggcctgcacaggaagggccgcaccctgcactgcctgatgaaggtggtgcggggggagaagggcaacctgggcatgaactgccagcaggccctgcagaccctcatccaggagacagatcctggagctgactacagaattgaccgggccctgaatgaggcctgtgagagcgtcatccagacagcctgcaagcacatccgcagcggggaccccatgatcctgagctgcctgatggagcacctgtacacagagaagatggtggaggactgtgagcaccggctgctggagctgcagtacttcatcagccgggactggaagctggaccctgtgctgtacaggaagtgccagggagatgccagccggctgtgccacacccacggctggaatgagaccagcgagttcatgccccagggcgctgtgttcagctgcctgtacagacatgcctacagaacagaggagcagggccggcggctgagcagagaatgtagagctgaggtgcagaggatcctgcaccagagggccatggatgtgaagctggaccctgccctgcaggacaagtgcctgattgacctgggcaagtggtgcagcgagaagacagaaacaggccaggagctggagtgcctgcaggaccacctggatgacctggtggtggagtgccgggacatcgtgggcaacctgacagagctggagagcgaggacatccagatcgaggccctgctgatgagggcctgtgagcccatcatccagaacttctgccatgatgtggccgacaaccagattgacagcggggacctgatggagtgcctgatccagaacaagcaccagaaggacatgaatgaaaaatgtgccatcggcgtgacccacttccagctggtgcagatgaaggacttccgcttctcctacaagttcaagatggcctgcaaggaggatgtgctgaagctgtgccccaacatcaagaagaaggtggatgtggtgatctgcctgagcaccaccgtgagaaatgacaccctgcaggaggccaaggagcaccgggtgtccctgaagtgccggcggcagctgcgggtggaggagctggagatgacagaggacatccggctggagccagacctgtatgaggcctgcaagagtgacatcaagaacttctgcagcgctgtgcagtatggaaatgcccagatcatcgagtgcctgaaggagaacaagaagcagctgagcacccgctgccaccagaaggtgttcaagctgcaggagacagagatgatggaccctgagctggactacaccctgatgagggtgtgcaagcagatgatcaagcgcttctgcccagaggccgacagcaagaccatgctgcagtgcctgaagcagaacaagaacagcgagctgatggaccccaagtgcaagcagatgatcaccaagaggcagatcacccagaacacagactaccgcctgaaccccatgctgaggaaggcctgcaaggctgacatccccaagttctgccacggcatcctgaccaaggccaaggatgattctgagctggagggccaggtgatcagctgcctgaagctgcgctatgctgaccagaggctgagcagtgactgtgaggaccagatccgcatcatcatccaggagagcgccctggactaccgcctggacccccagctgcagctgcactgcagtgatgagatcagcagcctgtgtgccgaggaggccgccgcccaggagcagacaggccaggtggaggagtgcctgaaggtgaacctgctgaagatcaagacagagctgtgcaagaaggaggtgctgaacatgctgaaggagagcaaggctgacatctttgtggaccctgtgctgcacacagcctgtgccctggacatcaagcaccactgtgccgccatcaccccaggccggggccggcagatgagctgcctgatggaggccctggaggacaagagggtgcggctgcagcctgagtgcaagaagaggctgaatgaccgcatcgagatgtggagctatgctgccaaggtggccccagcagatggcttcagtgacctggccatgcaggtgatgaccagccccagcaagaactacatcctgagcgtcatcagcggcagcatctgcatcctcttcctgattggcctgatgtgtggccgcatcaccaagagggtgacccgggagctgaaggaccggctgcagtacagaagtgagaccatggcctacaagggcctggtgtggagccaggatgtgacaggcagccctgcctag

SEQ ID NO: 173052 - DNA, 3612 bp, Artificial Sequence
  derived and/or modified sequence
atggccgcctgcggccgggtgcggcggatgttccggctgagcgccgccctgcatctgttgctgttgttcgctgccggtgctgagaaactgcctggccagggagtgcatagtcaaggtcagggaccaggagccaactttgttagctttgtgggccaagccggtggcgggggtcctgccggccaacagcttccgcaactgcctcaaagctcccaattgcagcagcagcagcagcagcagcagcagcaacagcagccacagccacctcagccacctttcccggcggggggcccaccagcccgacgtggtggcgctggagccgggggcggttggaaacttgcggaagaagagtcctgtcgggaggacgtgacacgggtgtgcccaaagcacacctggagcaataatttggctgttctcgagtgtctgcaggacgtgcgggagcccgaaaatgaaataagttctgactgcaaccatctactgtggaattataagcttaacctcacgacggacccaaagtttgagagcgtggctagggaagtgtgcaaaagcactataacggagattaaggaatgtgcggacgaacctgtgggaaaagggtatatggtcagctgcttagtggatcatagaggtaacatcactgaataccagtgtcatcagtacatcacaaaaatgacagctataatcttctccgactatagattaatatgcggattcatggacgattgcaagaatgatattaacatcctcaaatgtggcagcattcggctgggagagaaagacgcccacagccagggcgaagtcgtgagctgtctggagaagggcctcgtgaaagaagctgaagaacgagaacctaagatccaggtcagtgagctatgcaagaaagccatactaagagtggcggagctcagctctgatgactttcatcttgatagacacctctactttgcttgtagggacgatagagaaaggttttgtgagaatacacaggccggagaaggccgcgtctacaagtgcctgtttaatcacaagttcgaggagagcatgtctgaaaagtgtcgggaagcactaaccacccgccagaagctgattgctcaggattacaaggtgtcctatagtctcgctaaatcttgtaaaagcgacctgaaaaagtatcggtgcaacgttgaaaatctccctaggtcccgagaggcccgcttatcctatctgctgatgtgtctggaatctgccgtgcacagaggaagacaagtgtcatcggagtgccagggtgagatgctcgactaccgacgcatgctgatggaagactttagcttatcccctgagataatcctgagctgccgaggcgagatagaacaccactgcagtggccttcacaggaagggcagaaccctccactgcctgatgaaggtcgtgcggggggagaaaggcaatcttggtatgaattgtcaacaggctctacaaactttgatccaggaaaccgatcccggagccgattatagaattgaccgggccctgaatgaagcctgtgagagtgtaatccagaccgcttgcaaacatattagatccggagacccaatgatcctgagttgtctcatggagcacctgtatacagaaaaaatggttgaggattgcgagcaccggcttctggaattgcagtactttatcagtagggactggaagctcgacccagtgctctatcggaaatgtcagggggatgcctcacgcctttgtcacactcatgggtggaacgaaacaagtgaatttatgcctcaaggtgccgtgttcagttgcctctaccgccacgcttacaggactgaagaacagggacgcaggctaagcagagagtgtcgcgccgaagtacagcgaattctacaccagagggccatggacgttaaactcgaccctgccctgcaggacaaatgtctaatcgatctgggaaaatggtgttctgagaaaaccgaaaccggacaggagttagaatgtctgcaggatcacctcgatgatctggtggtagagtgtcgggacatcgtgggcaatctgactgaattagagtccgaagatattcagattgaagccctgttaatgcgtgcgtgtgaaccaataattcagaacttctgccacgacgttgccgacaaccaaattgacagcggcgacctgatggaatgtctgattcagaataagcaccagaaggacatgaatgaaaagtgtgccattggtgtgacgcactttcagttggtccagatgaaggactttcgcttctcttataagttcaagatggcctgtaaggaggatgtccttaagctctgtccgaacatcaaaaaaaaggtggacgttgtaatctgcctcagcacaacagtgaggaacgacacccttcaggaagccaaggagcacagagtgagtctgaaatgtcgaagacaacttcgtgtggaagaactagagatgaccgaggatattagactcgaacctgacctctacgaagcttgcaaatccgacataaaaaatttttgcagtgctgttcagtacggcaacgcacagatcatagaatgccttaaagaaaataagaaacaactttcaactaggtgtcatcagaaagtattcaagctccaggagactgagatgatggacccagaattagattatacattgatgagggtgtgcaagcagatgatcaagagattctgccccgaagctgatagcaagaccatgctccaatgtctgaaacagaataagaattccgaactcatggaccctaagtgcaagcaaatgatcacgaagagacagattacacagaataccgattaccgcctaaatcccatgctccgaaaggcgtgcaaggcagacattccgaaattttgccatgggatcctgactaaagccaaggacgacagcgaactcgaggggcaggtgatcagttgcctgaagctgaggtacgccgatcagcgactgagtagcgactgtgaggatcaaattcggatcataattcaggaatctgctctggattaccggctcgaccctcaactgcagttgcactgcagtgatgagatatcctcgctctgtgcggaggaggctgctgctcaggaacagacaggtcaggtggaggaatgcctgaaggtgaatctcctgaaaattaagacagaattatgtaagaaagaagtgcttaatatgctgaaagagtccaaggcagatatctttgtggatccggtgctgcataccgcatgcgccctggacatcaagcatcactgcgccgccatcacgcctggacgtggaaggcaaatgtcatgccttatggaagccctcgaggataaacgggtgcgattgcagcctgaatgcaagaaacgtctgaatgaccgtatcgaaatgtggagttacgcagcaaaggtcgccccagctgatggatttagcgatctagctatgcaggtcatgacttccccgagcaagaattacattctctctgtcatttctgggagcatttgcattctgttcctgattgggcttatgtgtggccggatcacaaagcgggtgactagagagttaaaagacagactccaatatcgatctgagaccatggcttacaaaggcctcgtatggagccaagacgtcactggaagccccgcatag

SEQ ID NO: 173053 - DNA, 3612 bp, Artificial Sequence
  derived and/or modified sequence
atggcagcgtgcggacgggtccgaagaatgttcaggctgtccgccgctctccacttgctgttgctgtttgctgccggtgccgagaaactgcctggacaaggggtgcactctcaagggcaggggccaggcgctaattttgtctcattcgtcggccaggccggtgggggtgggcctgctggacagcaacttccacaattgccccaatcttctcagctgcagcagcagcagcagcagcagcagcagcagcaacagcctcagcctccacagcctcccttccctgcaggtggcccacccgcacgcaggggcggagcaggcgctggcggaggctggaagctggccgaagaggagtcttgcagggaggacgtgactcgcgtttgccctaagcatacttggagcaacaacctggccgtgctggagtgcctgcaggacgtaagggagcctgagaacgaaatctcttcagattgcaatcacctgctctggaactataagcttaatctgacaacggatccaaagttcgagtccgttgccagggaagtgtgcaaatctacgataactgaaataaaggagtgcgcagatgaaccagttggcaaggggtacatggtctcatgtctcgtcgatcatagaggcaatatcaccgaatatcagtgtcatcagtatatcacaaaaatgactgcaattatcttttcggattatcgattgatctgcggtttcatggacgactgtaagaatgacatcaacattttgaagtgtggaagcatacgattaggagagaaagatgctcattctcagggggaggtggtatcatgcctagagaaggggctagtaaaggaagcggaagaaagagagcctaagattcaggtaagtgaactgtgcaaaaaggctattcttcgggtggctgagcttagctcagacgatttccatctagaccggcatctttactttgcttgcagagacgatagggaaaggttctgcgagaatacccaagccggtgagggtcgagtttataagtgcctattcaaccataaatttgaagagtctatgagcgagaaatgcagagaagctctgacaactcgtcagaaactgatagcccaggactataaagtgtcctattccctggcaaaatcgtgtaaaagcgatttgaagaagtaccggtgtaacgttgaaaatctgccaaggtcccgggaagcgagacttagttacttgttaatgtgtttagagtccgccgtgcaccgtggacgtcaggtcagctcagaatgccaaggcgaaatgctggactacagaagaatgctcatggaagacttcagcctgagccctgagatcatactgtcctgcagaggggagatcgagcaccactgcagcggactccaccggaaaggacgaactctgcactgcttaatgaaggtagttcggggtgagaaaggcaaccttggaatgaattgccagcaggccctccagaccttaattcaggagaccgacccaggtgcagattacagaatcgatcgggctctgaacgaggcatgcgagagcgtcattcagacagcctgcaagcacattcgatcgggcgacccaatgatactgtcatgcttgatggagcacttatacactgagaaaatggtggaggattgcgagcacaggctgttagagttgcagtattttatcagtcgcgattggaagctcgatccggttttgtataggaagtgtcagggggatgcaagcaggctgtgtcacactcacgggtggaacgagacctcggaattcatgccccagggagcagtgttcagctgcctctatagacatgcataccgtactgaggagcaagggagaagactgtcaagggagtgccgcgcagaagttcaacggattctacaccaaagagcaatggatgtgaaactggaccctgccctgcaagacaagtgtctgattgacctggggaagtggtgttccgagaaaactgagaccgggcaagaactggaatgcctacaagatcatctggatgacttggtggtggagtgccgagatattgtgggtaaccttacagaactcgagtcagaagacattcaaatcgaggctctgctaatgcgtgcttgtgagccgatcattcagaacttttgtcacgatgtagccgataaccagatcgacagtggggacctgatggagtgtctgattcagaacaaacaccagaaggacatgaacgaaaagtgtgctatcggagtgacccacttccagttagtgcagatgaaggattttcgcttttcctacaaattcaaaatggcctgcaaagaagatgtgctgaaactctgtcccaatataaagaagaaggttgatgttgtcatatgtctgtccaccacagtccggaatgacactctgcaggaagccaaggagcatagggtcagccttaaatgtaggcgacagctgcgcgtcgaagagctggagatgaccgaagatatccgtctagaacccgacctctacgaagcctgtaagtcagatatcaaaaacttctgctcagccgtgcagtatggaaatgcccagataatcgagtgcctcaaagaaaacaagaaacaactgtcaacacgatgccatcagaaggtatttaagctgcaggaaacagagatgatggacccagagcttgactatacactaatgagagtgtgcaagcagatgatcaaacggttctgtccggaggccgactccaaaactatgttgcaatgcttgaaacaaaataaaaactcagaattgatggatccaaagtgcaaacagatgatcacgaagcgccagatcacgcagaataccgattataggcttaaccccatgctccgaaaggcttgcaaggccgacattcctaagttttgccacggtatactcacaaaggccaaagacgatagtgagctggagggccaggttattagctgcctaaagctccggtatgccgaccagaggctatcatcagattgtgaggatcagatcaggattattattcaagaaagtgccctggactacagactggatccacagctgcagctccattgttccgacgaaatttcctctctgtgtgctgaggaagctgctgctcaagagcagactggccaggtagaagagtgcctgaaggtgaacctattaaaaattaagacagaactctgcaaaaaggaggtacttaacatgctcaaggaatccaaggcagacatttttgttgatccggtgctccacacagcatgcgccctggacataaagcatcattgtgcagccataacgccaggtcgcggtcgccagatgagttgtctcatggaagccctggaagataaacgcgtacggctacaaccggaatgtaaaaagcggttgaacgaccgtatcgaaatgtggtcttacgccgcaaaggtggcaccagccgatggtttttctgatttggcaatgcaagtgatgacctccccttctaagaactacattctgagcgtgatatctggaagtatctgtatccttttcctgattggactcatgtgcggtcgtatcactaaaagggttacccgcgagttgaaagatcgattgcaatacaggagcgaaactatggcttacaaagggcttgtgtggagccaagatgtgacaggttcccctgcttag

SEQ ID NO: 173054 - DNA, 3612 bp, Artificial Sequence
  derived and/or modified sequence
atggccgcctgcggcagagtgagaagaatgttcagactgagcgccgccctgcacctgctgctgctgttcgccgccggcgccgagaagctgcccggccagggcgtgcacagccagggccagggccccggcgccaacttcgtgagcttcgtgggccaggccggcggcggcggccccgccggccagcagctgccccagctgccccagagcagccagctgcagcagcagcagcagcagcagcagcagcagcagcagccccagcccccccagccccccttccccgccggcggcccccccgccagaagaggcggcgccggcgccggcggcggctggaagctggccgaggaggagagctgcagagaggacgtgaccagagtgtgccccaagcacacctggagcaacaacctggccgtgctggagtgcctgcaggacgtgagagagcccgagaacgagatcagcagcgactgcaaccacctgctgtggaactacaagctgaacctgaccaccgaccccaagttcgagagcgtggccagagaggtgtgcaagagcaccatcaccgagatcaaggagtgcgccgacgagcccgtgggcaagggctacatggtgagctgcctggtggaccacagaggcaacatcaccgagtaccagtgccaccagtacatcaccaagatgaccgccatcatcttcagcgactacagactgatctgcggcttcatggacgactgcaagaacgacatcaacatcctgaagtgcggcagcatcagactgggcgagaaggacgcccacagccagggcgaggtggtgagctgcctggagaagggcctggtgaaggaggccgaggagagagagcccaagatccaggtgagcgagctgtgcaagaaggccatcctgagagtggccgagctgagcagcgacgacttccacctggacagacacctgtacttcgcctgcagagacgacagagagagattctgcgagaacacccaggccggcgagggcagagtgtacaagtgcctgttcaaccacaagttcgaggagagcatgagcgagaagtgcagagaggccctgaccaccagacagaagctgatcgcccaggactacaaggtgagctacagcctggccaagagctgcaagagcgacctgaagaagtacagatgcaacgtggagaacctgcccagaagcagagaggccagactgagctacctgctgatgtgcctggagagcgccgtgcacagaggcagacaggtgagcagcgagtgccagggcgagatgctggactacagaagaatgctgatggaggacttcagcctgagccccgagatcatcctgagctgcagaggcgagatcgagcaccactgcagcggcctgcacagaaagggcagaaccctgcactgcctgatgaaggtggtgagaggcgagaagggcaacctgggcatgaactgccagcaggccctgcagaccctgatccaggagaccgaccccggcgccgactacagaatcgacagagccctgaacgaggcctgcgagagcgtgatccagaccgcctgcaagcacatcagaagcggcgaccccatgatcctgagctgcctgatggagcacctgtacaccgagaagatggtggaggactgcgagcacagactgctggagctgcagtacttcatcagcagagactggaagctggaccccgtgctgtacagaaagtgccagggcgacgccagcagactgtgccacacccacggctggaacgagaccagcgagttcatgccccagggcgccgtgttcagctgcctgtacagacacgcctacagaaccgaggagcagggcagaagactgagcagagagtgcagagccgaggtgcagagaatcctgcaccagagagccatggacgtgaagctggaccccgccctgcaggacaagtgcctgatcgacctgggcaagtggtgcagcgagaagaccgagaccggccaggagctggagtgcctgcaggaccacctggacgacctggtggtggagtgcagagacatcgtgggcaacctgaccgagctggagagcgaggacatccagatcgaggccctgctgatgagagcctgcgagcccatcatccagaacttctgccacgacgtggccgacaaccagatcgacagcggcgacctgatggagtgcctgatccagaacaagcaccagaaggacatgaacgagaagtgcgccatcggcgtgacccacttccagctggtgcagatgaaggacttcagattcagctacaagttcaagatggcctgcaaggaggacgtgctgaagctgtgccccaacatcaagaagaaggtggacgtggtgatctgcctgagcaccaccgtgagaaacgacaccctgcaggaggccaaggagcacagagtgagcctgaagtgcagaagacagctgagagtggaggagctggagatgaccgaggacatcagactggagcccgacctgtacgaggcctgcaagagcgacatcaagaacttctgcagcgccgtgcagtacggcaacgcccagatcatcgagtgcctgaaggagaacaagaagcagctgagcaccagatgccaccagaaggtgttcaagctgcaggagaccgagatgatggaccccgagctggactacaccctgatgagagtgtgcaagcagatgatcaagagattctgccccgaggccgacagcaagaccatgctgcagtgcctgaagcagaacaagaacagcgagctgatggaccccaagtgcaagcagatgatcaccaagagacagatcacccagaacaccgactacagactgaaccccatgctgagaaaggcctgcaaggccgacatccccaagttctgccacggcatcctgaccaaggccaaggacgacagcgagctggagggccaggtgatcagctgcctgaagctgagatacgccgaccagagactgagcagcgactgcgaggaccagatcagaatcatcatccaggagagcgccctggactacagactggacccccagctgcagctgcactgcagcgacgagatcagcagcctgtgcgccgaggaggccgccgcccaggagcagaccggccaggtggaggagtgcctgaaggtgaacctgctgaagatcaagaccgagctgtgcaagaaggaggtgctgaacatgctgaaggagagcaaggccgacatcttcgtggaccccgtgctgcacaccgcctgcgccctggacatcaagcaccactgcgccgccatcacccccggcagaggcagacagatgagctgcctgatggaggccctggaggacaagagagtgagactgcagcccgagtgcaagaagagactgaacgacagaatcgagatgtggagctacgccgccaaggtggcccccgccgacggcttcagcgacctggccatgcaggtgatgaccagccccagcaagaactacatcctgagcgtgatcagcggcagcatctgcatcctgttcctgatcggcctgatgtgcggcagaatcaccaagagagtgaccagagagctgaaggacagactgcagtacagaagcgagaccatggcctacaagggcctggtgtggagccaggacgtgaccggcagccccgcctag

SEQ ID NO: 173055 - protein, 328 aa, Artificial Sequence
  derived and/or modified sequence
MRPVRLMKVFVTRRIPAEGRVALARAADCEVEQWDSDEPIPAKELERGVAGAHGLLCLLSDHVDKRILDAAGANLKVISTMSVGIDHLALDEIKKRGIRVGYTPDVLTDTTAELAVSLLLTTCRRLPEAIEEVKNGGWTSWKPLWLCGYGLTQSTVGIIGLGRIGQAIARRLKPFGVQRFLYTGRQPRPEEAAEFQAEFVSTPELAAQSDFIVVACSLTPATEGLCNKDFFQKMKETAVFINISRGDVVNQDDLYQALASGKIAAAGLDVTSPEPLPTNHPLLTLKNCVILPHIGSATHRTRNTMSLLAANNLLAGLRGEPMPSELKL

SEQ ID NO: 173056 - protein, 395 aa, Artificial Sequence
  derived and/or modified sequence
MRPVRLMKVFVTRRIPAEGRVALARAADCEVEQWDSDEPIPAKELERGVAGAHGLLCLLSDHVDKRILDAAGANLKVISTMSVGIDHLALDEIKKRGIRVGYTPDVLTDTTAELAVSLLLTTCRRLPEAIEEVKNGGWTSWKPLWLCGYGLTQSTVGIIGLGRIGQAIARRLKPFGVQRFLYTGRQPRPEEAAEFQAEFVSTPELAAQSDFIVVACSLTPATEGLCNKDFFQKMKETAVFINISRYPRATLPSKPGEEPSPLLPSGDFLPRGLLVRPQAELAGFHKPNNQLRNSWEYTRPPYREEEPSEWAWPVCFSAVAPTRRGLAHSSVASGSVPREPLQAHYPPPQRAGLEDLKGPLEAASHTAEPGFVWLWFSDTLNLMLLGGQTLKLTWS

SEQ ID NO: 173057 - protein, 252 aa, Artificial Sequence
  derived and/or modified sequence
MLGGVPTLCGTGNETWTLLALGQAIARRLKPFGVQRFLYTGRQPRPEEAAEFQAEFVSTPELAAQSDFIVVACSLTPATEGLCNKDFFQKMKETAVFINISRYPRATLPSKPGEEPSPLLPSGDFLPRGLLVRPQAELAGFHKPNNQLRNSWEYTRPPYREEEPSEWAWPVCFSAVAPTRRGLAHSSVASGSVPREPLQAHYPPPQRAGLEDLKGPLEAASHTAEPGFVWLWFSDTLNLMLLGGQTLKLTWS

SEQ ID NO: 173058 - DNA, 987 bp, Artificial Sequence
  derived and/or modified sequence
atgaggcccgtgcgcctaatgaaagtgttcgtgacaaggaggattcctgctgagggaagagtggcattagcgagagcagctgattgtgaggtcgagcagtgggacagtgacgaaccaatcccggccaaggagctggagcgcggtgtcgcgggggcccatgggttgctctgtttgctcagcgatcatgtggataaacgcattctagacgccgccggagcgaacttaaaagtcatctcaacaatgagcgtaggcattgaccacctggccctcgacgagatcaagaagcggggaatacgggtggggtatacccccgatgtcttgaccgacaccacagccgaactggccgtgtccctgctcctgaccacctgtcgacggcttcccgaggctatcgaagaggtgaagaatggtggctggactagttggaaaccgctgtggctctgtgggtatggacttacccagtccactgtgggcatcatcggtctgggtcggattggccaggcaattgcccgcagactcaaaccgttcggcgttcagcggttcctttacaccgggcgtcaaccacgtccagaggaggccgctgagttccaggccgaattcgtgagtacgccggagctggctgctcaaagtgatttcatcgtggttgcctgctcacttacccccgccactgaagggctgtgcaataaagatttttttcagaagatgaaggagacggccgtgttcatcaatatatcccgcggcgatgttgtcaaccaggacgacctgtaccaagcgctggcctctggaaagatcgcagctgctggacttgatgtgacgtccccagagccacttccgaccaatcacccactgctgacgctgaaaaactgtgtgatccttccacacattggcagcgcaacccacaggacacggaatactatgagtctgctggccgctaacaatctcctggccgggctacggggtgaaccaatgcctagcgagctgaaactctag

SEQ ID NO: 173059 - DNA, 1188 bp, Artificial Sequence
  derived and/or modified sequence
atgcgacccgtgcgcttgatgaaggtttttgtgacccgccggatcccagcagaagggcgagtggctcttgccagagcggctgattgtgaagtggagcagtgggacagcgacgagcctattcccgcaaaagagctcgaaagaggcgtcgctggtgcgcacggtttgttatgtctgctttccgatcacgttgacaaaagaatcttggacgcggctggagccaacctcaaggtgatttcaacaatgagcgttggcattgaccatctcgctttggacgaaatcaagaagagaggtattcgagtcggctacacaccagacgtgctgaccgacactacagccgagctggccgtgtcattgttattgacgacctgtcgaaggctgccggaagccatcgaagaggttaagaacggggggtggacctcttggaagccactgtggctgtgtggctacggactgacccaatcgaccgtgggtattatcgggttaggacgcatcgggcaagctatcgcaagacgactgaagccattcggggttcaacgctttttgtatacggggaggcagccccgcccagaggaagccgccgagttccaggctgaatttgttagtacccccgaactggcagctcaaagtgatttcattgttgtagcctgctccctcaccccggcaacagaaggcctgtgcaataaggacttcttccagaaaatgaaagagacagcagtgtttatcaacattagccgctacccccgggccaccctgccgagcaagcccggggaagagccttcccctctgcttccctccggcgattttctgccccgcgggcttctggttaggccgcaggcagagctagctggtttccataaacccaataatcagctgcgaaactcctgggagtacaccagaccaccctaccgggaggaggagccctccgaatgggcctggccagtatgcttctccgctgtcgcccccacccgaagaggcctggctcattcgagtgtcgccagtggttctgtccctcgagaaccgctgcaggcgcattaccctccaccacagagagccggactggaagacttgaagggcccgctggaagcagcttcacacacagcggagcctggctttgtttggctctggtttagtgacactttgaacctaatgctgctgggcggacagactttgaagctgacatggtcttag

SEQ ID NO: 173060 - DNA, 1280 bp, Artificial Sequence
  derived and/or modified sequence
actccagcctggccccgccccggcccagctacattcccgggccagcttctgtactgccaggtccgggtcggcggctgcactgcggatgagaccggtgcgactcatgaaggtgttcgtcacccgcaggatacccgccgagggtagggtcgcgctcgcccgggcggcagactgtgaggtggagcagtgggactcggatgagcccatccctgccaaggagctagagcgaggtgtggcgggggcccacggcctgctctgcctcctctccgaccacgtggacaagaggatcctggatgctgcaggggccaatctcaaagtcatcagcaccatgtctgtgggcatcgaccacttggctttggatgaaatcaagaagcgtgggatccgagttggctacaccccagatgtcctgacagataccaccgccgaactcgcagtctccctgctacttaccacctgccgccggttgccggaggccatcgaggaagtgaagaatggtggctggacctcgtggaagcccctctggctgtgtggctatggactcacgcagagcactgtcggcatcatcgggctggggcgcataggccaggccattgctcggcgtctgaaaccattcggtgtccagagatttctgtacacagggcgccagcccaggcctgaggaagcagcagaattccaggcagagtttgtgtctacccctgagctggctgcccaatctgatttcatcgtcgtggcctgctccttaacacctgcaaccgagggactctgcaacaaggacttcttccagaagatgaaggaaacagctgtgttcatcaacatcagcaggggcgacgtcgtaaaccaggacgacctgtaccaggccttggccagtggtaagattgcagctgctggactggatgtgacgagcccagaaccactgcctacaaaccaccctctcctgaccctgaagaactgtgtgattctgccccacattggcagtgccacccacagaacccgcaacaccatgtccttgttggcagctaacaacttgctggctggcctgagaggggagccgatgcctagtgaactcaagctgtagccaaacagtagagatggagggccgggaagcaaaccgtgccctggtattgtcagacacacccaggcttgatttggatccacaggcagagccaagggaaggtgtgattctctgaggaaagagtgattctgatatatgtacttgtcacattggtgttggacacatttgcgccaaaagtatggtaattctattattaaataattctctgaga

SEQ ID NO: 173061 - DNA, 2187 bp, Artificial Sequence
  derived and/or modified sequence
actccagcctggccccgccccggcccagctacattcccgggccagcttctgtactgccaggtccgggtcggcggctgcactgcggatgagaccggtgcgactcatgaaggtgttcgtcacccgcaggatacccgccgagggtagggtcgcgctcgcccgggcggcagactgtgaggtggagcagtgggactcggatgagcccatccctgccaaggagctagagcgaggtgtggcgggggcccacggcctgctctgcctcctctccgaccacgtggacaagaggatcctggatgctgcaggggccaatctcaaagtcatcagcaccatgtctgtgggcatcgaccacttggctttggatgaaatcaagaagcgtgggatccgagttggctacaccccagatgtcctgacagataccaccgccgaactcgcagtctccctgctacttaccacctgccgccggttgccggaggccatcgaggaagtgaagaatggtggctggacctcgtggaagcccctctggctgtgtggctatggactcacgcagagcactgtcggcatcatcgggctggggcgcataggccaggccattgctcggcgtctgaaaccattcggtgtccagagatttctgtacacagggcgccagcccaggcctgaggaagcagcagaattccaggcagagtttgtgtctacccctgagctggctgcccaatctgatttcatcgtcgtggcctgctccttaacacctgcaaccgagggactctgcaacaaggacttcttccagaagatgaaggaaacagctgtgttcatcaacatcagcaggtatcctagggccaccttacccagcaagcctggagaggagccatccccactgctgccatctggagattttcttccccgtgggttgttggtgagaccccaggctgagcttgctggtttccataaaccaaacaaccaactcagaaattcgtgggaatacacgagacctccgtacagggaagaagagccgtcagagtgggcctggcctgtctgcttctcagcagtggcccccacccggcggggcctggcacacagcagcgtggcttcagggagtgttcccagggagcctctgcaggcccattatcctccaccacaaagggctggacttgaggatctgaagggccctctggaggccgcctcccacactgctgagcctggctttgtctggctgtggttcagtgatactttgaaccttatgctcctgggcggacagaccctaaaactcacgtggtcgtagctcctcacactgtccctaggggtgccttcaggccactgggcatgtatggaggtcagaccttccttctctgccactccaagcccttcctagctggtgccccttgagcctgtttacatcagtttaggggaagggggattgggtgaggtcatcctgaggactcgtccaccccaaaggtacctgtaattaccaacatttagctacaaaacaggtgacctgggaatggaagagtgaaacatgcaggaccacagggctcgcactgctggctggcagcagtcacagctgccgtgtactgggtgcctgcatgtacccaggacagcccaggaccgtgtattactcattagtgcacaagtattacttagtgcacaatatacagtctctagaagatgacttcttgccttcagtcgccgctccctttgatggctgtggttaggggtgtgctcgttcctctgccctggtttagacaggtacctgatagcacactgtggtgcttctcagtgggggtctgggggtcaaccagatcagaaacacttggatggggcctaacacagatgcccttctgggccctgttcatgcagtagagcatgtaagaaagctttaatcctcccaacatgcctgggagttaggtggtattctccttatctcacagagtagataatttgagacacagataattcgaggcacagagaatttgagacacttgcccaaggtcacacagctagaaggaggcagggctggagttctctgagtatataagacttacagacatactgtaagtatacctaagacttactgctttaaaagtcagtgccaagtgagtggaaaaattcattctgtaggttgttctgcctcaaaggtggcctgggcggagggatcttcggggtacccatgtcaccactgtcattcccaggggcgac

SEQ ID NO: 173062 - DNA, 987 bp, Artificial Sequence
  derived and/or modified sequence
atgaggcctgtgcggctgatgaaggtgtttgtgacccggcgcatcccagctgagggccgggtggccctggcccgggctgctgactgtgaggtggagcagtgggacagtgatgagcccatcccagccaaggagctggagcggggcgtggccggggcccacggcctgctgtgcctgctgagtgaccacgtggacaagaggatcctggatgctgctggggccaacctgaaggtgatcagcaccatgtctgtgggcatcgaccacctggccctggatgagatcaagaagaggggcatccgggtgggctacaccccagatgtgctgacagacaccacagctgagctggccgtgtccctgctgctgaccacctgccggcggctgcctgaggccatcgaggaggtgaagaatggaggctggacctcctggaagcccctgtggctgtgtggctacggcctgacccagagcacagtgggcatcatcggcctgggccgcatcggccaggccatcgcccggcggctgaagccctttggagtgcagcgcttcctgtacacaggccggcagcccaggcctgaggaggccgctgagttccaggccgagtttgtgtccaccccagagctggccgcccagagcgacttcatcgtggtggcctgcagcctgaccccagccacagagggcctgtgcaacaaggacttcttccagaagatgaaggagacagctgtgttcatcaacatcagcagaggagatgtggtgaaccaggatgacctgtaccaggccctggccagcggcaagattgctgctgctggcctggatgtgaccagccctgagcccctgcccaccaaccaccccctgctgaccctgaagaactgtgtgatcctgccccacatcggcagcgccacccacaggaccaggaacaccatgagcctgctggccgccaacaacctgctggccggcctgcggggggagcccatgcccagcgagctgaagctgtag

SEQ ID NO: 173063 - DNA, 1188 bp, Artificial Sequence
  derived and/or modified sequence
atgaggcctgtgcggctgatgaaggtgtttgtgacccggcgcatcccagctgagggccgggtggccctggcccgggctgctgactgtgaggtggagcagtgggacagtgatgagcccatcccagccaaggagctggagcggggcgtggccggggcccacggcctgctgtgcctgctgagtgaccacgtggacaagaggatcctggatgctgctggggccaacctgaaggtgatcagcaccatgtctgtgggcatcgaccacctggccctggatgagatcaagaagaggggcatccgggtgggctacaccccagatgtgctgacagacaccacagctgagctggccgtgtccctgctgctgaccacctgccggcggctgcctgaggccatcgaggaggtgaagaatggaggctggacctcctggaagcccctgtggctgtgtggctacggcctgacccagagcacagtgggcatcatcggcctgggccgcatcggccaggccatcgcccggcggctgaagccctttggagtgcagcgcttcctgtacacaggccggcagcccaggcctgaggaggccgctgagttccaggccgagtttgtgtccaccccagagctggccgcccagagcgacttcatcgtggtggcctgcagcctgaccccagccacagagggcctgtgcaacaaggacttcttccagaagatgaaggagacagctgtgttcatcaacatcagccgctacccccgggccaccctgcccagcaagccaggagaggagcccagccccctgctgcccagcggggacttcctgccccggggcctgctggtgcggccccaggccgagctggccggcttccacaagcccaacaaccagctgaggaacagctgggagtacacccggcccccctaccgggaggaggagcccagcgagtgggcctggcctgtgtgcttctctgctgtggcccccacccggcggggcctggcccacagctctgtggccagcggctctgtgccccgggagcccctgcaggcccactaccccccaccccagagagctggcctggaggacctgaagggccccctggaggccgccagccacacagctgagcccggctttgtgtggctgtggttcagtgacaccctgaacctgatgctgctgggcggccagaccctgaagctgacctggagctag

SEQ ID NO: 173064 - DNA, 987 bp, Artificial Sequence
  derived and/or modified sequence
atgcggcccgtgcggctgatgaaggtgttcgtgacccggcggatcccagctgaggggcgggttgccctggctcgggctgcagactgcgaggtggagcagtgggacagtgatgaaccaatccctgccaaggagctggaaagaggcgtagctggagcccacgggctgctgtgtctgctctccgaccatgtggataagcgaatactggacgccgccggagctaacctgaaggtgatctcaaccatgagcgtcggcattgatcatctcgcccttgatgaaataaagaaacgggggatacgggttgggtatactcctgacgtgctaaccgacactaccgccgagctggcagtgagtctgcttcttaccacttgtcgacggttacccgaggcaatagaggaggtcaaaaacgggggctggacaagctggaaacccctctggctgtgtggatacggattaacgcagagcacagtgggcatcattggattggggagaatcgggcaggcaatcgcccggaggcttaagccttttggcgtgcagcgttttttgtacactgggcggcaacctagaccagaagaagccgccgaatttcaggctgagtttgtgagtacaccggagctagccgcgcaaagcgacttcatcgtcgtggcctgctccttgacccccgcaaccgagggcctgtgcaataaagatttcttccaaaagatgaaagagaccgctgtgtttatcaacatcagcaggggtgatgtcgtgaatcaggatgacctttaccaggctctcgcttccgggaaaatagccgcagccgggctggacgttacctcccctgagcctcttcctaccaatcacccgctactgaccttaaaaaattgtgtgatcctaccccacattggatccgccactcacaggacacgcaataccatgagcctattagccgcgaataatctccttgcaggcctgaggggcgaaccaatgccaagcgaactcaaactgtag

SEQ ID NO: 173065 - DNA, 1188 bp, Artificial Sequence
  derived and/or modified sequence
atgcggcccgtgcggctgatgaaggtgttcgtgacccggcggatcccagctgagggtagagttgctctggccagagcggctgactgtgaagtcgaacagtgggatagtgatgaacccatccccgccaaggaacttgagcggggggttgccggggcccacggcctgctttgtctgctgagcgaccatgtggacaaaagaatcctggatgccgcaggtgccaacctgaaagtgatatccacaatgtcagtcggtatcgaccaccttgctcttgacgaaatcaagaaacggggcattcgcgtcggctataccccagatgtgctgaccgacacgacggctgagcttgccgtgagccttctgctgaccacatgtcgtagacttccagaagctatcgaggaagtgaaaaacggtggttggacgagctggaagccactctggctgtgtggttacggccttacacaatcgactgtcggcattattggcctgggcaggatcggccaggcgattgccagacgtctcaagccttttggtgtccagagattcctctataccggacgtcagcccaggccggaagaagccgctgagttccaagcagagttcgtcagtacaccagagctggcggctcaatctgatttcattgtggtcgcatgctctttgacaccagctaccgagggtctatgcaataaggacttctttcagaaaatgaaggaaacggcagtctttatcaacatctccaggtatcctcgcgcaacgctcccttcaaagcccggcgaagaacccagcccactcctgccttcaggagactttctgcctcgaggcttactagtgcgtccccaagccgaactagccggattccacaagccaaacaaccaattgagaaattcttgggaatatacacgtccaccctacagggaggaagaacccagtgaatgggcatggccagtgtgtttttccgccgtcgctcctacaaggagaggactggctcactccagcgtcgcctccggtagcgtccctagagagcccctccaggctcattaccccccccctcagcgcgccgggttggaggatctgaaggggccgttggaagcagcatcacacacagccgagcctggcttcgtgtggctttggttcagcgatacactgaatctgatgctgttagggggacaaaccctcaaattaacctggtcctag

SEQ ID NO: 173066 - DNA, 987 bp, Artificial Sequence
  derived and/or modified sequence
atgcgacccgtgcgcttgatgaaagtttttgtgactcggcgtatccctgccgaagggagagtggccttggcaagggctgcggactgtgaagttgagcagtgggatagcgatgagcccatcccagccaaggagctcgaaaggggggtggcaggtgcacacgggcttctgtgcctgcttagcgaccatgtggacaaacgtatactcgacgccgctggagccaatcttaaggtcatatcaactatgtccgtgggcatcgatcatctcgcccttgacgaaatcaagaagcgtggaataagagtgggatacaccccagacgtcctcacagatacgactgccgagctggctgttagtctactgctcacaacctgtagaagactccctgaagccatcgaggaagtgaagaacgggggatggacctcctggaagccactgtggctatgtggctacggtctgacacagagtactgtaggcatcataggattgggacgtattggacaggccatcgccagacggctcaagcctttcggggtgcaaaggttcctatatacaggccgacagcctcgtccggaggaggcagccgagtttcaagccgagttcgtgtccacgcccgagctggccgcacagtctgattttattgtggttgcctgtagcttgacgcctgccactgagggactttgtaataaggacttttttcagaaaatgaaggagaccgcagttttcattaatatatctcgtggggacgtcgtgaaccaggatgatctgtaccaagcgctggcctctggtaagatcgccgcagccggacttgatgtcacgtcccccgaaccattgcctaccaaccaccccctgctcaccctgaaaaactgtgtgatcctaccccacatcgggtctgcaactcataggactaggaataccatgagcctactggcagcaaacaacctgttggccggtttaaggggtgagccgatgccctccgagctgaagctgtag

SEQ ID NO: 173067 - DNA, 1188 bp, Artificial Sequence
  derived and/or modified sequence
atgcgcccagtgcgcttgatgaaggtttttgtgacccgcaggatacccgctgagggaagggttgccctcgccagagcggcagactgtgaagtggagcagtgggactctgacgagccaattccggcaaaagagctggagcgcggagtggcaggagcccatggcttgttgtgcctcctaagcgatcatgtcgacaagcgtatcctcgacgccgcaggtgccaatctgaaagtcatctctactatgagtgtggggatcgaccatcttgctctggacgagattaagaagagaggcatcagggttggttataccccagacgtgctgaccgacaccacagccgaactcgccgtaagcttgctcttaactacctgccggcgattacctgaagccatagaagaagttaaaaacggtgggtggacgtcatggaaacctctctggttatgcggatatggcctgacccagtcgacggttggtattatcggtttgggtaggattggccaggccattgcgcgtcggctgaagcctttcggcgttcaacgctttctgtacacaggacgtcagcctaggccagaagaagctgcagagttccaggcagagttcgtatccacaccagaactggcagcacaatctgattttatcgtggtcgcctgctcacttacaccagccactgaggggctctgtaataaggacttcttccagaaaatgaaagagaccgctgtttttataaatatcagtcgttacccgagagccacactgcccagcaaacccggagaagagccgtctcctctgttgcccagtggagattttttgccaagaggactcctggtgagacctcaagcagaattagctggttttcataagccaaataatcagctaaggaacagctgggaatacaccaggccaccctatcgcgaggaagaacccagtgagtgggcctggcctgtctgcttttcagccgtggcacctacacgcagaggcctcgcccacagcagtgtggcatcagggagcgtgccacgcgaacctctacaggcccactatccacccccacagagagctggcctcgaggacctaaagggacccttggaggccgcatcacacaccgctgagccgggattcgtctggctttggtttagcgacacattgaacctaatgctcctgggcggacagacactcaagctgacatggtcatag

SEQ ID NO: 173068 - DNA, 987 bp, Artificial Sequence
  derived and/or modified sequence
atgagacccgtgagactgatgaaggtgttcgtgaccagaagaatccccgccgagggcagagtggccctggccagagccgccgactgcgaggtggagcagtgggacagcgacgagcccatccccgccaaggagctggagagaggcgtggccggcgcccacggcctgctgtgcctgctgagcgaccacgtggacaagagaatcctggacgccgccggcgccaacctgaaggtgatcagcaccatgagcgtgggcatcgaccacctggccctggacgagatcaagaagagaggcatcagagtgggctacacccccgacgtgctgaccgacaccaccgccgagctggccgtgagcctgctgctgaccacctgcagaagactgcccgaggccatcgaggaggtgaagaacggcggctggaccagctggaagcccctgtggctgtgcggctacggcctgacccagagcaccgtgggcatcatcggcctgggcagaatcggccaggccatcgccagaagactgaagcccttcggcgtgcagagattcctgtacaccggcagacagcccagacccgaggaggccgccgagttccaggccgagttcgtgagcacccccgagctggccgcccagagcgacttcatcgtggtggcctgcagcctgacccccgccaccgagggcctgtgcaacaaggacttcttccagaagatgaaggagaccgccgtgttcatcaacatcagcagaggcgacgtggtgaaccaggacgacctgtaccaggccctggccagcggcaagatcgccgccgccggcctggacgtgaccagccccgagcccctgcccaccaaccaccccctgctgaccctgaagaactgcgtgatcctgccccacatcggcagcgccacccacagaaccagaaacaccatgagcctgctggccgccaacaacctgctggccggcctgagaggcgagcccatgcccagcgagctgaagctgtag

SEQ ID NO: 173069 - DNA, 1188 bp, Artificial Sequence
  derived and/or modified sequence
atgagacccgtgagactgatgaaggtgttcgtgaccagaagaatccccgccgagggcagagtggccctggccagagccgccgactgcgaggtggagcagtgggacagcgacgagcccatccccgccaaggagctggagagaggcgtggccggcgcccacggcctgctgtgcctgctgagcgaccacgtggacaagagaatcctggacgccgccggcgccaacctgaaggtgatcagcaccatgagcgtgggcatcgaccacctggccctggacgagatcaagaagagaggcatcagagtgggctacacccccgacgtgctgaccgacaccaccgccgagctggccgtgagcctgctgctgaccacctgcagaagactgcccgaggccatcgaggaggtgaagaacggcggctggaccagctggaagcccctgtggctgtgcggctacggcctgacccagagcaccgtgggcatcatcggcctgggcagaatcggccaggccatcgccagaagactgaagcccttcggcgtgcagagattcctgtacaccggcagacagcccagacccgaggaggccgccgagttccaggccgagttcgtgagcacccccgagctggccgcccagagcgacttcatcgtggtggcctgcagcctgacccccgccaccgagggcctgtgcaacaaggacttcttccagaagatgaaggagaccgccgtgttcatcaacatcagcagataccccagagccaccctgcccagcaagcccggcgaggagcccagccccctgctgcccagcggcgacttcctgcccagaggcctgctggtgagaccccaggccgagctggccggcttccacaagcccaacaaccagctgagaaacagctgggagtacaccagacccccctacagagaggaggagcccagcgagtgggcctggcccgtgtgcttcagcgccgtggcccccaccagaagaggcctggcccacagcagcgtggccagcggcagcgtgcccagagagcccctgcaggcccactacccccccccccagagagccggcctggaggacctgaagggccccctggaggccgccagccacaccgccgagcccggcttcgtgtggctgtggttcagcgacaccctgaacctgatgctgctgggcggccagaccctgaagctgacctggagctag

SEQ ID NO: 173070 - protein, 286 aa, Artificial Sequence
  derived and/or modified sequence
MERRLGVRAWVKENRGSFQPPVCNKLMHQEQLKVMFIGGPNTRKDYHIEEGEEVFYQLEGDMVLRVLEQGKHRDVVIRQGEIFLLPARVPHSPQRFANTVGLVVERRRLETELDGLRYYVGDTMDVLFEKWFYCKDLGTQLAPIIQEFFSSEQYRTGKPIPDQLLKEPPFPLSTRSIMEPMSLDAWLDSHHRELQAGTPLSLFGDTYETQVIAYGQGSSEGLRQNVDVWLWQLEGSSVVTMGGRRLSLAPDDSLLVLAGTSYAWERTQGSVALSVTQDPACKKPLG

SEQ ID NO: 173071 - DNA, 861 bp, Artificial Sequence
  derived and/or modified sequence
atggagagacgactcggagtgcgcgcgtgggtaaaggaaaatcggggctcttttcagcctccggtttgtaacaaacttatgcaccaggagcagcttaaagtcatgttcatagggggtcctaatacacgtaaagactatcatatagaggagggcgaagaagtcttctaccaactcgagggggacatggtcctccgggtgctcgagcagggtaagcacagggacgtcgtgatccgccagggcgagatattcctgctccctgccagggtgcctcattccccccagcgattcgccaacaccgtgggcctggtcgtggaaaggcgcagattggagactgagctcgatggactacggtattacgtgggagacactatggatgtgttgttcgaaaaatggttttactgtaaagaccttggaactcagttagctcctatcatccaggagttcttctcgagtgagcagtataggacaggaaagccaatcccagaccagctcttgaaggaacctccatttccactctctacacggtcgattatggaaccaatgagtttggatgcatggctggattctcaccaccgcgaattacaggccgggactcccctgtcattgtttggagacacctacgagacgcaggtaattgcctatggacaaggttctagcgagggtcttaggcagaacgtggatgtgtggctatggcagctggaaggcagctctgttgttaccatgggcggccgacgactgtccctggctccggatgattccctgctggttcttgctggcacatcatacgcctgggaacggacccagggaagcgtcgccctgagtgtcacacaagaccctgcatgcaaaaagcccctgggctag

SEQ ID NO: 173072 - DNA, 861 bp, Artificial Sequence
  derived and/or modified sequence
atggagcggcggctgggcgtgcgggcctgggtgaaggaaaatagaggcagcttccagccccctgtgtgcaacaagctgatgcaccaggagcagctgaaggtgatgtttattggaggccccaacaccaggaaggactaccacatcgaggagggggaggaggtgttctaccagctggagggggacatggtgctgcgggtgctggagcagggcaagcacagagatgtggtgatccggcagggcgagatcttcctgctgcctgcccgggtgccccacagcccccagagatttgccaacacagtgggcctggtggtggagcggcggcggctggagacagagctggatggcctgcgctactacgtgggggacaccatggatgtgctgtttgagaagtggttctactgcaaggacctgggcacccagctggcccccatcatccaggagttcttcagcagcgagcagtacagaacaggcaagcccatcccagaccagctgctgaaggagccccccttccccctgagcaccaggagcatcatggagcccatgagcctggatgcctggctggacagccaccaccgggagctgcaggccggcacccccctgagcctgtttggagacacctatgagacccaggtgattgcctacggccagggcagcagcgagggcctgcggcagaatgtggatgtgtggctgtggcagctggagggcagctctgtggtgaccatgggcggccggcggctgagcctggccccagatgacagcctgctggtgctggccggcaccagctatgcctgggagaggacccagggctctgtggccctgtctgtgacccaggaccctgcctgcaagaagcccctgggctag

SEQ ID NO: 173073 - DNA, 861 bp, Artificial Sequence
  derived and/or modified sequence
atggagcggcggctgggcgtgcgggcctgggtgaaggagaaccggggatctttccaacctccggtgtgcaataaacttatgcatcaggagcaactcaaagtcatgttcatcggcggacctaacacgcgcaaagactatcacatagaggagggcgaagaggttttctatcagctcgaaggtgatatggtgctgagagtgctcgagcagggcaagcatagagatgtcgtgatcaggcagggtgagatctttttgcttccagctagggtgcctcattcgccccagagatttgcgaacaccgtcggactagtggtggaacgtaggcgcctggagaccgaactggatggcctccgctactacgtgggcgatacaatggacgttctcttcgagaaatggttctactgcaaagacctgggcacccaattagcaccaatcattcaggaatttttcagctccgagcagtataggacagggaaacccatccccgaccagttgctcaaagagccaccgttcccactgtctactaggtccattatggagccgatgagtcttgacgcatggcttgattcccaccatcgcgaactgcaggctggcaccccactgtctctgttcggcgacacctatgaaacccaggtgatagcttacgggcagggcagcagcgaagggttgcggcagaacgttgacgtgtggctgtggcagctggagggcagctcagtcgttactatgggcggccggagattgtcccttgctcccgacgacagcctgctcgtcctcgccggcactagctacgcttgggaaaggacccagggcagtgtggcgctgtctgtgacacaggaccctgcatgtaagaaaccgcttggctag

SEQ ID NO: 173074 - DNA, 861 bp, Artificial Sequence
  derived and/or modified sequence
atggaacgcagactgggcgtgagagcatgggttaaagaaaaccggggaagctttcagcccccagtgtgtaacaagctcatgcatcaggaacagctgaaggtaatgttcataggagggcctaacacaagaaaagactaccatatcgaggaaggcgaagaagtgttttaccaattggagggcgacatggtgctgcgcgtgttggagcagggcaagcatcgagacgtagttattcggcagggagagattttcctgctgcccgcacgagtgccccactccccacagcgattcgccaatactgtggggctcgtggttgagcgtcgcaggctggaaactgagctggatggcttaagatattacgtgggtgatacaatggacgtactttttgaaaagtggttctactgcaaggaccttggtacacaacttgcccctatcattcaggagttcttttcgtccgagcagtatcggacaggaaagcccatcccagatcagctgcttaaggagccaccatttccactcagtacccggtcaataatggaacccatgtccctagatgcttggctcgatagccaccatcgagagctgcaggccggtactccgctgagcctcttcggcgatacctacgaaacacaggtgatcgcgtatgggcagggatcttccgaaggcctgcgtcagaatgtggacgtctggctgtggcagctagaggggagcagcgtggtgacaatgggcggacgtcgtctgagcttggcacccgacgatagcttgctggtgctcgcaggcacttcatatgcttgggaacgcacccaaggcagcgtggctctgagtgtgacccaggatcccgcatgtaagaaacccctgggatag

SEQ ID NO: 173075 - DNA, 1265 bp, Artificial Sequence
  derived and/or modified sequence
gctgcgggcctccgacggcgggaggacagcgctgcgaggaggcgcccgggacagtcatggagcgccgcctgggagtgagggcctgggtgaaggagaaccggggctccttccagcccccggtctgcaacaagctcatgcaccaggagcagctcaaagtcatgttcatcggaggccccaacaccaggaaggactatcacatcgaagagggtgaagaggtattttaccagctggagggagacatggttctccgagtcctggagcaagggaaacaccgggatgtggtcattcggcagggagagatattcctcctgcctgccagggtgccccactcaccacagaggtttgccaacaccgtggggctggtggttgagcgaaggcggctggagaccgagctagatgggctcaggtactatgtgggcgacaccatggacgttctgtttgagaagtggttctactgcaaggacctcggcacgcagttggcccccatcatccaggagttcttcagctctgagcagtacagaacaggaaagcccatccctgaccagctgctcaaggagccaccattccctctgagcacacgatccatcatggagcccatgtccctggatgcctggctggacagccaccacagggagctgcaggcaggcacaccactcagcctgtttggggacacctatgagacccaggtgatcgcctatgggcaaggcagcagcgaaggcctgagacagaatgtggacgtgtggctgtggcagctggagggctcctcggtggtgacaatggggggacggcgcctgagcctggcccctgatgacagcctcctggtgctagctgggacctcgtatgcctgggagcgaacacaaggctctgtggccctgtctgtgacccaggaccctgcctgcaagaagcccctggggtgaccctcttgccatggcctgaagcagccacaggtgtgccaagcaccctcgagtgccatccctgccaaacaactctcccagcccccactacctctctgtgtactgccgctgtgtcccccacagacctgcacattgttgtcacccaccctcctgcccttctcagcccagatgccatgcccctgggcgggcagcagctccccatcttctctggcagactcagcccactgccttgccagtcttgccaggtggtctacccccggccccgctcctgcccattcctctgtccctgcagactcagtgcagcacttccacaccaagaaggccctcaataaaggcttcctgaggaacgca

SEQ ID NO: 173076 - DNA, 861 bp, Artificial Sequence
  derived and/or modified sequence
atggagagaagactgggcgtgagagcctgggtgaaggagaacagaggcagcttccagccccccgtgtgcaacaagctgatgcaccaggagcagctgaaggtgatgttcatcggcggccccaacaccagaaaggactaccacatcgaggagggcgaggaggtgttctaccagctggagggcgacatggtgctgagagtgctggagcagggcaagcacagagacgtggtgatcagacagggcgagatcttcctgctgcccgccagagtgccccacagcccccagagattcgccaacaccgtgggcctggtggtggagagaagaagactggagaccgagctggacggcctgagatactacgtgggcgacaccatggacgtgctgttcgagaagtggttctactgcaaggacctgggcacccagctggcccccatcatccaggagttcttcagcagcgagcagtacagaaccggcaagcccatccccgaccagctgctgaaggagccccccttccccctgagcaccagaagcatcatggagcccatgagcctggacgcctggctggacagccaccacagagagctgcaggccggcacccccctgagcctgttcggcgacacctacgagacccaggtgatcgcctacggccagggcagcagcgagggcctgagacagaacgtggacgtgtggctgtggcagctggagggcagcagcgtggtgaccatgggcggcagaagactgagcctggcccccgacgacagcctgctggtgctggccggcaccagctacgcctgggagagaacccagggcagcgtggccctgagcgtgacccaggaccccgcctgcaagaagcccctgggctag

SEQ ID NO: 173077 - protein, 506 aa, Artificial Sequence
  derived and/or modified sequence
MPLLGLLPRRAWASLLSQLLRPPCASCTGAVRCQSQVAEAVLTSQLKAHQEKPNFIIKTPKGTRDLSPQHMVVREKILDLVISCFKRHGAKGMDTPAFELKETLTEKYGEDSGLMYDLKDQGGELLSLRYDLTVPFARYLAMNKVKKMKRYHVGKVWRRESPTIVQGRYREFCQCDFDIAGQFDPMIPDAECLKIMCEILSGLQLGDFLIKVNDRRIVDGMFAVCGVPESKFRAICSSIDKLDKMAWKDVRHEMVVKKGLAPEVADRIGDYVQCHGGVSLVEQMFQDPRLSQNKQALEGLGDLKLLFEYLTLFGIADKISFDLSLARGLDYYTGVIYEAVLLQTPTQAGEEPLNVGSVAAGGRYDGLVGMFDPKGHKVPCVGLSIGVERIFYIVEQRMKTKGEKVRTTETQVFVATPQKNFLQERLKLIAELWDSGIKAEMLYKNNPKLLTQLHYCESTGIPLVVIIGEQELKEGVIKIRSVASREEVAIKRENFVAEIQKRLSES

SEQ ID NO: 173078 - protein, 466 aa, Artificial Sequence
  derived and/or modified sequence
MPLLGLLPRRAWASLLSQLLRPPCASCTGAVRCQSQVAEAVLTSQLKAHQEKPNFIIKTPKETLTEKYGEDSGLMYDLKDQGGELLSLRYDLTVPFARYLAMNKVKKMKRYHVGKVWRRESPTIVQGRYREFCQCDFDIAGQFDPMIPDAECLKIMCEILSGLQLGDFLIKVNDRRIVDGMFAVCGVPESKFRAICSSIDKLDKMAWKDVRHEMVVKKGLAPEVADRIGDYVQCHGGVSLVEQMFQDPRLSQNKQALEGLGDLKLLFEYLTLFGIADKISFDLSLARGLDYYTGVIYEAVLLQTPTQAGEEPLNVGSVAAGGRYDGLVGMFDPKGHKVPCVGLSIGVERIFYIVEQRMKTKGEKVRTTETQVFVATPQKNFLQERLKLIAELWDSGIKAEMLYKNNPKLLTQLHYCESTGIPLVVIIGEQELKEGVIKIRSVASREEVAIKRENFVAEIQKRLSES

SEQ ID NO: 173079 - DNA, 1521 bp, Artificial Sequence
  derived and/or modified sequence
atgcccctcttaggccttctcccacgacgggcttgggcatccctcctgtctcagttgctgcggccaccatgtgccagttgcacaggcgccgtgaggtgccaatctcaggtggcagaggccgtacttactagccagctgaaggcacatcaggagaaaccaaattttattattaagacccccaaaggaaccagggacctatccccccagcacatggtggttcgagaaaaaatcctcgacctcgtcatctcctgttttaaacggcatggcgccaaggggatggacactcctgcctttgaactgaaagagaccctaacagagaagtatggagaagattccgggttgatgtacgatcttaaggaccaaggaggagaattgctttctctgcgctatgatctgactgtgccgtttgccagatatcttgcgatgaacaaagttaaaaaaatgaagaggtaccatgtgggcaaagtctggagacgagaatcgcccactatcgtccagggtaggtatcgcgagttctgccagtgcgatttcgatattgctggacagtttgatcctatgattcccgacgctgagtgcttgaaaatcatgtgcgaaatattgtcagggctgcagctgggcgactttctgataaaagttaacgaccgccgaattgtcgacgggatgtttgccgtgtgtggcgtgcccgagtctaaattcagggctatctgttcttctatcgacaagctcgacaaaatggcttggaaggacgtgcgacatgagatggtggtgaaaaaaggcttagcccccgaggtggccgacagaatcggcgactacgtgcagtgccatggcggtgtttcactggttgaacagatgttccaggaccctcgcctatctcagaacaaacaggcattggagggcctcggggatttaaaactgttgttcgagtatttgacactattcggaattgcagataagatctctttcgacctgagcctagcccgggggctggattactacaccggggtgatttatgaggccgttctcctgcagacaccaacacaagctggagaagaaccgctcaacgtgggtagtgtggcagccggaggacgctatgacggattggtgggcatgttcgatccaaaaggtcacaaggttccctgtgtcggtctgtctataggagtcgagcgaatcttctatatcgtggagcagaggatgaaaacaaaaggcgagaaggtgcggaccaccgaaacccaagtctttgtcgccaccccccaaaaaaactttctccaggagcgactcaagctcatcgcggagctttgggactctgggataaaagcggaaatgctgtataagaataacccgaagctgttgactcagcttcactattgtgagagcaccggaatacccctcgtggtcattattggcgagcaggagttgaaagagggagtgataaaaatacgaagcgtggcctcaagggaggaagtggccatcaaaagagaaaatttcgtggctgaaatccagaaaagactctcagagagctag

SEQ ID NO: 173080 - DNA, 1521 bp, Artificial Sequence
  derived and/or modified sequence
atgcccctgctgggcctgctgccccggcgggcctgggccagcctgctgagccagctgctgcggcccccctgtgccagctgcaccggggctgtgcgctgccagagccaggtggccgaggccgtgctgaccagccagctgaaggcccaccaggagaagcccaacttcatcatcaagacccccaagggcacccgggacctgagcccccagcacatggtggtgcgggagaagatcctggacctggtgatcagctgcttcaagagacatggagccaagggcatggacaccccagcctttgagctgaaggagaccctgacagagaagtacggggaggacagcggcctgatgtatgacctgaaggaccagggcggggagctgctgagcctgcgctatgacctgactgtgccctttgcccgctacctggccatgaacaaggtgaagaagatgaagcgctaccacgtgggcaaggtgtggaggcgggagagccccaccatcgtgcagggccgctaccgggagttctgccagtgtgactttgatattgctggccagtttgaccccatgatcccagatgctgaatgtctgaagatcatgtgtgagatcctgagcggcctgcagctgggggacttcctgatcaaggtgaatgacagaagaattgtggatggcatgtttgctgtgtgtggggtgcctgagagcaagttccgggccatctgcagcagcattgacaagctggacaagatggcctggaaggatgtgagacatgagatggtggtgaagaagggcctggcccctgaggtggccgaccgcatcggggactatgtgcagtgccacggcggcgtgtccctggtggagcagatgttccaggacccccggctgagccagaacaagcaggccctggagggcctgggggacctgaagctgctgtttgagtacctgaccctgtttggaattgctgacaagatcagctttgacctgagcctggcccggggcctggactactacacaggagtcatctatgaagctgtgctgctgcagacccccacccaggccggggaggagcccctgaatgtgggctctgtggccgccggcggccgctatgatggcctggtgggcatgtttgaccccaagggccacaaggtgccctgtgtgggcctgagcattggagtggagcgcatcttctacatcgtggagcagaggatgaagaccaagggggagaaggtgaggaccacagagacccaggtgtttgtggccaccccccagaagaacttcctgcaggagcggctgaagctgattgctgagctgtgggacagcggcatcaaggccgagatgctgtacaagaacaaccccaagctgctgacccagctgcactactgtgagagcacaggcatccccctggtggtgatcattggagagcaggagctgaaggagggcgtcatcaagatccgctctgtggccagccgggaggaggtggccatcaagagagaaaattttgtggccgagatccagaagaggctgtctgagagctag

SEQ ID NO: 173081 - DNA, 1521 bp, Artificial Sequence
  derived and/or modified sequence
atgcccctgctgggcctgctgccccggcgggcctgggccagcctgctctcccagctgctgcggcccccttgcgcctcctgcacgggcgcagtgcgatgtcagtcgcaggttgccgaagcagttctgacctcccaattaaaagcgcatcaggagaagcccaactttattataaaaacccctaagggaacccgagacctcagccctcagcacatggttgtcagggagaagattctggacttggtgatctcctgctttaagaggcacggtgcgaaaggcatggatacacctgcatttgagctcaaagagactcttacggaaaagtacggagaagactccggactcatgtatgaccttaaagatcagggtggcgagttgctatccttacgatatgaccttactgttccatttgccagatacctcgctatgaataaggtgaaaaaaatgaaaaggtatcacgtgggcaaggtgtggagacgtgagtcccccacaatagtacaaggtcggtaccgtgaattctgtcaatgcgatttcgacatcgccggtcagttcgaccctatgatacccgatgccgaatgcctgaaaattatgtgtgaaatcctgtccggcctccagctgggagattttttaattaaggtgaacgataggagaattgttgatggcatgttcgcggtttgtggcgtgcctgagtcaaagtttcgcgctatttgcagctccatcgacaagctagacaaaatggcgtggaaagatgtccgccatgagatggtcgtgaaaaaggggttggctcccgaagtggcggaccgcattggcgattacgttcagtgccatggcggggtgagtctggttgaacagatgttccaagatccccggctttcacagaacaagcaggccctggagggtctgggtgacttaaagctactgtttgaatacctcaccctcttcgggatagccgataagatttcattcgacctcagcctggccaggggcttggactactacaccggcgtgatttatgaggctgtcctgctccaaacacctacacaagctggggaagaaccactgaatgtgggcagcgtggcagctggcggaagatatgacggcttggtggggatgtttgaccccaaggggcataaagtaccctgcgttggcctgtcaataggagtggaacggattttttacatcgtggagcagagaatgaagactaaaggggaaaaagtccgcacaacagaaactcaggtcttcgtcgctactcctcagaagaatttcctgcaggagaggctcaagcttatcgccgagctctgggactccgggattaaggctgaaatgctgtacaaaaataatcccaagctactaactcaactgcattattgtgaatcaacagggattccactggtagtgattatcggcgaacaggagttgaaagaaggggttattaaaatacggagcgtggctagtagagaggaagtggcaatcaaacgggaaaactttgtggctgagattcagaagaggctaagcgagtcatag

SEQ ID NO: 173082 - DNA, 1521 bp, Artificial Sequence
  derived and/or modified sequence
atgccactgttgggacttctccctcgacgcgcttgggccagcctcctgtcccagcttctccgtcccccttgtgcttcatgtaccggggctgtcagatgccaatctcaggtagccgaggccgtgctcacatcacaactgaaggcacaccaggagaagccgaacttcatcatcaagactccgaaagggacacgggatcttagcccacagcatatggtcgttcgcgagaaaattttagacctggtgatttcttgttttaaaagacacggagccaaggggatggatacccctgcctttgaattgaaggaaactctcacagaaaagtacggagaagactccgggctgatgtacgatctcaaggaccagggaggcgagttgctgtctctgcgatacgatctgactgtgccattcgcccgttacctcgcgatgaataaagtgaagaaaatgaaacggtatcacgttgggaaggtgtggcgcagagagtccccaaccattgtccaaggcagatacagagagttctgccagtgtgatttcgacattgcaggccaattcgatccaatgatccccgacgctgagtgtctaaagatcatgtgcgagatactctctggcttgcaactgggcgatttcttaataaaggtgaatgataggcggatagtggatggtatgtttgcagtctgcggcgtgcctgaatctaagtttagagctatctgctctagcatcgacaaattggataagatggcttggaaagacgttaggcatgagatggtcgttaagaagggcctggctcctgaagttgctgatcggattggggattacgtgcaatgtcacggaggcgtctctcttgtcgaacagatgttccaggacccaagattgtctcagaacaagcaggcactggaggggctcggtgatctgaagctgctgtttgagtacttaactttattcgggatcgctgataagatcagtttcgatctgagccttgctcgcggattagactattacaccggcgtcatttacgaggcggtgctgcttcagacacccacccaagcaggcgaagagccactgaatgttggatcagttgcagccggtggtaggtacgatgggctggtaggcatgttcgacccaaaaggacacaaggtcccttgtgtaggcctcagcatcggcgtggagagaatcttctacatcgtggagcaaagaatgaaaaccaagggggagaaggtgcgcaccacagaaacccaggtctttgtggcgacgcctcaaaagaacttcctgcaggagcgcctaaaattgattgccgagctgtgggactcagggatcaaggcagagatgctctataagaataaccccaagctccttacacagctgcactattgtgagagtactggcattcctctggtggtgatcataggggagcaggagctgaaggaaggggtcattaagattagatcagttgcaagtcgagaagaggtggcaatcaaacgcgaaaatttcgttgccgagattcaaaaacgattatccgaatcttag

SEQ ID NO: 173083 - DNA, 1521 bp, Artificial Sequence
  derived and/or modified sequence
atgcccctgctgggcctgctgcccagaagagcctgggccagcctgctgagccagctgctgagacccccctgcgccagctgcaccggcgccgtgagatgccagagccaggtggccgaggccgtgctgaccagccagctgaaggcccaccaggagaagcccaacttcatcatcaagacccccaagggcaccagagacctgagcccccagcacatggtggtgagagagaagatcctggacctggtgatcagctgcttcaagagacacggcgccaagggcatggacacccccgccttcgagctgaaggagaccctgaccgagaagtacggcgaggacagcggcctgatgtacgacctgaaggaccagggcggcgagctgctgagcctgagatacgacctgaccgtgcccttcgccagatacctggccatgaacaaggtgaagaagatgaagagataccacgtgggcaaggtgtggagaagagagagccccaccatcgtgcagggcagatacagagagttctgccagtgcgacttcgacatcgccggccagttcgaccccatgatccccgacgccgagtgcctgaagatcatgtgcgagatcctgagcggcctgcagctgggcgacttcctgatcaaggtgaacgacagaagaatcgtggacggcatgttcgccgtgtgcggcgtgcccgagagcaagttcagagccatctgcagcagcatcgacaagctggacaagatggcctggaaggacgtgagacacgagatggtggtgaagaagggcctggcccccgaggtggccgacagaatcggcgactacgtgcagtgccacggcggcgtgagcctggtggagcagatgttccaggaccccagactgagccagaacaagcaggccctggagggcctgggcgacctgaagctgctgttcgagtacctgaccctgttcggcatcgccgacaagatcagcttcgacctgagcctggccagaggcctggactactacaccggcgtgatctacgaggccgtgctgctgcagacccccacccaggccggcgaggagcccctgaacgtgggcagcgtggccgccggcggcagatacgacggcctggtgggcatgttcgaccccaagggccacaaggtgccctgcgtgggcctgagcatcggcgtggagagaatcttctacatcgtggagcagagaatgaagaccaagggcgagaaggtgagaaccaccgagacccaggtgttcgtggccaccccccagaagaacttcctgcaggagagactgaagctgatcgccgagctgtgggacagcggcatcaaggccgagatgctgtacaagaacaaccccaagctgctgacccagctgcactactgcgagagcaccggcatccccctggtggtgatcatcggcgagcaggagctgaaggagggcgtgatcaagatcagaagcgtggccagcagagaggaggtggccatcaagagagagaacttcgtggccgagatccagaagagactgagcgagagctag

SEQ ID NO: 173084 - DNA, 1401 bp, Artificial Sequence
  derived and/or modified sequence
atgcccctgttgggcctgctgccacgccgggcttgggcatcacttctttctcagttgctcaggcctccctgcgcgtcttgtacgggcgccgttaggtgccagagccaggtcgctgaggccgtgcttacctctcaacttaaggcacatcaggagaaacctaactttatcatcaaaacgcccaaagagaccctcaccgagaagtacggcgaggatagcggattgatgtacgacctcaaggaccagggcggtgagctgctgagcctgcgctatgacttgaccgtgccatttgcacgctacttggcaatgaataaggtgaagaagatgaagagataccatgttggaaaggtgtggcggagggagtccccaactatcgttcaaggtcggtatagagaattttgccaatgtgactttgatatcgccggccagtttgacccgatgatacccgacgctgaatgtctgaagatcatgtgtgagatactgtcaggactgcagttgggtgattttctgatcaaagtgaatgatcgtcgcatcgtggatgggatgttcgctgtctgcggtgtccctgagagcaagttccgagcaatctgtagtagtattgataagcttgataaaatggcatggaaagacgtaagacacgagatggtcgttaaaaagggcctcgccccagaggtcgctgaccgcattggcgactatgtgcaatgtcacgggggagtcagcttggttgagcaaatgtttcaggacccccgactgagccagaacaagcaggcactggagggtttaggcgatctgaagctattatttgaatacttgactctattcgggatcgcagataaaatctcattcgatctgagcttggctaggggtttagactactacaccggagtaatttatgaggccgtgttgcttcagactcccactcaggcaggggaagaacccctgaacgtaggctccgtggcggccggcggacgctatgacggtcttgtggggatgttcgaccccaagggacacaaggttccatgcgttgggttatctattggggtggagagaatcttctacattgtggagcaaaggatgaagacaaagggggagaaggttaggactacagaaacacaggtgtttgtggccacaccccagaagaacttcctccaggagagactcaagctaatcgcagaactgtgggattccgggatcaaagctgaaatgctgtacaaaaataaccctaaactgctgactcagctgcactactgtgagtccacagggattcctctagtggtaataatcggtgagcaagagctcaaagaaggggtcatcaaaatacgaagtgtcgcatcccgtgaggaagtcgcaattaagagagagaatttcgtagctgagatacagaagcgattgtccgaaagctag

SEQ ID NO: 173085 - DNA, 2483 bp, Artificial Sequence
  derived and/or modified sequence
aaaaattatttccggctcctcccggaagtgccgaagctggctactaagggaacttgggaggatcccacctcagccttcgtgactagtgaggtgcgcaaacgcccgagttttccctggtgcgcgggttccgcctttgcagtgccctccacccttcctggtgtctgacccgcctccttcccaggccttttgttcctgtcccggaaagccggcgtcctgccgcgcgatgcccctgctcggacttcttcccaggagggcctgggcttcgctgctcagccagctcctgcgaccgccctgcgcttcgtgcaccggggcggtccgttgccaaagccaggttgcagaggcagtgttaacatcccaactgaaagcacatcaagagaaaccaaattttattatcaagaccccaaagggtaccagggatcttagtcctcagcatatggttgtgagggagaaaattcttgatttggttatcagctgctttaaacgtcatggagcaaaggggatggacaccccagcatttgagctgaaggaaaccctgactgagaagtatggagaggactctgggctcatgtatgatctgaaggatcaaggtggagagctgttgtccctccgctatgaccttactgttccctttgctcgttatctggccatgaataaggtgaagaagatgaaacgttatcatgttggaaaggtgtggcggcgagagagcccaaccatagtccaaggccgttatagggagttctgccagtgtgattttgacattgctggtcagtttgaccctatgatccccgatgcagagtgtttgaagatcatgtgtgaaatcctaagtggattgcagttgggagactttctcattaaggtaaatgaccggcggattgtggatgggatgtttgctgtctgtggtgttcctgaaagcaagttccgtgccatctgctcctccatagataaactagacaagatggcttggaaagatgtgagacatgagatggtggtgaagaaaggcctggctcctgaggtggctgatcgaattggggactatgtccagtgtcatggtggggtatccctagtagagcaaatgtttcaggatcccagactatcccagaacaagcaggccctggagggcctgggagacctaaagctgctatttgaatacctgactttatttggaattgctgataagatctcctttgacctcagcctggctcggggcctagactactatacaggagtgatctatgaagcagtgctgctgcagaccccaactcaggctggggaggagcccctgaatgtgggcagtgtggctgctggtgggcgctatgatgggctggtgggcatgtttgaccccaagggccacaaggtgccatgtgtgggactcagcattggggttgagcgaatcttctacattgtggagcagaggatgaagaccaaaggtgagaaggtgcggactacagagactcaagtgtttgtggccacaccacagaagaactttctccaagaacggttgaagcttattgcagagctttgggattctggaatcaaggcagagatgctatacaagaacaaccccaaactattaacccagctgcactattgtgagagcacaggcattccactggtggtcattattggtgagcaagaactgaaagaaggggtcatcaagatccgttcagtggccagcagagaggaggtggccattaaacgggaaaattttgtggctgaaattcagaagcgactgtctgagtcttgatccttgcctgattcccatctgctgctctttgtagaaaaggtttcctctagaactgaattcctctggaattgagtgatggacttcacaacaactagccaggaagggtgacaagtaccttctgcctcctccattcttcctgggtgcagaactgtagaagaccctgaggactcctgggctagtgtgagcagctattctgcatgggtgcagatggctggatgtgaaagagacatgctctagctgcagaggcaaatttgaagtgccacggaacgttgtcaagaggtagtgagattgttgctgtgagcaaggctctgggagagtcacctcaggctcaggattctgaaccattgagatcagaaaccagatacttagccttctactgtagctacggaaccagattctggtgaatttgtccacaatcagccattggcctgtctggggagtttttggaagacagcaaagaggggcaatggctgctttcagctttgaggacagatgctatcctaagggcatggcagtacccatgttgatttgacatctctctagcccatccattgcttacagtagaagagtggggctgtatgcttgataatcttgaacattgaacttaatagatgacttgacaaggtagagatctgatattttgagattttggagaccatttcctgtgccagaatcactgctctattccataccgtgccatggaggctgttttagaagtggttggataacatgttaaata

SEQ ID NO: 173086 - DNA, 2340 bp, Artificial Sequence
  derived and/or modified sequence
ctggctactaagggaacttgggaggatcccacctcagccttcgtgactagtgaggtgcgcaaacgcccgagttttccctggtgcgcgggttccgcctttgcagtgccctccacccttcctggtgtctgacccgcctccttcccaggccttttgttcctgtcccggaaagccggcgtcctgccgcgcgatgcccctgctcggacttcttcccaggagggcctgggcttcgctgctcagccagctcctgcgaccgccctgcgcttcgtgcaccggggcggtccgttgccaaagccaggttgcagaggcagtgttaacatcccaactgaaagcacatcaagagaaaccaaattttattatcaagaccccaaaggaaaccctgactgagaagtatggagaggactctgggctcatgtatgatctgaaggatcaaggtggagagctgttgtccctccgctatgaccttactgttccctttgctcgttatctggccatgaataaggtgaagaagatgaaacgttatcatgttggaaaggtgtggcggcgagagagcccaaccatagtccaaggccgttatagggagttctgccagtgtgattttgacattgctggtcagtttgaccctatgatccccgatgcagagtgtttgaagatcatgtgtgaaatcctaagtggattgcagttgggagactttctcattaaggtaaatgaccggcggattgtggatgggatgtttgctgtctgtggtgttcctgaaagcaagttccgtgccatctgctcctccatagataaactagacaagatggcttggaaagatgtgagacatgagatggtggtgaagaaaggcctggctcctgaggtggctgatcgaattggggactatgtccagtgtcatggtggggtatccctagtagagcaaatgtttcaggatcccagactatcccagaacaagcaggccctggagggcctgggagacctaaagctgctatttgaatacctgactttatttggaattgctgataagatctcctttgacctcagcctggctcggggcctagactactatacaggagtgatctatgaagcagtgctgctgcagaccccaactcaggctggggaggagcccctgaatgtgggcagtgtggctgctggtgggcgctatgatgggctggtgggcatgtttgaccccaagggccacaaggtgccatgtgtgggactcagcattggggttgagcgaatcttctacattgtggagcagaggatgaagaccaaaggtgagaaggtgcggactacagagactcaagtgtttgtggccacaccacagaagaactttctccaagaacggttgaagcttattgcagagctttgggattctggaatcaaggcagagatgctatacaagaacaaccccaaactattaacccagctgcactattgtgagagcacaggcattccactggtggtcattattggtgagcaagaactgaaagaaggggtcatcaagatccgttcagtggccagcagagaggaggtggccattaaacgggaaaattttgtggctgaaattcagaagcgactgtctgagtcttgatccttgcctgattcccatctgctgctctttgtagaaaaggtttcctctagaactgaattcctctggaattgagtgatggacttcacaacaactagccaggaagggtgacaagtaccttctgcctcctccattcttcctgggtgcagaactgtagaagaccctgaggactcctgggctagtgtgagcagctattctgcatgggtgcagatggctggatgtgaaagagacatgctctagctgcagaggcaaatttgaagtgccacggaacgttgtcaagaggtagtgagattgttgctgtgagcaaggctctgggagagtcacctcaggctcaggattctgaaccattgagatcagaaaccagatacttagccttctactgtagctacggaaccagattctggtgaatttgtccacaatcagccattggcctgtctggggagtttttggaagacagcaaagaggggcaatggctgctttcagctttgaggacagatgctatcctaagggcatggcagtacccatgttgatttgacatctctctagcccatccattgcttacagtagaagagtggggctgtatgcttgataatcttgaacattgaacttaatagatgacttgacaaggtagagatctgatattttgagattttggagaccatttcctgtgccagaatcactgctctattccataccgtgccatggaggctgttttagaagtggttggataacatgttaaataaaatattaagtgt

SEQ ID NO: 173087 - DNA, 1401 bp, Artificial Sequence
  derived and/or modified sequence
atgcccctgctgggcctgctgccccggcgggcctgggccagcctgctgagccagctgctgcggcccccctgtgccagctgcaccggggctgtgcgctgccagagccaggtggccgaggccgtgctgaccagccagctgaaggcccaccaggagaagcccaacttcatcatcaagacccccaaggagaccctgacagagaagtacggggaggacagcggcctgatgtatgacctgaaggaccagggcggggagctgctgagcctgcgctatgacctgactgtgccctttgcccgctacctggccatgaacaaggtgaagaagatgaagcgctaccacgtgggcaaggtgtggaggcgggagagccccaccatcgtgcagggccgctaccgggagttctgccagtgtgactttgatattgctggccagtttgaccccatgatcccagatgctgaatgtctgaagatcatgtgtgagatcctgagcggcctgcagctgggggacttcctgatcaaggtgaatgacagaagaattgtggatggcatgtttgctgtgtgtggggtgcctgagagcaagttccgggccatctgcagcagcattgacaagctggacaagatggcctggaaggatgtgagacatgagatggtggtgaagaagggcctggcccctgaggtggccgaccgcatcggggactatgtgcagtgccacggcggcgtgtccctggtggagcagatgttccaggacccccggctgagccagaacaagcaggccctggagggcctgggggacctgaagctgctgtttgagtacctgaccctgtttggaattgctgacaagatcagctttgacctgagcctggcccggggcctggactactacacaggagtcatctatgaagctgtgctgctgcagacccccacccaggccggggaggagcccctgaatgtgggctctgtggccgccggcggccgctatgatggcctggtgggcatgtttgaccccaagggccacaaggtgccctgtgtgggcctgagcattggagtggagcgcatcttctacatcgtggagcagaggatgaagaccaagggggagaaggtgaggaccacagagacccaggtgtttgtggccaccccccagaagaacttcctgcaggagcggctgaagctgattgctgagctgtgggacagcggcatcaaggccgagatgctgtacaagaacaaccccaagctgctgacccagctgcactactgtgagagcacaggcatccccctggtggtgatcattggagagcaggagctgaaggagggcgtcatcaagatccgctctgtggccagccgggaggaggtggccatcaagagagaaaattttgtggccgagatccagaagaggctgtctgagagctag

SEQ ID NO: 173088 - DNA, 1401 bp, Artificial Sequence
  derived and/or modified sequence
atgcccctgctgggcctgctgccccggcgggcctgggccagcctgctgtcccagttgctccgaccaccatgtgccagctgcaccggggctgtgcggtgccagtcacaggtggctgaggctgtgctgacgagccagctgaaggcgcatcaggagaaacctaacttcataattaaaactccaaaagaaacactgacagaaaaatacggcgaggactctggattgatgtacgacctcaaggatcaaggtggcgagttactaagtctgaggtatgatctgaccgtcccatttgcacgttatctggccatgaacaaagtcaagaaaatgaaacgctaccacgtgggtaaagtctggagaagagagtcaccgacaattgtgcaggggagatacagagaattttgtcagtgtgacttcgatatagctggtcaatttgatccaatgatacccgatgccgaatgcctgaaaataatgtgtgagatcctgagtggcctgcagttgggcgattttttgataaaagtaaatgaccggagaattgtcgacggaatgtttgccgtctgtggggtgcctgaaagcaaattcagggcaatttgctcttccatcgataaattggataaaatggcctggaaggacgtccggcatgaaatggtagtgaaaaagggactggcacccgaagtggctgaccggataggcgattatgtgcaatgccatgggggcgtatcattagtagagcaaatgttccaggacccgcgcttgagccaaaataagcaagctcttgaaggccttggggacctgaaactccttttcgaatacctgacgttatttggcattgccgacaagatctccttcgacctgtcactggcaagaggtctggattactatacaggcgtaatttacgaggctgtacttctgcagacccctacacaggccggggaagaacccctaaacgttggcagcgtggcagccggcggcagatacgacggcctggtaggaatgtttgatccaaagggtcataaagttccgtgtgtgggcctaagcattggcgtcgagcgcatcttctacatcgtggagcagcggatgaagacgaagggggagaaggtgaggacaactgagacacaggtgttcgtcgctacgccacagaagaactttctgcaagagcgcctcaaactgatagcagagttgtgggattccggaataaaggccgagatgttgtacaagaacaaccctaagctgctcactcagcttcactattgtgaatcaactggcattcccttggtggtgataataggagagcaggagcttaaggagggagtaataaagattagatctgtggcctccagagaggaggtggctattaagagggagaattttgtcgccgaaattcagaaacgcctctctgaatcgtag

SEQ ID NO: 173089 - DNA, 1401 bp, Artificial Sequence
  derived and/or modified sequence
atgcctcttctgggattactccctcggagagcctgggcatctctgctgtctcagctgctcaggccaccctgtgcatcttgcacaggcgctgtgcggtgccagagtcaagtggcggaagccgtgctcacgagtcaattaaaagcccatcaggagaaacccaacttcataatcaagactcctaaggagactctgaccgagaaatatggcgaagacagcggacttatgtatgatttgaaggaccaaggtggagagctcctgtccttgaggtatgacctcacagtccccttcgccaggtacctggctatgaacaaggtgaagaaaatgaagcgctatcacgtgggaaaagtctggcggagggagagcccaaccatagtgcagggtcggtaccgggaattctgtcagtgcgacttcgatatcgccggacagttcgatcctatgattcctgacgccgaatgcttaaagatcatgtgcgaaatcctgagcggcttgcagttgggcgatttcttaattaaagtcaacgacaggcgaattgttgatggaatgttcgcggtgtgcggcgtacccgagagcaagttcagggccatttgctcctcaatcgataagttggacaagatggcctggaaggacgtccgccacgagatggtggtgaaaaagggcttggcccctgaagtggccgaccggattggggattatgttcaatgtcacggcggagtgtcactggtcgagcagatgtttcaggatcctcggctcagccagaataaacaagctctcgaagggttaggggacctgaagcttctcttcgagtatctcactctgttcggtatcgctgataaaatcagttttgacctgtccctcgctcgagggctcgattactacacaggcgtgatttacgaggccgtgcttctgcagacaccaacccaggctggggaggagccgttgaacgtaggatccgtggcagccggtgggagatatgacggactggtcggaatgtttgacccgaaaggccataaagttccctgcgtcggattgagtatcggggtggaacgaatattctatatcgtagaacaacgaatgaagactaagggggaaaaagtccggactaccgagactcaagtgtttgtggccactccacagaagaatttccttcaagagagattaaagttgatcgcggagctttgggacagtggcatcaaggccgaaatgttgtacaagaacaaccctaagttgctgacacagctccactactgcgagagcacaggcataccattagtggttatcataggagagcaggaacttaaagaaggagtgataaagataagatccgtggcttctcgcgaggaggtggctatcaagagggaaaacttcgtggctgagattcagaaaagactctctgagtcttag

SEQ ID NO: 173090 - DNA, 1401 bp, Artificial Sequence
  derived and/or modified sequence
atgcccctgctgggcctgctgcccagaagagcctgggccagcctgctgagccagctgctgagacccccctgcgccagctgcaccggcgccgtgagatgccagagccaggtggccgaggccgtgctgaccagccagctgaaggcccaccaggagaagcccaacttcatcatcaagacccccaaggagaccctgaccgagaagtacggcgaggacagcggcctgatgtacgacctgaaggaccagggcggcgagctgctgagcctgagatacgacctgaccgtgcccttcgccagatacctggccatgaacaaggtgaagaagatgaagagataccacgtgggcaaggtgtggagaagagagagccccaccatcgtgcagggcagatacagagagttctgccagtgcgacttcgacatcgccggccagttcgaccccatgatccccgacgccgagtgcctgaagatcatgtgcgagatcctgagcggcctgcagctgggcgacttcctgatcaaggtgaacgacagaagaatcgtggacggcatgttcgccgtgtgcggcgtgcccgagagcaagttcagagccatctgcagcagcatcgacaagctggacaagatggcctggaaggacgtgagacacgagatggtggtgaagaagggcctggcccccgaggtggccgacagaatcggcgactacgtgcagtgccacggcggcgtgagcctggtggagcagatgttccaggaccccagactgagccagaacaagcaggccctggagggcctgggcgacctgaagctgctgttcgagtacctgaccctgttcggcatcgccgacaagatcagcttcgacctgagcctggccagaggcctggactactacaccggcgtgatctacgaggccgtgctgctgcagacccccacccaggccggcgaggagcccctgaacgtgggcagcgtggccgccggcggcagatacgacggcctggtgggcatgttcgaccccaagggccacaaggtgccctgcgtgggcctgagcatcggcgtggagagaatcttctacatcgtggagcagagaatgaagaccaagggcgagaaggtgagaaccaccgagacccaggtgttcgtggccaccccccagaagaacttcctgcaggagagactgaagctgatcgccgagctgtgggacagcggcatcaaggccgagatgctgtacaagaacaaccccaagctgctgacccagctgcactactgcgagagcaccggcatccccctggtggtgatcatcggcgagcaggagctgaaggagggcgtgatcaagatcagaagcgtggccagcagagaggaggtggccatcaagagagagaacttcgtggccgagatccagaagagactgagcgagagctag

SEQ ID NO: 173091 - protein, 329 aa, Artificial Sequence
  derived and/or modified sequence
MVRTKTWTLKKHFVGYPTNSDFELKTAELPPLKNGEVLLEALFLTVDPYMRVAAKRLKEGDTMMGQQVAKVVESKNVALPKGTIVLASPGWTTHSISDGKDLEKLLTEWPDTIPLSLALGTVGMPGLTAYFGLLEICGVKGGETVMVNAAAGAVGSVVGQIAKLKGCKVVGAVGSDEKVAYLQKLGFDVVFNYKTVESLEETLKKASPDGYDCYFDNVGGEFSNTVIGQMKKFGRIAICGAISTYNRTGPLPPGPPPEIVIYQELRMEAFVVYRWQGDARQKALKDLLKWVLEGKIQYKEYIIEGFENMPAAFMGMLKGDNLGKTIVKA

SEQ ID NO: 173092 - protein, 119 aa, Artificial Sequence
  derived and/or modified sequence
MVRTKTWTLKKHFVGYPTNSDFELKTAELPPLKNGEVLLEALFLTVDPYMRVVESKNVALPKGTIVLASPGWTTHSISDGKDLEKLLTEWPDTIPLSLALGTVGMPGLTAYFGLLEICG

SEQ ID NO: 173093 - DNA, 1350 bp, Artificial Sequence
  derived and/or modified sequence
atgcacacatacgcgcgcgcacatgcacataggcacacagagatacgcgcacacacacacacaaacgcactcagatttcccggaccctggttttcctcctgtgaccctttcggggccgggctctcaccctaaagaagcagccccgccctggggtggccccaccctctcttgggacctgtcataagtcggaccccgggcgcccggctgcgcagtcccagccgccttccccaggcagtggaaccttcgggctcctgagcttcaggatggttcgtactaagacatggaccctgaagaagcactttgttggctatcctactaatagtgactttgagttgaagacagctgagctcccacccttaaaaaatggagaggtcctgcttgaagctttgttcctcaccgtggatccctacatgagagttgtggaaagtaaaaatgtagccctaccaaaaggaactattgtactggcttctccaggctggacaacgcactccatttctgatgggaaagatctggaaaagctgctgacagagtggccagacacaataccactgtctttggctctggggacagttggcatgccaggcctgactgcctactttggcctacttgaaatctgtggtgtgaagggtggagaaacagtgatggttaatgcagcagctggagctgtgggctcagtcgtggggcagattgcaaagctcaagggctgcaaagttgttggagcagtagggtctgatgaaaaggttgcctaccttcaaaagcttggatttgatgtcgtctttaactacaagacggtagagtctttggaagaaaccttgaagaaagcgtctcctgatggttatgattgttattttgataatgtaggtggagagttttcaaacactgttatcggccagatgaagaaatttggaaggattgccatatgtggagccatctctacatataacagaaccggcccacttcccccaggcccacccccagagattgttatctatcaggagcttcgcatggaagcttttgtcgtctaccgctggcaaggagatgcccgccaaaaagctctgaaggacttgctgaaatgggtcttagagggtaaaatccagtacaaggaatatatcattgaaggatttgaaaacatgccagctgcatttatgggaatgctgaaaggagataatttggggaagacaatagtgaaagcatgaaaaagaggacacatggaatctggaggccatttagatgattagttaatttgtttttcaccatttagcaaaaatgtatactaccttaaatgtcttaagaaatagtactcataatgagtttgagctacttaataaaatacatttaagtggtatgtaa

SEQ ID NO: 173094 - DNA, 990 bp, Artificial Sequence
  derived and/or modified sequence
atggtgagaactaagacctggaccttaaaaaaacattttgttggctatcctaccaactctgacttcgagctgaaaaccgctgaacttccgcccttgaaaaacggagaggtgctgcttgaggctcttttcctcaccgtagatccatatatgagagtggccgccaagagactgaaggagggagacactatgatgggacaacaagttgccaaagtggtagagagcaagaatgtggctctccctaaaggaacgattgtgctcgccagcccaggatggactacacattccatctccgacggcaaggatcttgaaaagttattaaccgagtggcccgacacgatcccgctgagcctggctctcggcacggttgggatgccaggactgactgcctactttggtctgctggagatctgtggcgtgaagggcggtgagacggtcatggtcaacgccgccgctggggccgtaggttcagtggtgggacagatcgctaaactgaagggctgcaaagtcgtgggcgccgtgggaagcgacgagaaggttgcctatctccaaaaactgggatttgatgtcgtgtttaattataagaccgtggagtccctcgaggaaaccctcaagaaggctagtccggacggatacgattgctatttcgacaacgtaggtggggaatttagtaataccgtcattggtcagatgaaaaagtttggaagaattgccatctgtggcgccatctcgacgtataacagaactggccccctgccgccaggcccacccccagaaattgttatctatcaggagctgcgcatggaagcttttgtagtctatcggtggcagggcgatgccaggcagaaggccctgaaagatctgctaaagtgggtgctggaagggaagatccagtataaagaatatattattgagggctttgagaatatgcccgcggcctttatggggatgttgaagggagacaatttaggcaaaacaatagttaaagcttag

SEQ ID NO: 173095 - DNA, 990 bp, Artificial Sequence
  derived and/or modified sequence
atggtccgcacaaaaacgtggacacttaagaagcatttcgtgggttatcctacaaactctgattttgaactgaaaacggccgagctgcctccccttaagaatggcgaagtgcttctggaagcactgtttcttactgtggacccctacatgcgggtggccgccaaaaggctgaaagagggcgacactatgatgggccagcaggtcgccaaagtggtggagtccaagaatgtagccctgcctaaggggaccattgtactcgctagccctggttggaccacacattcaatttctgatggcaaagacctggaaaagctgctgaccgagtggcccgacacaatacccctgtcactggcccttggcaccgtcggcatgcccggtctcacagcatatttcggccttctggagatttgcggcgtcaaaggcggtgaaacagtgatggtcaatgccgccgcaggcgccgttggctctgttgtgggtcagattgccaagctcaaggggtgtaaggtggtgggagccgtcggcagcgatgagaaggtggcatatctgcagaagctcggcttcgatgtagtgtttaactacaagactgtggagtctcttgaggaaaccctcaaaaaagcctcccctgacggatatgactgctattttgacaacgtaggcggcgagttctctaatacagtaattggccagatgaagaagtttggcaggatagccatctgcggggctatctccacatataaccgcacgggaccgctaccccctgggccaccacccgaaatcgtaatttaccaggagcttagaatggaggctttcgtcgtgtatcgttggcagggcgacgcccgccagaaagctctgaaggacctgctgaaatgggtgctggagggtaagatccagtacaaggagtacatcatcgaagggtttgagaacatgcctgccgccttcatggggatgctgaagggcgataatctgggcaaaacaattgttaaagcctag

SEQ ID NO: 173096 - DNA, 990 bp, Artificial Sequence
  derived and/or modified sequence
atggtgaggaccaagacctggaccctgaagaagcactttgtgggctaccccaccaacagcgactttgagctgaagacagctgagctgccccccctgaagaatggagaggtgctgctggaggccctcttcctgactgtggacccctacatgagggtggccgccaagaggctgaaggagggggacaccatgatgggccagcaggtggccaaggtggtggagagcaagaatgtggccctgcccaagggcaccatcgtgctggccagccctggctggaccacccacagcatcagtgatggcaaggacctggagaagctgctgacagagtggccagacaccatccccctgagcctggccctgggcaccgtgggcatgcctggcctgacagcctacttcggcctgctggagatctgtggggtgaagggcggggagaccgtgatggtgaatgctgctgctggagctgtgggctctgtggtgggccagatcgccaagctgaagggctgcaaggtggtgggcgctgtgggcagtgatgagaaggtggcctacctgcagaagctgggctttgatgtggtgttcaactacaagacagtggagagcctggaggagaccctgaagaaggccagcccagatggctatgactgctactttgacaacgtgggcggggagttcagcaacacagtgattggccagatgaagaagtttggccgcatcgccatctgtggggccatcagcacctacaacagaacaggccccctgcccccaggccccccacctgagatcgtcatctaccaggagctgaggatggaggcctttgtggtgtaccgctggcagggagatgcccggcagaaggccctgaaggacctgctgaagtgggtgctggagggcaagatccagtacaaggagtacatcatcgagggctttgagaacatgcctgctgccttcatgggcatgctgaagggggacaacctgggcaagaccatcgtgaaggcctag

SEQ ID NO: 173097 - DNA, 990 bp, Artificial Sequence
  derived and/or modified sequence
atggtgcggaccaagacctggaccctgaagaagcacttcgtgggctatcccacaaattccgacttcgagctgaaaaccgcagagctcccacccctcaaaaacggtgaagtgttgctagaggcactgttcctgactgtagacccatacatgcgggtggcagccaagcgcctaaaggagggcgacaccatgatgggtcagcaggtggcaaaggtggtggagagcaagaacgtagcccttcccaagggcaccatcgtcttagcatctcccggttggaccactcacagcatctctgatgggaaggacctggagaagctgctgactgagtggcccgacaccataccactttcacttgccctcgggacagttggtatgcctgggctgaccgcctacttcggacttctggagatttgtggtgtcaagggcggcgagaccgtgatggtgaatgctgctgcaggggcagtcggatccgttgtaggacagatagccaaacttaaaggctgtaaagtcgtgggagctgtaggatctgacgagaaagtagcttacctccagaaactgggttttgacgtggtctttaattataaaacagtggagagcctggaagaaacgttaaagaaagcaagtccagatgggtatgattgctacttcgataacgttggcggagagttcagcaacactgttatcgggcagatgaagaaattcggtagaatcgcaatctgcggcgccattagcacttataaccggactggtcccctccctccaggcccaccacctgagattgtgatttaccaggaactacgaatggaggcattcgtggtttatagatggcaaggagatgccaggcagaaggctcttaaggacttgttaaaatgggttcttgaagggaagattcagtataaggagtatatcatcgaaggatttgagaacatgccagcggcattcatgggaatgctgaagggggataacttggggaagaccattgtgaaggcctag

SEQ ID NO: 173098 - DNA, 990 bp, Artificial Sequence
  derived and/or modified sequence
atggtgcggaccaagacctggaccctgaagaagcacttcgtgggctaccccaccaattcagactttgagctcaagaccgccgaactgcctccccttaaaaatggagaagtgctgctagaggccctgttcttgactgtggatccgtatatgcgggtggcggccaaaagattgaaggaaggcgacaccatgatggggcagcaggtggcaaaggtggtcgaaagcaagaacgtggctcttcccaagggaaccatcgttcttgcttcccccggttggaccactcattcgatatccgatggaaaggacttggaaaaactcctcacagaatggccggataccattccattaagtctcgctctaggcactgttggaatgccaggtcttacagcctacttcggcctgctcgagatctgcggggtgaagggtggcgagacagtcatggtcaacgcggcagcaggcgccgtcggctctgttgtagggcagattgcaaaactgaagggctgcaaagtggtcggggccgtgggcagcgatgagaaggtggcatatctgcagaagctggggtttgatgtcgtgttcaattataagactgtcgaaagcctcgaagaaaccttaaaaaaagcatcccccgatggctatgattgttactttgacaatgtcggaggagaattcagcaacaccgtgataggccagatgaaaaaatttgggaggatcgctatctgcggggcgatctccacatataatcgaactggcccactgccgccaggccccccaccagagatcgtgatataccaggagttgaggatggaagcctttgtcgtatatcgatggcaaggggatgccagacagaaagctctgaaggaccttctcaaatgggtattggaagggaagatccagtacaaggaatacatcatagaaggcttcgagaacatgccagcggccttcatggggatgttgaaaggggacaatctcggcaaaactattgtgaaagcttag

SEQ ID NO: 173099 - DNA, 1407 bp, Artificial Sequence
  derived and/or modified sequence
atgcacacatacgcgcgcgcacatgcacataggcacacagagatacgcgcacacacacacacaaacgcactcagatttcccggaccctggttttcctcctgtgaccctttcggggccgggctctcaccctaaagaagcagccccgccctggggtggccccaccctctcttgggacctgtcataagtcggaccccgggcgcccggctgcgcagtcccagccgccttccccaggcagtggaaccttcgggctcctgagcttcaggatggttcgtactaagacatggaccctgaagaagcactttgttggctatcctactaatagtgactttgagttgaagacagctgagctcccacccttaaaaaatggagaggtcctgcttgaagctttgttcctcaccgtggatccctacatgagagtggcagccaaaagattgaaggaaggtgatacaatgatggggcagcaagtggccaaagttgtggaaagtaaaaatgtagccctaccaaaaggaactattgtactggcttctccaggctggacaacgcactccatttctgatgggaaagatctggaaaagctgctgacagagtggccagacacaataccactgtctttggctctggggacagttggcatgccaggcctgactgcctactttggcctacttgaaatctgtggtgtgaagggtggagaaacagtgatggttaatgcagcagctggagctgtgggctcagtcgtggggcagattgcaaagctcaagggctgcaaagttgttggagcagtagggtctgatgaaaaggttgcctaccttcaaaagcttggatttgatgtcgtctttaactacaagacggtagagtctttggaagaaaccttgaagaaagcgtctcctgatggttatgattgttattttgataatgtaggtggagagttttcaaacactgttatcggccagatgaagaaatttggaaggattgccatatgtggagccatctctacatataacagaaccggcccacttcccccaggcccacccccagagattgttatctatcaggagcttcgcatggaagcttttgtcgtctaccgctggcaaggagatgcccgccaaaaagctctgaaggacttgctgaaatgggtcttagagggtaaaatccagtacaaggaatatatcattgaaggatttgaaaacatgccagctgcatttatgggaatgctgaaaggagataatttggggaagacaatagtgaaagcatgaaaaagaggacacatggaatctggaggccatttagatgattagttaatttgtttttcaccatttagcaaaaatgtatactaccttaaatgtcttaagaaatagtactcataatgagtttgagctacttaataaaatacatttaagtggtatgtaa

SEQ ID NO: 173100 - DNA, 990 bp, Artificial Sequence
  derived and/or modified sequence
atggtccgcacaaaaacctggacccttaagaaacactttgttggctatcctaccaatagcgattttgaactgaagaccgcggaactaccccctttgaagaacggagaggtgttactggaagcactcttcctgactgtggacccttacatgagagtcgctgctaaacgtctgaaggagggagataccatgatgggccagcaggtggccaaggtggtcgaaagcaagaacgtggcccttccgaagggaactatcgtcctggcttcccccggatggacaacccacagcatctccgatggcaaggacttggaaaagctcctcactgagtggcctgacaccattccgctctctttggcgctgggcacagtgggtatgcctggcttaaccgcatacttcggattgctggaaatatgcggggtgaagggcggtgagacagtgatggtgaatgcggcagccggagctgtcggcagcgtcgtgggccagattgcaaagttgaagggatgtaaagttgtcggagccgtcggtagcgacgagaaggtcgcatatttgcagaagctaggctttgacgtggttttcaactacaagaccgtggaatctctggaggaaaccctgaagaaagctagcccagacggatatgactgctacttcgacaacgtgggtggggagtttagtaacaccgtaattgggcagatgaagaagtttggccgtatcgccatctgtggagcgatttcgacgtataatcgcacagggccactcccccctggccctccccctgagattgttatataccaggagctaaggatggaggcgttcgtcgtttaccgctggcagggtgatgctcgccaaaaggccctcaaggatttgctaaagtgggtcctcgaaggaaagatccagtataaagagtatatcattgaaggatttgagaatatgcctgccgctttcatgggaatgctgaagggcgacaacctcggtaaaacaattgtgaaggcttag

SEQ ID NO: 173101 - DNA, 990 bp, Artificial Sequence
  derived and/or modified sequence
atggttcgcaccaagacttggacgctcaaaaagcactttgttggttatccgaccaatagtgactttgagttgaagactgcagagctacccccactgaagaacggcgaggtactgttggaagccctctttctgaccgtcgacccttacatgagggtagccgctaaacgcctgaaggaaggcgacacaatgatgggccagcaggtagccaaagttgttgagtcgaagaacgtggccctgcctaagggtacaatcgtactcgccagcccaggctggacaacacattcgatttccgacgggaaagatcttgagaagctgctgaccgagtggcccgatactattccgctgtctctggccctaggaacagtcggcatgccgggactgactgcctattttggcctacttgagatctgtggggtgaagggaggcgagactgttatggtgaatgctgccgctggtgccgtggggagtgtggtgggccaaatcgcaaagctcaaaggttgcaaggtcgtgggagcggtggggtccgatgaaaaagtggcttatctgcaaaagttaggatttgacgtggtgtttaactataagactgtggagagtctagaggagacgctaaagaaagcctccccagacggatatgattgctatttcgacaacgtaggaggagaattcagcaatacagttattggccagatgaagaagttcggacgaatagcaatctgcggggcaatatcaacctacaatcgtacaggccctttgccgccaggccctccgcctgaaattgtcatttaccaagaactgcgaatggaggcctttgtggtgtatcgatggcagggcgacgctcgccagaaggctctcaaggacctcctgaagtgggtcctggagggcaagatccagtataaggaatacatcatcgaaggatttgagaacatgcccgcagcctttatgggtatgctaaaaggggataatctgggaaagacaattgtgaaggcgtag

SEQ ID NO: 173102 - DNA, 1223 bp, Artificial Sequence
  derived and/or modified sequence
gttccttggagagcttggagccgcgcgccggagggaataggaaagcttggttacaacccgggacacccggagcttcaggatggttcgtactaagacatggaccctgaagaagcactttgttggctatcctactaatagtgactttgagttgaagacagctgagctcccacccttaaaaaatggagaggtcctgcttgaagctttgttcctcaccgtggatccctacatgagagtggcagccaaaagattgaaggaaggtgatacaatgatggggcagcaagtggccaaagttgtggaaagtaaaaatgtagccctaccaaaaggaactattgtactggcttctccaggctggacaacgcactccatttctgatgggaaagatctggaaaagctgctgacagagtggccagacacaataccactgtctttggctctggggacagttggcatgccaggcctgactgcctactttggcctacttgaaatctgtggtgtgaagggtggagaaacagtgatggttaatgcagcagctggagctgtgggctcagtcgtggggcagattgcaaagctcaagggctgcaaagttgttggagcagtagggtctgatgaaaaggttgcctaccttcaaaagcttggatttgatgtcgtctttaactacaagacggtagagtctttggaagaaaccttgaagaaagcgtctcctgatggttatgattgttattttgataatgtaggtggagagttttcaaacactgttatcggccagatgaagaaatttggaaggattgccatatgtggagccatctctacatataacagaaccggcccacttcccccaggcccacccccagagattgttatctatcaggagcttcgcatggaagcttttgtcgtctaccgctggcaaggagatgcccgccaaaaagctctgaaggacttgctgaaatgggtcttagagggtaaaatccagtacaaggaatatatcattgaaggatttgaaaacatgccagctgcatttatgggaatgctgaaaggagataatttggggaagacaatagtgaaagcatgaaaaagaggacacatggaatctggaggccatttagatgattagttaatttgtttttcaccatttagcaaaaatgtatactaccttaaatgtcttaagaaatagtactcataatgagtttgagctacttaataaaatacatttaagtggtatgtaa

SEQ ID NO: 173103 - DNA, 990 bp, Artificial Sequence
  derived and/or modified sequence
atggtgagaaccaagacctggaccctgaagaagcacttcgtgggctaccccaccaacagcgacttcgagctgaagaccgccgagctgccccccctgaagaacggcgaggtgctgctggaggccctgttcctgaccgtggacccctacatgagagtggccgccaagagactgaaggagggcgacaccatgatgggccagcaggtggccaaggtggtggagagcaagaacgtggccctgcccaagggcaccatcgtgctggccagccccggctggaccacccacagcatcagcgacggcaaggacctggagaagctgctgaccgagtggcccgacaccatccccctgagcctggccctgggcaccgtgggcatgcccggcctgaccgcctacttcggcctgctggagatctgcggcgtgaagggcggcgagaccgtgatggtgaacgccgccgccggcgccgtgggcagcgtggtgggccagatcgccaagctgaagggctgcaaggtggtgggcgccgtgggcagcgacgagaaggtggcctacctgcagaagctgggcttcgacgtggtgttcaactacaagaccgtggagagcctggaggagaccctgaagaaggccagccccgacggctacgactgctacttcgacaacgtgggcggcgagttcagcaacaccgtgatcggccagatgaagaagttcggcagaatcgccatctgcggcgccatcagcacctacaacagaaccggccccctgccccccggccccccccccgagatcgtgatctaccaggagctgagaatggaggccttcgtggtgtacagatggcagggcgacgccagacagaaggccctgaaggacctgctgaagtgggtgctggagggcaagatccagtacaaggagtacatcatcgagggcttcgagaacatgcccgccgccttcatgggcatgctgaagggcgacaacctgggcaagaccatcgtgaaggcctag

SEQ ID NO: 173104 - protein, 493 aa, Artificial Sequence
  derived and/or modified sequence
MRGFGPGLTARRLLPLRLPPRPPGPRLASGQAAGALERAMDELLRRAVPPTPAYELREKTPAPAEGQCADFVSFYGGLAETAQRAELLGRLARGFGVDHGQVAEQSAGVLHLRQQQREAAVLLQAEDRLRYALVPRYRGLFHHISKLDGGVRFLVQLRADLLEAQALKLVEGPDVREMNGVLKGMLSEWFSSGFLNLERVTWHSPCEVLQKISEAEAVHPVKNWMDMKRRVGPYRRCYFFSHCSTPGEPLVVLHVALTGDISSNIQAIVKEHPPSETEEKNKITAAIFYSISLTQQGLQGVELGTFLIKRVVKELQREFPHLGVFSSLSPIPGFTKWLLGLLNSQTKEHGRNELFTDSECKEISEITGGPINETLKLLLSSSEWVQSEKLVRALQTPLMRLCAWYLYGEKHRGYALNPVANFHLQNGAVLWRINWMADVSLRGITGSCGLMANYRYFLEETGPNSTSYLGSKIIKASEQVLSLVAQFQKNSKL

SEQ ID NO: 173105 - DNA, 1482 bp, Artificial Sequence
  derived and/or modified sequence
atgagaggcttcggacctggattgaccgcgaggcgcctgcttcccttacgcctgcctcctcggccaccaggcccaaggctggcatctggccaggctgccggtgccttggagagggctatggatgagctgctgcggagggctgtccccccaacaccggcttatgaactgagggaaaagactcctgcacctgctgaggggcagtgcgccgattttgtatcattttacgggggactcgcagagaccgcacagcgcgcagagctacttggtcgcctggcacgcggctttggcgtggatcacggccaggttgccgagcagtcagcaggagttctgcacctgaggcaacagcaacgagaggcagcggttctgctgcaggcggaggatcggctccgatacgcgctggtccccaggtatcggggactgttccaccacatcagcaaactggatggcggtgttcgatttcttgtacagctgcgcgcagacttgctcgaagcacaggccctgaagcttgtagaaggaccagatgttagagaaatgaatggagttctcaagggaatgctcagtgagtggttcagctctggctttctgaatctggaacgcgtgacatggcacagtccatgtgaggtccttcagaaaatcagcgaagctgaggcagttcatcctgtgaaaaactggatggacatgaagcgccgggtcggtccttatcgaaggtgttactttttcagtcactgtagcacaccaggtgagcccctggtcgtgctgcacgtggctcttaccggcgatatttcaagtaacattcaggctatcgtgaaggagcatcctccttcggagacagaagaaaagaacaagatcactgcagccatcttctactccatctccttgacgcagcaggggctgcagggagtcgagctgggcacctttctgataaaacgcgtagtgaaagagctgcaaagggaattcccccacctgggcgtcttcagctccctttctcctattcccggatttacaaagtggcttctgggcttactaaatagccagactaaggagcatggcaggaacgaactttttacagacagcgagtgtaaagagatatccgagattacagggggtcccattaatgagaccctcaagctccttctttcttcctccgaatgggtccagagtgagaagctcgtacgggccttacagacccctttaatgcggctctgtgcctggtacttatacggcgagaaacacagggggtatgcgctgaaccctgtcgccaattttcatttgcagaatggggccgtcctctggcgcataaactggatggccgacgtgagtctgagaggtatcaccggctcttgtggactgatggcgaactatcgttacttcctcgaggagacgggtccaaattctacatcatacttgggttcaaaaattataaaagcgtcggagcaagtcctgtcactggtggcccaattccagaagaacagcaaactgtag

SEQ ID NO: 173106 - DNA, 1482 bp, Artificial Sequence
  derived and/or modified sequence
atgaggggcttcggccctggcctgacagcccggcggctgctgcccctgcggctgcccccccggcccccaggcccccggctggccagcggccaggccgccggggccctggagcgggccatggatgagctgctgcggcgggctgtgccccccaccccagcctatgagctgcgggagaagaccccagccccagctgagggccagtgtgccgactttgtgtccttctatggaggcctggccgagacagcccagagagctgagctgctgggccgcctggcccggggctttggagtggaccacggccaggtggccgagcagagcgctggggtgctgcacctgcggcagcagcagcgggaggccgctgtgctgctgcaggccgaggaccggctgcgctatgccctggtgccccgctaccggggcctcttccaccacatcagcaagctggatggcggcgtgcgcttcctggtgcagctgcgggctgacctgctggaggcccaggccctgaagctggtggagggcccagatgtgcgggagatgaatggagtgctgaagggcatgctgtctgagtggttcagcagcggcttcctgaacctggagcgggtgacctggcacagcccctgtgaggtgctgcagaagatcagcgaggccgaggccgtgcaccctgtgaagaactggatggacatgaagagaagagtgggcccctaccgccgctgctacttcttcagccactgcagcaccccaggagagcccctggtggtgctgcacgtggccctgaccggggacatcagcagcaacatccaggccatcgtgaaggagcaccccccatctgaaacagaggagaagaacaagatcacagctgccatcttctacagcatcagcctgacccagcagggcctgcagggcgtggagctgggcaccttcctgatcaagagggtggtgaaggagctgcagcgggagttcccccacctgggcgtcttcagcagcctgagccccatccctggcttcaccaagtggctgctgggcctgctgaacagccagaccaaggagcacggcagaaatgagctgttcacagacagcgagtgcaaggagatcagcgagatcactggaggccccatcaatgagaccctgaagctgctgctgagcagcagcgagtgggtgcagagcgagaagctggtgcgggccctgcagacccccctgatgaggctgtgtgcctggtacctgtatggagagaagcaccggggctacgccctgaaccctgtggccaacttccacctgcagaatggagctgtgctgtggaggatcaactggatggctgatgtgtccctgcggggcatcaccggcagctgtggcctgatggccaactaccgctacttcctggaggagaccggccccaacagcaccagctacctgggcagcaagatcatcaaggccagcgagcaggtgctgagcctggtggcccagttccagaagaacagcaagctgtag

SEQ ID NO: 173107 - DNA, 2193 bp, Artificial Sequence
  derived and/or modified sequence
ggcagctgttgtggggcaccatgcgaggcttcgggccaggcttgacggccaggcgtctcctcccgctgcggttgcccccgcggccgcccgggccccggctggcgagcgggcaggcggccggcgccctggagcgggccatggacgagctgctgcgccgcgcggtgccgccgacgccggcctacgagctgcgcgagaagacaccggcgcccgccgagggtcagtgcgcggacttcgtgagcttctacggtgggctggccgagacggcccagcgggccgaactgctgggccgcctggcgcggggcttcggcgtggaccacggccaggtggcggagcagagcgccggcgtgctccatctgcgccagcagcagcgggaggcggcggtgctgctgcaggccgaggaccggctgcgctacgcgctggtgccgcgctatcgcggcctcttccaccacatcagcaagctggacggcggcgtgcgcttcctggtgcagctgcgggccgacctgctggaggcgcaggccctcaagctggtggaggggccggacgtccgggaaatgaatggggtgctgaaaggaatgctctcagaatggttttcctccgggttcctgaacctagaacgggttacctggcattcaccgtgtgaagtgcttcagaaaatcagtgaggctgaggctgtgcatcctgtaaaaaactggatggacatgaagcgccgcgttgggccctacagaaggtgttacttcttttctcactgttcgacccctggggagcccctggtcgttttgcacgtggcactgactggtgacatctccagcaacatccaggcaatcgtgaaggaacatcctccatcagaaacagaagagaagaacaaaatcactgctgcgatcttttattccatcagcttgacccagcagggactccaaggggtggagctgggaacattcctcataaagcgagtcgtcaaggagttgcagagagagtttcctcaccttggggtgttttcaagtctgtcacctatacctggtttcaccaaatggcttctggggcttctgaactcgcaaacgaaggagcatgggaggaatgaactctttacagattcggaatgtaaggaaatctcggagatcacaggtggccccattaacgagaccctcaagctcctcctcagcagcagcgagtgggtgcagtcggagaagctggtgcgggcgctgcagactccgctgatgaggctgtgcgcctggtacctgtatggagagaagcaccgcggctacgcgctgaaccccgtggccaacttccacctgcagaacggggcggtgctgtggcgcatcaactggatggcggatgtgagcctcagaggcatcaccggctcctgcggcctgatggccaactaccgctacttcctggaggagacgggccccaacagcacctcctacctcggctccaagatcatcaaagcctctgagcaggtcctcagcctagtggcccagtttcaaaagaacagcaagctctgacagtaaacctctcctaaagcacagggccccggctaagaaaacgatcattttcaggaggggccgggagttatgtatctgaagcagctttccaagcaaagccaaagttgactgtgttcttgtcccgcagccggtccacactgtgaggccaggcctcaacttccctcaccctgggcgtgacatgcacccagtgcaagacggttgtgggtgcgggtgcacacaaatgagtgggttgctgtgctgtctccggaagattctgtcgttgcccttggcctggctccctgcccggggctggtgctgtggtacctacatcttcaggaagctgtgcagcctctgccattgccatcccagggggatctggcatcctcctaaggaccggggcgcgtggcccagataagaataggtgttcctttgtgctcataaaacagaatgcggcgatggttgctttagccgtttctcaccatgcaatgcagagggacaaagggctgtgctacacttcccagttacattctgaagctcataaatgtatgagaaggtttgtgattttgcacaaggtgtgtgtagtaagttaaattgttgaacacaaaaatgttgctgcttgaggcataagttggataataggctttaaatgatcagggattcaggttcataatgaacttcacagtaaagaacacgtttgttctgtaaagcattg

SEQ ID NO: 173108 - DNA, 1482 bp, Artificial Sequence
  derived and/or modified sequence
atgcggggcttcggccccggcctgaccgcccggcggctgctgcccctgaggctgcccccacgtccccctggaccgaggctggcctctggccaagcggctggcgccttagaaagggctatggacgaactgctgcggcgcgcagttccaccaactcccgcctacgagctccgggaaaagacacccgcacctgctgagggccagtgcgctgacttcgtcagcttctacggagggctagcggagaccgctcagcgagccgagctgctggggcgacttgcccgaggctttggggttgatcacggacaggtggctgagcagtccgccggcgtgctgcatctgagacagcagcagagggaagctgctgtccttctccaggctgaagaccgattgcgctatgctttggtaccacggtaccgcggtttgtttcatcacatatctaaactcgatgggggtgttcgtttcctagtccagttaagggctgacctcttagaggctcaggcacttaagctagtggagggacctgatgtcagggagatgaacggagtgctgaaggggatgctcagcgaatggttctcctcaggctttctgaatctagagcgcgtgacatggcactccccctgcgaggttcttcagaagatttccgaggcagaggccgtccatccggtgaagaattggatggacatgaaaagacgggttggcccctatcggagatgctacttttttagccactgtagcacaccgggcgagcctctcgtcgtacttcacgtcgccctgacgggggacattagcagcaatatccaggccattgtgaaagagcacccaccgtccgagaccgaggagaagaataaaattacagccgctattttttactccatttcgctcacacaacaggggctccagggggtagaacttggaacattcctgatcaaacgcgtggtgaaggagctgcaaagagagttccctcatctgggagttttttcctccctgagcccaattcccggattcacaaagtggctgctcggcctgctaaattcacaaactaaggaacacggcaggaacgagctctttacagactccgagtgcaaggaaatttcagaaatcacaggcggccccataaacgagactctgaaactcctgctgtcttcttctgaatgggtccagagtgagaaactggtgcgtgctctccagacacctctgatgagactatgcgcatggtatttgtacggcgagaagcaccggggttatgcactcaaccctgttgctaacttccacttgcagaacggtgccgttctctggcggatcaactggatggcggatgtgtctctccgcgggattactggtagctgcggattgatggcaaattatcgttattttttagaggagaccggcccaaactctacttcctacctgggctccaagatcatcaaagcctccgagcaagttctgtcgctcgtggcacagttccagaaaaacagtaagttgtag

SEQ ID NO: 173109 - DNA, 1482 bp, Artificial Sequence
  derived and/or modified sequence
atgcggggatttggtcccggactgacagcaagacggttattacccctcagactgccccctcgtccgcctggcccacgtctcgctagcggtcaagcagctggcgctctggaacgggcaatggacgaactcctgcgcagagccgttcccccaacgccagcatacgagttgagggagaaaacacctgctcccgcagaaggccagtgtgctgacttcgtcagcttctacggaggccttgctgagaccgcacagcgggcagagctgctgggcaggttagccaggggcttcggggtcgatcatggccaggttgccgaacagagtgccggtgttttgcacttacgtcagcagcagagggaggccgcagtcttgctgcaggccgaagatcgcctcaggtacgcacttgtcccacgctatcgtggcctgtttcatcacatttcaaaactcgacggtggggtcagatttctcgtccagttgcgggctgacctcctggaggcacaggccctgaagctcgtggagggccctgatgtgcgggagatgaatggtgtcctgaagggcatgctctccgaatggttctccagtggttttctcaatctggaacgcgtcacctggcacagtccctgtgaggttctccagaagattagcgaggccgaagccgtacaccccgtcaaaaactggatggatatgaaaagacgagtaggtccctataggcgatgctacttcttttcccactgtagcacacccggagagccattggttgtgctacatgtggcccttacaggggatatctctagcaatatccaagcaattgtgaaagaacaccctcccagcgaaactgaagagaagaacaagatcacagcggcaattttttactcaatctctctcacccagcagggcttgcagggcgtagaactggggacctttctaattaagagagtggtgaaggaactccaaagggaattcccccacctcggcgtattcagtagcctcagcccaataccaggttttaccaaatggctgctaggcctcctgaatagccaaactaaagagcatggccgtaatgaactgttcaccgattctgaatgcaaagagatatccgagattaccggcggacctatcaacgagaccctaaagttgctcctctcgtcaagtgagtgggtacagtccgaaaagctggtccgggcacttcagacacctctcatgagactctgcgcctggtatctgtacggggaaaaacatcgcggatatgcgctaaaccctgtcgcaaattttcaccttcaaaatggcgctgttctgtggaggattaactggatggctgacgtgagtctgagaggcatcacaggatcttgtggcctgatggccaactaccgatatttccttgaggaaactggcccaaactccacctcttacctcggatcgaagatcattaaagcttctgagcaggtgctgagcctcgtggcccaatttcagaagaattctaagctgtag

SEQ ID NO: 173110 - DNA, 1482 bp, Artificial Sequence
  derived and/or modified sequence
atgagaggcttcggccccggcctgaccgccagaagactgctgcccctgagactgccccccagaccccccggccccagactggccagcggccaggccgccggcgccctggagagagccatggacgagctgctgagaagagccgtgccccccacccccgcctacgagctgagagagaagacccccgcccccgccgagggccagtgcgccgacttcgtgagcttctacggcggcctggccgagaccgcccagagagccgagctgctgggcagactggccagaggcttcggcgtggaccacggccaggtggccgagcagagcgccggcgtgctgcacctgagacagcagcagagagaggccgccgtgctgctgcaggccgaggacagactgagatacgccctggtgcccagatacagaggcctgttccaccacatcagcaagctggacggcggcgtgagattcctggtgcagctgagagccgacctgctggaggcccaggccctgaagctggtggagggccccgacgtgagagagatgaacggcgtgctgaagggcatgctgagcgagtggttcagcagcggcttcctgaacctggagagagtgacctggcacagcccctgcgaggtgctgcagaagatcagcgaggccgaggccgtgcaccccgtgaagaactggatggacatgaagagaagagtgggcccctacagaagatgctacttcttcagccactgcagcacccccggcgagcccctggtggtgctgcacgtggccctgaccggcgacatcagcagcaacatccaggccatcgtgaaggagcacccccccagcgagaccgaggagaagaacaagatcaccgccgccatcttctacagcatcagcctgacccagcagggcctgcagggcgtggagctgggcaccttcctgatcaagagagtggtgaaggagctgcagagagagttcccccacctgggcgtgttcagcagcctgagccccatccccggcttcaccaagtggctgctgggcctgctgaacagccagaccaaggagcacggcagaaacgagctgttcaccgacagcgagtgcaaggagatcagcgagatcaccggcggccccatcaacgagaccctgaagctgctgctgagcagcagcgagtgggtgcagagcgagaagctggtgagagccctgcagacccccctgatgagactgtgcgcctggtacctgtacggcgagaagcacagaggctacgccctgaaccccgtggccaacttccacctgcagaacggcgccgtgctgtggagaatcaactggatggccgacgtgagcctgagaggcatcaccggcagctgcggcctgatggccaactacagatacttcctggaggagaccggccccaacagcaccagctacctgggcagcaagatcatcaaggccagcgagcaggtgctgagcctggtggcccagttccagaagaacagcaagctgtag

SEQ ID NO: 173111 - protein, 535 aa, Artificial Sequence
  derived and/or modified sequence
MRLRNGTVATALAFITSFLTLSWYTTWQNGKEKLIAYQREFLALKERLRIAEHRISQRSSELNTIVQQFKRVGAETNGSKDALNKFSDNTLKLLKELTSKKSLQVPSIYYHLPHLLKNEGSLQPAVQIGNGRTGVSIVMGIPTVKREVKSYLIETLHSLIDNLYPEEKLDCVIVVFIGETDIDYVHGVVANLEKEFSKEISSGLVEVISPPESYYPDLTNLKETFGDSKERVRWRTKQNLDYCFLMMYAQEKGIYYIQLEDDIIVKQNYFNTIKNFALQLSSEEWMILEFSQLGFIGKMFQAPDLTLIVEFIFMFYKEKPIDWLLDHILWVKVCNPEKDAKHCDRQKANLRIRFRPSLFQHVGLHSSLSGKIQKLTDKDYMKPLLLKIHVNPPAEVSTSLKVYQGHTLEKTYMGEDFFWAITPIAGDYILFKFDKPVNVESYLFHSGNQEHPGDILLNTTVEVLPFKSEGLEISKETKDKRLEDGYFRIGKFENGVAEGMVDPSLNPISAFRLSVIQNSAVWAILNEIHIKKATN

SEQ ID NO: 173112 - DNA, 1608 bp, Artificial Sequence
  derived and/or modified sequence
atgaggttgcgaaatggcactgtggcaactgcgctggctttcatcacctcctttcttacactctcctggtacacaacttggcaaaacggaaaggaaaagctcatcgcctaccagagggaatttcttgccctaaaagagcgattgaggatcgccgaacacagaatatcccagcggagctccgagttaaatacaatagtccagcagttcaagcgcgtgggagcagagactaacgggtctaaagacgctctgaacaaattcagcgataacacgctgaaactccttaaagagctgaccagcaaaaagtccctgcaggtgcccagtatatattatcacttgcctcacctgctcaaaaacgaagggtcattgcagcccgcggtacagataggaaacgggagaacgggggtcagcatcgtgatgggcattcctactgtaaagagagaggttaaatcgtatctcattgagacccttcactcgcttatagataatttatatccagaggagaagttggactgtgtgatagtcgtttttataggagaaaccgatattgattacgtgcatggagttgtggcaaatctagaaaaagagttttccaaggaaataagcagcggcttggtcgaggtgatttctccccccgaaagctattaccccgaccttacgaatttgaaggagacgttcggcgacagcaaagaaagggtacggtggaggactaagcagaatctggattattgttttctgatgatgtacgcccaggagaaaggcatctattatattcagctagaagatgatattattgtgaagcagaattacttcaacaccatcaagaattttgcgctccagctgtccagcgaggaatggatgatactggaattttcccagttaggtttcatcgggaagatgttccaggcccctgacctcacgcttatcgtggaattcatcttcatgttctataaagagaaaccaatcgattggctactggaccacatcttatgggtgaaagtctgtaatccagaaaaagatgcaaaacactgtgatcggcagaaagccaacctacgtatacgcttcagaccatccctatttcagcacgtcggattgcattcaagtctgagcgggaagatccaaaagctgaccgataaggattatatgaaacccctcctgctcaaaatacacgtaaacccacctgccgaggttagcacttctctgaaggtttatcaaggacacacactggaaaagacctatatgggtgaggatttcttctgggcgattacaccgattgcaggagattatatcttgttcaagttcgacaaacccgtgaatgtggaatcctacctgttccattctgggaatcaggagcacccgggagacatccttctcaacacgactgtggaggtgttacctttcaaaagcgagggcctcgagatatccaaagaaaccaaagataaaaggctggaggacgggtactttcgtatcgggaagttcgagaatggcgtggccgaaggaatggtagatccctcccttaaccccatctctgccttccggctgtccgtcatccaaaattccgccgtatgggcgattttgaatgagatacacatcaagaaggcgacaaattag

SEQ ID NO: 173113 - DNA, 1608 bp, Artificial Sequence
  derived and/or modified sequence
atgcgacttagaaacggtaccgttgcaactgccctcgccttcataactagcttcctcaccctgagttggtataccacgtggcagaatggtaaggagaagctcattgcataccagcgcgagtttctggctctgaaggagcgcctgagaattgctgagcatagaatctcgcagcggagtagcgagctgaacacgatcgtacagcaatttaagagggtgggcgccgaaaccaatggttcaaaggacgcattaaacaaattttccgacaatacactaaaactcctcaaggagttgacctcaaaaaagtcactgcaggtgccatccatatattatcacctgcctcacctcctgaagaacgaggggagcctacagccagccgttcagattgggaatggcaggaccggcgtctctatcgtgatggggatccccactgtcaagcgggaagtcaaatcttaccttatagaaaccctacactccctcatcgataacctttatccagaggagaaactcgactgcgtgatcgtcgtattcattggcgaaaccgacattgactacgttcatggagtcgtcgcaaacttggaaaaagagttttccaaggagatctcatccggactcgtcgaggtgatcagcccccctgagtcatattacccagacctaacaaatctgaaggagacttttggggactccaaagaacgtgtgcgctggaggacaaaacagaatcttgactactgtttcctgatgatgtatgcacaagaaaaaggaatctactacatccaacttgaggacgacattattgttaagcagaactacttcaacacaattaagaatttcgctctacagctcagcagcgaggagtggatgatcctggaattcagtcagctcggcttcattggcaaaatgttccaggcacccgatctgaccctgatcgtggagtttattttcatgttttacaaagaaaaacctatcgactggctgctcgatcatatcctgtgggtgaaagtttgtaacccggaaaaggacgcaaagcactgtgacagacagaaagccaatctgcgaatcagattcaggcctagcctgttccagcacgtgggcctccactcctcactgagtggtaaaatacagaagcttactgataaagactacatgaaaccccttctgttaaagatccacgttaatcctcccgcggaagtttcaactagcttgaaggtgtaccagggacacaccctggaaaagacttatatgggcgaggatttcttctgggccatcacgccaatagccggagactacatactttttaaatttgataaacctgtgaacgtggagtcctacctcttccatagcggtaatcaggaacatcccggcgacatccttttgaataccacagtcgaagttctaccttttaagtctgagggacttgaaatatccaaggagactaaagacaagagactcgaggacgggtatttccggatcgggaaattcgaaaatggcgttgccgagggaatggtcgacccatccctaaacccaatttctgctttccgtctgtccgtgattcagaattccgccgtctgggccatactgaacgaaattcacattaagaaggccacgaattag

SEQ ID NO: 173114 - DNA, 1608 bp, Artificial Sequence
  derived and/or modified sequence
atgcggcttaggaacgggacagtagctacagctctggcttttattacctctttcctgacactctcatggtataccacctggcagaatggaaaggagaaattaatagcttatcagcgcgagtttttagcgctaaaggagaggctgagaatcgcggagcacaggatttctcaacggagcagtgagttgaacaccattgtgcagcagttcaagagagtgggagctgaaactaacggcagcaaggacgccctaaataagtttagcgacaacaccctgaaattgttaaaggaattgacctctaagaagtcacttcaggttccatctatatattaccatttaccccacctgttaaagaacgaaggaagcttgcagcctgccgtccagatcggaaacggcaggactggagtttccattgtcatgggcatacccacagttaagagggaagtgaagtcctatctgatcgagactctgcactctctgatcgacaatctgtaccctgaggagaagctggattgcgtgatcgtggtgttcatcggcgagaccgacattgattatgtgcatggagtcgtggccaacctggagaaagaattcagcaaagaaatctcttctggactcgtcgaagttattagcccccctgagtcctactacccggatcttactaacttgaaagaaacctttggagacagcaaagaacgggtgcgctggcggactaaacagaatctggactactgtttcctaatgatgtatgcacaggaaaaaggcatctattacatacagcttgaggatgatatcatagtgaagcagaattactttaacaccataaaaaactttgcccttcagctgagtagtgaagaatggatgatccttgagttctctcagctgggtttcatcgggaagatgttccaggcccccgacctgacactgatcgtggaatttatattcatgttctacaaggagaagcctatcgactggctgttggatcatatactttgggtcaaagtctgtaacccagagaaagatgctaagcactgtgacaggcagaaagcaaaccttaggatcagattcaggcctagtctcttccaacacgtaggacttcatagctctctcagtggcaaaattcagaagcttacagataaggattacatgaaaccgctcctgctcaagattcacgtgaacccaccagccgaggtgagcacaagtcttaaagtgtatcaaggccacactcttgaaaagacctacatgggtgaagacttcttttgggctatcactcccatagcaggcgattatattctgtttaaattcgacaagccagtgaatgtggaatcctatttgtttcactctggtaatcaagagcacccaggcgacattttgctgaacaccacagttgaggttttgccttttaagagtgaaggcctggaaatcagcaaggagacaaaagataagcgactggaagacggatactttaggatcggtaagttcgagaacggcgtggcagagggtatggttgatcccagtctgaaccctatcagcgccttcagactgtctgtaattcagaacagtgcggtctgggccatactcaacgaaatccacatcaagaaagccaccaactag

SEQ ID NO: 173115 - DNA, 1608 bp, Artificial Sequence
  derived and/or modified sequence
atgaggctgagaaatggaacagtggccacagccctggccttcatcaccagcttcctgaccctgtcctggtacaccacctggcagaatggcaaggagaagctgattgcctaccagcgggagttcctggccctgaaggagcggctgagaattgctgagcaccgcatcagccagaggagcagcgagctgaacaccatcgtgcagcagttcaagagggtgggcgctgagaccaacggcagcaaggatgccctgaacaagttcagtgacaacaccctgaagctgctgaaggagctgaccagcaagaagagcctgcaggtgcccagcatctactaccacctgccccacctgctgaagaatgaaggcagcctgcagcctgctgtgcagattggaaatggccgcactggagtgtccatcgtgatgggcatccccaccgtgaagcgggaggtgaagagctacctgattgagaccctgcacagcctgattgacaacctgtacccagaggagaagctggactgtgtgattgtggtgttcatcggggagacagacatcgactatgtgcacggcgtggtggccaacctggagaaggagttcagcaaggagatcagcagcggcctggtggaggtgatcagccccccagagagctactacccagacctgaccaacctgaaggagacctttggagacagcaaggagcgggtgcgctggaggaccaagcagaacctggactactgcttcctgatgatgtatgcccaggagaagggcatctactacatccagctggaggatgacatcatcgtgaagcagaactacttcaacaccatcaagaactttgccctgcagctgagcagcgaggagtggatgatcctggagttcagccagctgggcttcatcggcaagatgttccaggccccagacctgaccctcatcgtggagttcatcttcatgttctacaaggagaagcccatcgactggctgctggaccacatcctgtgggtgaaggtgtgcaaccctgagaaggatgccaagcactgtgaccggcagaaggccaacctgcgcatccgcttccggcccagcctcttccagcacgtgggcctgcacagcagcctgagcggcaagatccagaagctgacagacaaggactacatgaagcccctgctgctgaagatccacgtgaaccccccagctgaggtgtccaccagcctgaaggtgtaccagggccacaccctggagaagacctacatgggagaggacttcttctgggccatcacccccatcgccggggactacatcctcttcaagtttgacaagcctgtgaatgtggagagctacctgttccacagcggcaaccaggagcaccctggggacatcctgctgaacaccaccgtggaggtgctgcccttcaagtctgagggcctggagatcagcaaggagaccaaggacaagaggctggaggatggctacttcagaattggcaagtttgaaaatggagtggccgagggcatggtggaccccagcctgaaccccatcagcgccttccggctgagcgtcatccagaacagcgctgtgtgggccatcctgaatgagatccacatcaagaaggccaccaactag

SEQ ID NO: 173116 - DNA, 3183 bp, Artificial Sequence
  derived and/or modified sequence
atgtagggataatctttatagatgcaatttagccctgccaaaagtctgtttataatgatgaatagtaaatgaagaaacttacattttgcattaccgaatgagcttgactttctcttttcccctgaataggaagggaaaaggccgaggcatcagcgtgtgaagaccgcaaagacgatcccgagtacagttgtgaacagcattgctgctaggctcctcctgcagatcatctgaaatgaacctctcttattgatttttattggcctagagccaggagtactgcattcagttgactttcagggtaaaaagaaaacagtcctggttgttgtcatcataaacatatggaccagtgtgatggtgaaatgagatgaggctccgcaatggaactgtagccactgctttagcatttatcacttccttccttactttgtcttggtatactacatggcaaaatgggaaagaaaaactgattgcttatcaacgagaattccttgctttgaaagaacgtcttcgaatagctgaacacagaatctcacagcgctcttctgaattaaatacgattgtgcaacagttcaagcgtgtaggagcagaaacaaatggaagtaaggatgcgttgaataagttttcagataataccctaaagctgttaaaggagttaacaagcaaaaaatctcttcaagtgccaagtatttattatcatttgcctcatttattgaaaaatgaaggaagtcttcaacctgctgtacagattggcaacggaagaacaggagtttcaatagtcatgggcattcccacagtgaagagagaagttaaatcttacctcatagaaactcttcattcccttattgataacctgtatcctgaagagaagttggactgtgttatagtagtcttcataggagagacagatattgattatgtacatggtgttgtagccaacctggagaaagaattttctaaagaaatcagttctggcttggtggaagtcatatcaccccctgaaagctattatcctgacttgacaaacctaaaggagacatttggagactccaaagaaagagtaagatggagaacaaagcaaaacctagattactgttttctaatgatgtatgctcaagaaaagggcatatattacattcagcttgaagatgatattattgtcaaacaaaattattttaataccataaaaaattttgcacttcaactttcttctgaggaatggatgattctagagttttcccagctgggcttcattggtaaaatgtttcaagcgccggatcttactctgattgtagaattcatattcatgttttacaaggagaaacccattgattggctcctggaccatattctctgggtgaaagtctgcaaccctgaaaaagatgcaaaacattgtgatagacagaaagcaaatctgcgaattcgcttcagaccttcccttttccaacatgttggtctgcactcatcactatcaggaaaaatccaaaaactcacggataaagattatatgaaaccattacttcttaaaatccatgtaaacccacctgcggaggtatctacttccttgaaggtctaccaagggcatacgctggagaaaacttacatgggagaggatttcttctgggctatcacaccgatagctggagactacatcttgtttaaatttgataaaccagtcaatgtagaaagttatttgttccatagcggcaaccaagaacatcctggagatattctgctaaacacaactgtggaagttttgccttttaagagtgaaggtttggaaataagcaaagaaaccaaagacaaacgattagaagatggctatttcagaataggaaaatttgagaatggtgttgcagaaggaatggtggatccaagtctcaatcccatttcagcctttcgactttcagttattcagaattctgctgtttgggccattcttaatgagattcatattaaaaaagccaccaactgatcatctgagaaaccaacacattttttcctgtgaatttgttaattaaagatagttaagcatgtatcttttttttatttctacttgaacactacctcttgtgaagtctactgtagataagacgattgtcatttccacttggaaagtgaatctcccataataattgtatttgtttgaaactaagctgtcctcagattttaacttgactcaaacatttttcaattatgacagcctgttaatatgacttgtactattttggtattatactaatacataagagttgtacatattgttacattctttaaatttgagaaaaactaatgttacatacattttatgaagggggtacttttgaggttcacttattttactattatagaccctcttttatagattatcagggattatatatataaatatataaatatacataaaaatgttatggaattaatttattagaaacacttaagaagtacatatttttgtgcagtagatttttgaatcgatactttttttgaaaaccagtttccttgcttttttaagttctttctatatttttctttggaaatgcaaacattacaaaccaatgccatttttcaaatgcactgccatttaagattgattatagatggatttcttaattgaagtacttttataatcacagtgactgaacaaaatattttcaaagacatttgtcattccttaaagccaagattttaaagactaatgtccttcctgagggttactttactatactgtgtatggtgtatagccacagaaagtcagtctgataaattttcaatgtgtaagtgtgatgcattcaacccagattattgtagacttaacttattatatttcctctgatatgtaaaatgacaaactcttctttcctttttaatctttgtctttaatccatgaattaggtgcattatctgctgttgattcttttatatctgcactcattttatgacgtcagacaaaatgttttctaggtgttgctattgtatgagtcataattggtataattttaaagaaaattgtaatattgttttttggtgaaatatattattagtagtatattttccaaaatgattttattgtagtatgaactgataagtgagtcccgtgtccaagagactgtatttattactcttaaacacgctattccaaatgatattactactataaacaaagaatattaccggtctcagcaa

SEQ ID NO: 173117 - DNA, 8382 bp, Artificial Sequence
  derived and/or modified sequence
cgcagcggcggcggcagcggcggcggcggctacagcagctccgccggcagccgcgggagcacggcgacgccagcggcgggaagggaaaaggccgaggcatcagcgtgtgaagaccgcaaagacgatcccgagtacagttgtgaacagcattgctgctaggctcctcctgcagatcatctgaaatgaacctctcttattgatttttattggcctagagccaggagtactgcattcagttgactttcagggtaaaaagaaaacagtcctggttgttgtcatcataaacatatggaccagtgtgatggtgaaatgagatgaggctccgcaatggaactgtagccactgctttagcatttatcacttccttccttactttgtcttggtatactacatggcaaaatgggaaagaaaaactgattgcttatcaacgagaattccttgctttgaaagaacgtcttcgaatagctgaacacagaatctcacagcgctcttctgaattaaatacgattgtgcaacagttcaagcgtgtaggagcagaaacaaatggaagtaaggatgcgttgaataagttttcagataataccctaaagctgttaaaggagttaacaagcaaaaaatctcttcaagtgccaagtatttattatcatttgcctcatttattgaaaaatgaaggaagtcttcaacctgctgtacagattggcaacggaagaacaggagtttcaatagtcatgggcattcccacagtgaagagagaagttaaatcttacctcatagaaactcttcattcccttattgataacctgtatcctgaagagaagttggactgtgttatagtagtcttcataggagagacagatattgattatgtacatggtgttgtagccaacctggagaaagaattttctaaagaaatcagttctggcttggtggaagtcatatcaccccctgaaagctattatcctgacttgacaaacctaaaggagacatttggagactccaaagaaagagtaagatggagaacaaagcaaaacctagattactgttttctaatgatgtatgctcaagaaaagggcatatattacattcagcttgaagatgatattattgtcaaacaaaattattttaataccataaaaaattttgcacttcaactttcttctgaggaatggatgattctagagttttcccagctgggcttcattggtaaaatgtttcaagcgccggatcttactctgattgtagaattcatattcatgttttacaaggagaaacccattgattggctcctggaccatattctctgggtgaaagtctgcaaccctgaaaaagatgcaaaacattgtgatagacagaaagcaaatctgcgaattcgcttcagaccttcccttttccaacatgttggtctgcactcatcactatcaggaaaaatccaaaaactcacggataaagattatatgaaaccattacttcttaaaatccatgtaaacccacctgcggaggtatctacttccttgaaggtctaccaagggcatacgctggagaaaacttacatgggagaggatttcttctgggctatcacaccgatagctggagactacatcttgtttaaatttgataaaccagtcaatgtagaaagttatttgttccatagcggcaaccaagaacatcctggagatattctgctaaacacaactgtggaagttttgccttttaagagtgaaggtttggaaataagcaaagaaaccaaagacaaacgattagaagatggctatttcagaataggaaaatttgagaatggtgttgcagaaggaatggtggatccaagtctcaatcccatttcagcctttcgactttcagttattcagaattctgctgtttgggccattcttaatgagattcatattaaaaaagccaccaactgatcatctgagaaaccaacacattttttcctgtgaatttgttaattaaagatagttaagcatgtatcttttttttatttctacttgaacactacctcttgtgaagtctactgtagataagacgattgtcatttccacttggaaagtgaatctcccataataattgtatttgtttgaaactaagctgtcctcagattttaacttgactcaaacatttttcaattatgacagcctgttaatatgacttgtactattttggtattatactaatacataagagttgtacatattgttacattctttaaatttgagaaaaactaatgttacatacattttatgaagggggtacttttgaggttcacttattttactattatagaccctcttttatagattatcagggattatatatataaatatataaatatacataaaaatgttatggaattaatttattagaaacacttaagaagtacatatttttgtgcagtagatttttgaatcgatactttttttgaaaaccagtttccttgcttttttaagttctttctatatttttctttggaaatgcaaacattacaaaccaatgccatttttcaaatgcactgccatttaagattgattatagatggatttcttaattgaagtacttttataatcacagtgactgaacaaaatattttcaaagacatttgtcattccttaaagccaagattttaaagactaatgtccttcctgagggttactttactatactgtgtatggtgtatagccacagaaagtcagtctgataaattttcaatgtgtaagtgtgatgcattcaacccagattattgtagacttaacttattatatttcctctgatatgtaaaatgacaaactcttctttcctttttaatctttgtctttaatccatgaattaggtgcattatctgctgttgattcttttatatctgcactcattttatgacgtcagacaaaatgttttctaggtgttgctattgtatgagtcataattggtataattttaaagaaaattgtaatattgttttttggtgaaatatattattagtagtatattttccaaaatgattttattgtagtatgaactgataagtgagtcccgtgtccaagagactgtatttattactcttaaacacgctattccaaatgatattactactataaacaaagaatattaccggtctcagcaatcagtgatctttataaaagtacttttaaaaaatgatgaattatcaccaggcgctgtggctcacgcctgtaatcccagcactttgggaggccgaggcgggcggatcacgaggtcaggagatcaagaccatcctggctaacacggtgaaaccctgtctctactaaaaatacaaaaaattagccaggcgtggtggcaggtgcctgtaatcccagctacttgggaggctgaggcaggagaatggcgtgaacccaggaggcagagctggcagtgagctgagatcgcaccactgcactccagcctgggcgacacagctagactccgtctcaaaaaaaaaaaaagatgaagtatcaacatcagttcccagccagtctgcttggacacactggggtgccacaagtgggttgcaggttggttgcagacgggcagagatggattctgctgagctttcagagtgaccactggctggggcctagcgctggggcaaggttccagctggctgcctctagcctggaggagcttcatctagttacccaatgtgctgaaccaacagcatgaaatagcatcatttcctgtgctgtgttacaaagtgcaaacgtttggaaacactgatacagtacaattatttccatcactccatgttgttataatttttagttacttttcttgattgaaaagtcaatcacattgccaaaaatgatttttatgtcagttaaaggccagttgaaatttttttattaggatgttttaaatttacttttcactttcttgaatttttttcttctcaaatttccttggcccagtgcccatgagcaaatttcattcaaaaacaggaataaccttttgtcataaaattttggcaccagcttggtatactaaattactgcaaagataactgagtaccagaagtaaaaatctctgcaggtgggcttaggagtactcttgggtccctggttcctcagttgccaactctggtttcatgaagaaagaccatgctctgaaaatctagggaggagaaagttattgcagcacctggtgtgatttgttacaacttctttaaagacagcctgcctggctagctttttcctgttttcatgcagtttgccctcccagcattggtccacctgttgttcccaagaaactcattcttgttcccaagactccttttagccaaatctttcctatcattccaggacttttttgtgcttctctccccatgaatctacccgtgcctagggtgtgtgccaggcacgtggcaggtggccagtcagcatctggatgtgagaccaattattccagcctgccctcctctttctctttttatcattttgtattatttttgagacagggtctcgctttgttgcccaggctggagtgcagtggtgctctcatagctcactgcagcctcgatctctggcctcaagcaatcctcctgcctcagcctcccaaagtgctgggattataggtgtgtgccaccatgtccagccccctttctctctcttaactccctctccctgctgtcgttgccatactcttgcatacacaatcggttgtctagtttttgattgtttgtgtgtatggtgtgtgctgtctctctgaccagatttcaggttcctgaggcgagcctgcagctcatactgctcatctgtcctctcctatggtgggtgctcagggcctctcactgttagttactccctcctttctgcccagttctgcactcaactagtagaagcagccatcctttccccaagcaggaaattgtagtggtcgcccttaagagcagtgtgagggcagaagattaagggaggggaagagtccctggaactggaagaaggtaaatactttgccttgagagggcgccgaatcattttaccaaaatagtaaatggaaaaagtgtcaaaggttgggactagttttaaaaacacatatagccagtagacacatgggggctgtttaaataaaaacatttttttacccggttctgccatcacacacactagtgacattccaagtactcagtggccatgtggagctagtggccaccacacttgacaccacggatgcagaacttttccatcactgcagaaagctctgttgaacagtactgtgtccagagtgctaattatgaacagcttagaaaccacaattaatacattctcatgaggttaaaagcagacatgggaatagaacataatgcaaatgatgatgaatattttgggtgagaagagaaagctgaggacccatttctaggattctaagatgtaagatttcttaagttctttatcttagtctcatgcattctccacatcacgcgctgtaccatactgtgtagtcagaacagacagtgtgattgaaaagctttggaaaaagttaacacaaaggattatttagcacataggctgtagatacgtatgtgtgtatttgttcaacaattggagatggttgaatacccttgaacaaagtgtgtatcttctcaaatcagtggttgcactagtcaataattagaaggtgttgttatttttaaaactataagcaaaattatgaaggcctttaaaaaatctatcataataatgaaaaagaggttgtctcccaacagtgctgtccctcaaagaaaagactggttatgtggaaacagcacgtttggagagattattctagtgaataacagtgtatatttgtggtaggcaaatttctaagaatgacccctactgacacccccaccaatgaccttgtataatatcctcccactttgagcatgggtggaacctgtttgatccatgattatatcatgttatgtagcaaaaggaagactgtctgggggtggctaatcaaatcttgtgactcctttaaaagcagagagttttctcgggctggtggcagaagtcaagagacaaagcagaaggacctcaggcaccattgctgttttaaggtagagggggctgcatgagaaggaatgcacatggctttgaggagctgagagaggccttggctaacagcaaaggagctgggaactgcagtcctacagccacgggaactgaattcagcccataagctcattcataggcttggaaaggcattcatctccagtctccagataagacccagcctggccaacactttgaatccagccttgtgagaccctaagccgagaactcacttaagcctgcttggacttctgacctacagaactatgagataataaatcagtggtgttttaagctgctaaatttgtggcaatttgttatgtaggaataggaaatgaatacagtattttaaaagaggtaaagaggaaatcttcatacttgattccctgtagtatgctggatatttcttggtaaatgcatgaataaagtctttagtagcaagtcatgtacctggaccttgttggggatgttctcgccagagatctcaattagtcttcattggacgtttgttggcaaagttgcagcatcttactgagtagcgtttggtaaaggaactgctagaatgagactataggaataggactgaaacagtgtgtaagggatcttttttatttctagaagaggtgttactttatactgatttagactgctctgagcctgtcagaagtaaattcaagaatgattaacagtggtattttagatacattaagagcaaaaataacctttgccttgtagagatcagataatctgtgtatcgagggatttaattttttttaaccaaaacttagtttctctttttatcatctagcacagatcaaatcctgtatgggccagccaaatgtttgtagtttgagaatgttttgcaaatacctctctgcttccaagccattaatagctaatgaagttttattttggtttgtccattaatttttctgcttatttttactgtattgccatgtccttgatacgagacaagtagaactaaaagagagaaaatgagaggttaagactgtcagaagatgagaaatgtgagtcataaccataccttagtgttttaagggaactttatccagtccaatccctttatagaaaaggaacttttccaagttatgttgcagtatttatagtgtgtaaaattttgtttgactttggtagttgtgcattttaaattatgaatcttatatgctacgataactagtatgcttactttctttaatgcatgtgatcatacaatgctaaaaaggtattttttaaagacccaaccaaactgaggattttgttatacatatctgtatcaacacctatatataaactcttcttcttacctgaaacactccttcacccggtttgggcactaactagatcattttcaaaggaacaaacaggaaggagcaagctggcactccagggtgcatctgagctgagaatttagaagacctcattcaagaaagtaaactgagcattgatgggaaagcactttgcgcgaagtaacattcccactgttaatgttgcagtcaaaattgtggaaaaaaaaaagtggtgctaaaattgttctgaaatgaagattgtttgttgtggggaatattttaatactcttggactttagggaggctattttatgtgtcacttgctcctagttgtttcattgtattagtaattagcaaactgtcctggaaccaagggtttggtacttttgcctgattagcattccattatttatttgaaatgctcagtgtttgctcaaatttggtgaaaatatcttttgaagacatattctctgagccttaaaaatggctgctatcgacagtactgtaagatgcactgccagtagatttgatacttttcatttcagtgtaggcagtaatgttttctaagaaagatttagaaatcagcaaagtgtaacaattgtgtttcatttatggaatggaaaaactgaagtgtcccattcagaacactttggaaaggttgtctgcattaggggatgtttctggaagcatcccttagagaagctgcctgaggaatctccttgccaggttgtaccagatttttttttttcttaaatgtattgtatatattttccttaaaatgtcttcattggctgaatgattcctatccgtagtaatattttaggtacttgttggatttttaaaggaagattatttattttcagatttgctgctataattgaaaacctagtaactggtcctgttgattgtgccttcatcactgtttctctgtgccacgaccgttcatgtgtatttgaaataaagaagtttaaaaagccatgttgaattcaagattccttctaataaaaataggtgaaacttaa

SEQ ID NO: 173118 - DNA, 2018 bp, Artificial Sequence
  derived and/or modified sequence
aaaatcagtcaccataactttctttttacagacaaaacaaaaccaatgaggagggaatatagtttgaagctgttttgtatttttttccaggaggagaaggaccatataattccagaagggaaaaggccgaggcatcagcgtgtgaagaccgcaaagacgatcccgagtacagttgtgaacagcattgctgctaggctcctcctgcagatcatctgaaatgaacctctcttattgatttttattggcctagagccaggagtactgcattcagttgactttcagggtaaaaagaaaacagtcctggttgttgtcatcataaacatatggaccagtgtgatggtgaaatgagatgaggctccgcaatggaactgtagccactgctttagcatttatcacttccttccttactttgtcttggtatactacatggcaaaatgggaaagaaaaactgattgcttatcaacgagaattccttgctttgaaagaacgtcttcgaatagctgaacacagaatctcacagcgctcttctgaattaaatacgattgtgcaacagttcaagcgtgtaggagcagaaacaaatggaagtaaggatgcgttgaataagttttcagataataccctaaagctgttaaaggagttaacaagcaaaaaatctcttcaagtgccaagtatttattatcatttgcctcatttattgaaaaatgaaggaagtcttcaacctgctgtacagattggcaacggaagaacaggagtttcaatagtcatgggcattcccacagtgaagagagaagttaaatcttacctcatagaaactcttcattcccttattgataacctgtatcctgaagagaagttggactgtgttatagtagtcttcataggagagacagatattgattatgtacatggtgttgtagccaacctggagaaagaattttctaaagaaatcagttctggcttggtggaagtcatatcaccccctgaaagctattatcctgacttgacaaacctaaaggagacatttggagactccaaagaaagagtaagatggagaacaaagcaaaacctagattactgttttctaatgatgtatgctcaagaaaagggcatatattacattcagcttgaagatgatattattgtcaaacaaaattattttaataccataaaaaattttgcacttcaactttcttctgaggaatggatgattctagagttttcccagctgggcttcattggtaaaatgtttcaagcgccggatcttactctgattgtagaattcatattcatgttttacaaggagaaacccattgattggctcctggaccatattctctgggtgaaagtctgcaaccctgaaaaagatgcaaaacattgtgatagacagaaagcaaatctgcgaattcgcttcagaccttcccttttccaacatgttggtctgcactcatcactatcaggaaaaatccaaaaactcacggataaagattatatgaaaccattacttcttaaaatccatgtaaacccacctgcggaggtatctacttccttgaaggtctaccaagggcatacgctggagaaaacttacatgggagaggatttcttctgggctatcacaccgatagctggagactacatcttgtttaaatttgataaaccagtcaatgtagaaagttatttgttccatagcggcaaccaagaacatcctggagatattctgctaaacacaactgtggaagttttgccttttaagagtgaaggtttggaaataagcaaagaaaccaaagacaaacgattagaagatggctatttcagaataggaaaatttgagaatggtgttgcagaaggaatggtggatccaagtctcaatcccatttcagcctttcgactttcagttattcagaattctgctgtttgggccattcttaatgagattcatattaaaaaagccaccaactgatcatctgagaaaccaacacattttttcctgtgaatttgttaattaaagatagttaagcatg

SEQ ID NO: 173119 - DNA, 1608 bp, Artificial Sequence
  derived and/or modified sequence
atgcggctgcggaacggcaccgtggccaccgccctggccttcatcacctctttcctcaccctcagctggtataccacctggcagaacggcaaggagaagcttatagcctatcagcgtgaattccttgcgttgaaggagagattgcgtattgcagagcacaggatcagtcagcggtctagtgaactgaataccattgtgcagcaatttaaaagagtcggcgctgaaacaaatggatcgaaggacgccctcaacaagttctctgacaacaccctgaaactgctaaaggagctcaccagcaagaaaagcctgcaggtgccttcgatctactatcatctgcctcacctgctgaagaacgaaggctcgctacagcccgccgtacagatcggtaacggacggaccggcgtgtctatcgtgatgggtatccccactgtgaagagggaagttaagtcctacttgatcgaaaccctgcattcacttatcgataatctgtaccctgaagaaaagctagactgtgttatcgtggttttcattggggagactgatattgactacgtgcacggggtggttgcgaacttggaaaaggaattcagtaaagagatatcctccggactggtggaagtcatctctcccccagagtcatactaccctgatctgaccaatctgaaggaaacctttggcgattccaaggagagagtacgctggagaactaagcagaacttagactattgcttcctgatgatgtacgctcaagagaagggcatttactacatccagctggaagacgatatcatcgtcaagcagaattactttaatactatcaagaatttcgctcttcagttgtcctctgaggagtggatgatcctggaattcagtcagttgggcttcattggtaagatgttccaggctccagatcttactttgattgttgagttcatcttcatgttctataaagagaaacccatcgattggctcctggaccacatcttatgggtcaaagtttgcaatccggagaaggacgcaaagcattgtgaccggcagaaagctaatttgcgcattcgcttcaggccttcgctcttccagcacgtcggtcttcacagctcactcagcggcaaaattcagaaactgaccgacaaggactatatgaagcccttgctgctgaagatccacgtgaaccctcctgcagaagtcagtactagcttgaaagtgtaccaagggcacacactggaaaaaacttatatgggcgaggatttcttctgggctattactccgattgcgggcgattacattctgtttaagttcgataagcctgtgaatgtggagtcttacctgttccactccgggaatcaggagcatccaggcgatatcctgttgaacactaccgttgaggtgttgccctttaagagcgaaggcctcgagatcagcaaagagaccaaggataagcggctggaagatggatattttcgtatagggaaatttgagaacggagtggctgagggtatggtcgatcctagcctgaaccctatcagcgccttcagactaagtgttatccaaaacagcgccgtctgggctatcctgaacgaaattcacatcaagaaggccaccaactag

SEQ ID NO: 173120 - DNA, 1608 bp, Artificial Sequence
  derived and/or modified sequence
atgcggctgcggaacggcaccgtggccaccgccctggccttcatcacttcctttctgacgctctcctggtacaccacgtggcagaatggaaaggaaaagcttattgcctatcagagggagtttcttgctttaaaagaacggctcagaatagccgagcatcgcattagccagcggagttctgaactgaatactatcgtgcaacaattcaaaagggtgggcgccgagaccaacggttccaaagacgcactcaacaaattttcagataacaccctcaaactcctcaaggagctcacctcaaagaaaagcctgcaggtccccagcatttactatcatctcccccatttgctgaaaaacgagggttcactgcagcctgctgtacagattgggaatgggagaaccggggtatcgatcgttatgggaattcctacggtgaagcgggaagtgaagagctacttaatcgaaacattgcatagcctgatcgacaacctctacccagaggagaagctcgactgcgtgattgtcgtctttattggtgagacagacatcgactatgttcatggagttgtggctaacctggagaaggagttcagtaaggaaatatcaagcgggctcgtagaggtgattagcccccctgaatcttattacccagatctcacaaaccttaaagagaccttcggcgactctaaagagagggttcggtggcggactaagcagaatctcgattactgctttctgatgatgtacgcacaagagaaaggaatatactatattcaattggaagatgatattatcgttaaacagaattacttcaacactattaagaacttcgccctgcaactgtccagtgaagagtggatgattctggaattctctcagttggggtttataggtaaaatgtttcaggcgccggacctgaccctcattgtggaattcatcttcatgttttacaaggagaagccaattgattggctcctagaccatattctctgggtgaaagtgtgtaatccagaaaaagatgctaagcattgtgatcgtcagaaggcaaatctgagaattaggtttcgcccctcactcttccagcacgtgggactacattcttccctctccgggaagatccagaaactgaccgacaaggactatatgaagcctctgctgctgaagattcatgtgaaccctcctgctgaagtgtccaccagtctcaaagtgtatcagggccataccctcgagaagacgtatatgggcgaggactttttttgggccattactcctatcgcaggagattatattttgtttaaattcgacaaacccgtgaatgtggagagctacctcttccacagcggcaaccaagagcaccccggggatatcctcctgaatactaccgtagaggtgctgcccttcaagtctgaagggctggaaatcagtaaggagacaaaggacaagcgccttgaagacgggtacttccggatcgggaagttcgaaaacggtgtcgcagaaggtatggtggacccttccttgaaccccatttcggccttcaggttatccgttatccagaactctgctgtgtgggctatcctcaacgagatccacatcaagaaagctacaaactag

SEQ ID NO: 173121 - DNA, 1608 bp, Artificial Sequence
  derived and/or modified sequence
atgcggctgcggaacggcaccgtggccaccgccctggccttcatcacctctttcctgaccctctcatggtacactacttggcagaatggcaaggagaagctgattgcctatcagagggagtttctggcactgaaagaaagactgcgaattgcggaacatagaatatctcaacgctcctcagaactgaatacaatcgtgcagcagtttaaaagagttggcgccgagactaatggttccaaagacgccctgaataagttttcagacaacaccctcaaactgttaaaagagcttactagcaagaagtccctccaggtgccctcaatttactatcatttgccacacctcctgaagaacgagggttctctgcaaccggcggtgcagatcggcaatggcagaacgggggtgagcattgtaatgggtatcccaactgtaaagcgtgaagttaagtcatatctgatcgaaacactgcacagcttgattgataatctgtatccagaagagaaactggattgcgtcattgtggtgtttattggggagacagatatagactacgtgcatggtgtggtggcgaatctcgaaaaagaattctcaaaagagatctctagtggactggtagaagtgatctctccccccgagtcatactaccctgacctcaccaacctcaaggaaacgtttggcgactccaaggagcgtgtacgctggagaacaaagcagaacctggactactgctttttgatgatgtacgcacaagaaaaggggatttattatattcagcttgaggatgatattatagttaagcagaattattttaataccattaaaaatttcgcgttgcagttgagcagtgaagaatggatgatcctcgaattttcccagcttggctttatcggaaaaatgtttcaggccccagatttgaccctcatcgttgaattcattttcatgttttacaaagagaagccgattgattggctcttggaccatattctgtgggttaaggtgtgcaatccagaaaaggatgcaaagcattgtgacagacaaaaggcaaatctgagaatacgatttaggcctagtctattccaacacgtgggcctgcactcctccctgagtggcaagattcaaaagctgacggacaaagattatatgaaaccactgcttctgaagatccatgtgaatccgcccgctgaggtgtctactagcctgaaggtctaccagggccacacactggaaaaaacctatatgggggaggactttttctgggctattaccccaatagcaggagactacattcttttcaagtttgacaagccggttaatgtggaaagttacctctttcattccggcaatcaggagcatcccggagacatcctgttgaacaccacagtggaggttctaccgttcaaaagcgagggactcgaaatttccaaagaaacaaaagataagcgactggaggatggatactttaggattggcaagtttgagaacggggtagccgaaggcatggtagacccatctttaaatccaatttccgcttttcggttgtcagtgattcaaaattctgccgtgtgggccatactgaacgagatccatatcaagaaggccaccaattag

SEQ ID NO: 173122 - DNA, 1608 bp, Artificial Sequence
  derived and/or modified sequence
atgcgactcagaaacggcacggtggccactgccctagcgtttattacgtcttttctgaccttgtcatggtacactacatggcagaacgggaaggagaaactgatcgcctaccagagggagtttttggccctgaaggagcggctcagaattgccgaacaccggatttctcagaggagctctgaacttaacacaatcgttcaacagtttaagcgtgttggtgctgagacaaatgggagcaaggatgctcttaataagttcagcgataatactctaaaactgcttaaggaactgactagtaaaaaaagcctccaggtgccaagcatatactaccatctgccgcatttgctcaaaaatgaagggagcctgcagcctgccgtacaaatcgggaatggtcggaccggcgtgagcatcgtaatggggattcccaccgttaaacgcgaggtcaagtcctatcttatcgagactttacatagtctgatcgacaacctatatcctgaggagaaactggattgcgtgatcgttgtgtttataggcgaaaccgacattgattacgtgcacggagtggtagccaacctggaaaaggaattttcgaaagagatcagttcaggtttggtggaagtaatcagcccgcctgaatcgtactatccagacctgaccaacctgaaggaaacttttggggatagtaaggagcgtgtcagatggcgcaccaagcagaatctggattattgcttcttgatgatgtatgcacaagaaaagggaatctattatatccagctggaggatgatattatcgttaagcagaactacttcaatacaatcaagaacttcgcacttcaactaagctcagaggaatggatgatcctggaattcagccagctgggttttattggaaaaatgtttcaggccccagacctgacacttatcgtagaatttatttttatgttttataaggagaagcctatagattggttactggatcacatcctttgggtgaaggtctgcaatcctgagaaggatgctaagcattgtgatcgacaaaaggctaatcttagaataaggtttcggccatcattattccagcacgtcgggctgcatagtagtctttctgggaagatccagaagctgactgataaagactacatgaaaccactgcttttaaagattcacgtgaatccgcctgctgaagtgtcgacatcgttaaaagtctaccaggggcacactcttgaaaaaacatacatgggggaagactttttctgggcaatcactccgatcgctggcgactacattctgttcaaattcgacaagcccgttaatgtcgaatcatatttgttccattcaggaaatcaagaacacccaggggatatccttttaaatactaccgtcgaggtcctgccctttaagtcagagggcctcgaaatcagtaaagaaacaaaagataagcgtcttgaggatggctacttccggattgggaaattcgagaatggtgtcgctgagggcatggtggaccctagcctgaacccaatctccgccttcaggctctccgtcatccagaactcagctgtgtgggcaattctgaacgagatccatattaagaaggccactaactag

SEQ ID NO: 173123 - DNA, 1608 bp, Artificial Sequence
  derived and/or modified sequence
atgaggctgcgtaatgggaccgttgctaccgccctcgcctttatcacgagctttctgacgctgtcctggtatacgacatggcagaacggcaaggagaagctgatagcctaccagcgcgagttcctggcactaaaggagcggctccgaattgcagaacatcgtatatcccagagatcctctgagctaaataccatagtgcagcagttcaagcgcgtgggcgcagagaccaacggaagcaaggacgccctgaacaagtttagtgataataccttgaagctactgaaggagctgacatccaaaaagtccctacaagtcccgagtatttattatcatctgccccatctcttaaaaaacgagggctctttgcaacccgcagtccagataggcaatggcaggaccggcgtcagcattgtcatgggaattccaacagttaagcgtgaggtaaaatcttatttaatcgaaaccctccactccctgatcgataacttataccctgaagaaaagcttgattgcgtgatagtcgtatttatcggagagacggacattgattatgtccatggagtggtggccaatttggagaaggagtttagtaaagagatcagttccggcttagtggaggttatatccccccctgaatcatattaccctgatttgacaaatctgaaggagacatttggcgattcaaaggagcgggtgcggtggcgtacgaagcaaaacctggattactgttttctgatgatgtatgcgcaggagaagggcatatattatattcagctggaagacgacatcattgtgaagcagaattatttcaatactattaagaactttgctcttcagcttagcagtgaggagtggatgattctggagttttcccagttgggctttatcggcaagatgtttcaggctcccgacctcacactaatcgtggaatttattttcatgttttacaaggagaagccaattgactggctcctagatcatattttgtgggtgaaggtgtgtaaccccgagaaagacgcaaaacactgcgatagacagaaagcaaacttaaggattcgctttcgcccaagcctgtttcaacatgtgggtctccacagcagcttatcaggcaagattcagaagttgacagataaggattacatgaaacccctgttactgaaaatacatgttaaccctccggctgaggtgagcacaagtctgaaggtctatcaaggccacactttggaaaagacatatatgggagaggacttcttttgggctattacacctatcgctggcgactacattctgtttaagtttgacaaacccgtgaatgtggagagctacctgtttcattctgggaaccaggaacaccccggtgatattttattaaacaccacagtggaagtgctccccttcaagtctgaagggctggaaattagcaaagaaactaaggataagcggcttgaggatgggtactttcggatcgggaagtttgaaaacggcgtggccgaaggcatggttgatccaagccttaatccaatctccgcctttcgcctctctgtgattcagaacagcgcagtgtgggctattctgaatgagatccacatcaagaaggctacgaattag

SEQ ID NO: 173124 - DNA, 1608 bp, Artificial Sequence
  derived and/or modified sequence
atgcggcttaggaatgggactgtggccactgcacttgccttcattacatctttcctgactcttagctggtacaccacttggcagaacggtaaagagaagcttatcgcctatcagcgcgagtttttggccttgaaggaacgcctcaggatcgctgagcatcgaatttcacagaggtcaagtgaattgaatactattgttcagcagtttaaaagagttggcgctgaaactaacggatctaaagacgcgctgaacaaattctccgataacaccttgaaactgctgaaggagttgacatcaaaaaagtcccttcaagttccttctatctattatcatctacctcacctgttgaagaatgaaggttcccttcaacccgcagttcagatcggcaacggtcgaaccggggtgagcatcgtgatggggatacctactgtcaagcgtgaggtcaagtcttacctgattgagactctgcactccctaatcgataacctttatcccgaggagaaattggactgtgttatagtggtgttcatcggtgaaacagacattgactatgttcacggggttgtcgctaaccttgaaaaggaattttcaaaagagatatcttctgggctggtggaagttatttcccctccagagtcgtactatcccgatctgacaaatctgaaagaaactttcggagatagtaaggagagggtccggtggaggacaaagcagaatctcgattactgttttttaatgatgtacgcccaagagaaagggatatactatatccagcttgaggatgatatcatagtgaaacagaattatttcaataccataaaaaatttcgccctccagctgtctagtgaagagtggatgattctggaattctcccagctgggattcatcggaaagatgttccaagccccagacctgactctgatagtggagtttatttttatgttctataaggagaaaccaattgattggctcctcgaccatattttatgggtcaaagtctgcaatcctgaaaaggatgcaaagcattgcgaccggcagaaggcaaacctgcgaatccgctttcgaccctcactgttccagcatgtcgggctccactcctctctatcaggcaagatccagaagctgaccgacaaagactatatgaagccactgctgttgaaaatccacgtgaaccccccagcagaggtttccacatcgctcaaagtgtaccagggtcacacgttagaaaaaacatatatgggtgaggacttcttttgggccatcactcccatcgcaggggactatatcctgtttaaatttgacaagcccgtcaacgtggaatcttacctcttccattcaggtaaccaggagcatccgggtgacattctgctcaatactactgtggaggtgctgccattcaagagcgaaggactggaaatctccaaggagaccaaggacaaaaggctggaggacggatacttcagaatcggaaagttcgaaaacggggtggcagaggggatggttgacccaagcctgaaccctatctctgcatttcgtctctctgtgattcagaattcggccgtctgggccattcttaatgagatccacattaaaaaggctacaaactag

SEQ ID NO: 173125 - DNA, 1608 bp, Artificial Sequence
  derived and/or modified sequence
atgagactgagaaacggcaccgtggccaccgccctggccttcatcaccagcttcctgaccctgagctggtacaccacctggcagaacggcaaggagaagctgatcgcctaccagagagagttcctggccctgaaggagagactgagaatcgccgagcacagaatcagccagagaagcagcgagctgaacaccatcgtgcagcagttcaagagagtgggcgccgagaccaacggcagcaaggacgccctgaacaagttcagcgacaacaccctgaagctgctgaaggagctgaccagcaagaagagcctgcaggtgcccagcatctactaccacctgccccacctgctgaagaacgagggcagcctgcagcccgccgtgcagatcggcaacggcagaaccggcgtgagcatcgtgatgggcatccccaccgtgaagagagaggtgaagagctacctgatcgagaccctgcacagcctgatcgacaacctgtaccccgaggagaagctggactgcgtgatcgtggtgttcatcggcgagaccgacatcgactacgtgcacggcgtggtggccaacctggagaaggagttcagcaaggagatcagcagcggcctggtggaggtgatcagcccccccgagagctactaccccgacctgaccaacctgaaggagaccttcggcgacagcaaggagagagtgagatggagaaccaagcagaacctggactactgcttcctgatgatgtacgcccaggagaagggcatctactacatccagctggaggacgacatcatcgtgaagcagaactacttcaacaccatcaagaacttcgccctgcagctgagcagcgaggagtggatgatcctggagttcagccagctgggcttcatcggcaagatgttccaggcccccgacctgaccctgatcgtggagttcatcttcatgttctacaaggagaagcccatcgactggctgctggaccacatcctgtgggtgaaggtgtgcaaccccgagaaggacgccaagcactgcgacagacagaaggccaacctgagaatcagattcagacccagcctgttccagcacgtgggcctgcacagcagcctgagcggcaagatccagaagctgaccgacaaggactacatgaagcccctgctgctgaagatccacgtgaacccccccgccgaggtgagcaccagcctgaaggtgtaccagggccacaccctggagaagacctacatgggcgaggacttcttctgggccatcacccccatcgccggcgactacatcctgttcaagttcgacaagcccgtgaacgtggagagctacctgttccacagcggcaaccaggagcaccccggcgacatcctgctgaacaccaccgtggaggtgctgcccttcaagagcgagggcctggagatcagcaaggagaccaaggacaagagactggaggacggctacttcagaatcggcaagttcgagaacggcgtggccgagggcatggtggaccccagcctgaaccccatcagcgccttcagactgagcgtgatccagaacagcgccgtgtgggccatcctgaacgagatccacatcaagaaggccaccaactag

SEQ ID NO: 173126 - protein, 916 aa, Artificial Sequence
  derived and/or modified sequence
MVQKESQATLEERESELSSNPAASAGASLEPPAAPAPGEDNPAGAGGAAVAGAAGGARRFLCGVVEGFYGRPWVMEQRKELFRRLQKWELNTYLYAPKDDYKHRMFWREMYSVEEAEQLMTLISAAREYEIEFIYAISPGLDITFSNPKEVSTLKRKLDQVSQFGCRSFALLFDDIDHNMCAADKEVFSSFAHAQVSITNEIYQYLGEPETFLFCPTEYCGTFCYPNVSQSPYLRTVGEKLLPGIEVLWTGPKVVSKEIPVESIEEVSKIIKRAPVIWDNIHANDYDQKRLFLGPYKGRSTELIPRLKGVLTNPNCEFEANYVAIHTLATWYKSNMNGVRKDVVMTDSEDSTVSIQIKLENEGSDEDIETDVLYSPQMALKLALTEWLQEFGVPHQYSSRQVAHSGAKASVVDGTPLVAAPSLNATTVVTTVYQEPIMSQGAALSGEPTTLTKEEEKKQPDEEPMDMVVEKQEETDHKNDNQILSEIVEAKMAEELKPMDTDKESIAESKSPEMSMQEDCISDIAPMQTDEQTNKEQFVPGPNEKPLYTAEPVTLEDLQLLADLFYLPYEHGPKGAQMLREFQWLRANSSVVSVNCKGKDSEKIEEWRSRAAKFEEMCGLVMGMFTRLSNCANRTILYDMYSYVWDIKSIMSMVKSFVQWLGCRSHSSAQFLIGDQEPWAFRGGLAGEFQRLLPIDGANDLFFQPPPLTPTSKVYTIRPYFPKDEASVYKICREMYDDGVGLPFQSQPDLIGDKLVGGLLSLSLDYCFVLEDEDGICGYALGTVDVTPFIKKCKISWIPFMQEKYTKPNGDKELSEAEKIMLSFHEEQEVLPETFLANFPSLIKMDIHKKVTDPSVAKSMMACLLSSLKANGSRGAFCEVRPDDKRILEFYSKLGCFEIAKMEGFPKDVVILGRSL

SEQ ID NO: 173127 - DNA, 2751 bp, Artificial Sequence
  derived and/or modified sequence
atggtccagaaagagtcccaggctaccctggaagaacgggagagcgagttgtccagtaacccagctgcctcagccggggcctcactggagccacctgctgctccggcaccaggagaagataaccccgcaggcgccggcggggcagccgtcgctggcgcagccgggggcgcacggcgctttctttgtggcgtagtcgaggggttttacggtcggccctgggtcatggagcagcgcaaagaactgtttcgaagattacaaaaatgggagctgaacacctacttgtatgcaccaaaggacgattacaagcatcggatgttttggagagaaatgtatagcgtggaggaagccgagcagctcatgacgctcattagcgcagccagagagtatgagatcgaattcatttatgccatcagtcccggtctcgatattacatttagtaacccaaaggaggtctcaacactgaaaaggaaattggaccaggtgtctcaattcggctgtcgctcctttgccctcctttttgatgatattgaccataacatgtgtgccgcagataaggaagtgtttagttccttcgctcatgcccaggtttccattaccaatgaaatctatcagtacttaggggagccagaaacattcctgttctgcccaaccgagtactgcggtactttctgctacccaaacgtgagtcagtcgccgtacctgagaacagtgggcgaaaagcttctgcccggaattgaggtgttatggacagggcctaaggtggtttcaaaggagattccggtcgaaagcattgaagaggtgtcaaagatcatcaaacgtgcccccgtcatctgggacaacatacacgcaaacgactatgaccagaagagactcttcttgggaccatacaagggcagatcaaccgagctgatcccgcgcttgaagggcgtactgactaatccaaattgcgaatttgaggccaattacgtcgccatccatacccttgccacttggtacaagtccaatatgaacggcgtgcgcaaagatgtggtgatgacggattctgaggattcaacagtgtcaattcagattaaactggagaatgaaggaagtgacgaggatatcgaaactgatgttctgtattcgccccagatggccctgaaactcgcgcttaccgaatggttgcaagagtttggcgtgccgcaccagtattctagtcggcaagttgcacatagcggggcaaaggcatccgtcgtggatggtacgcccctggtggccgcgcccagtctgaacgccacaaccgtcgtgactaccgtctatcaggaacccataatgagccaaggggccgccctgtccggcgagcccaccactctgaccaaagaggaagagaagaaacagccggacgaagaacccatggacatggtagttgaaaagcaagaggaaacagatcacaagaacgataatcagatcctgagcgaaatcgtggaagccaagatggctgaggaactgaagccaatggataccgataaggaatcaattgcagagtccaagagcccagaaatgagcatgcaggaagattgtataagcgatatagcacccatgcagacagacgagcagacaaataaggaacagttcgttcctgggcctaatgagaagccactgtacactgccgaacccgtgacccttgaagaccttcagctgctcgctgatctgttttacctgccctacgagcatggtcctaagggcgcacaaatgttacgagaatttcagtggctgcgggctaactccagtgtggtgtccgtcaactgcaagggcaaggactcagagaaaatcgaagaatggcggtcccgggctgccaagtttgaagagatgtgtggcctggtgatgggcatgttcactagactctctaactgcgccaatcggacgatattgtatgacatgtactcttacgtatgggatatcaaatcaattatgtctatggtgaaatctttcgtccagtggctggggtgcaggtctcatagctcagcccaattcttaatcggggatcaagaaccttgggcgttccgcggtggcctggctggggagttccagcggctgctgcccatagatggggctaacgatctctttttccagcccccacctctcacccctactagcaaagtgtataccattaggccgtactttcccaaggacgaagcctcagtctacaaaatttgtagggagatgtacgacgatggagtaggactacctttccaaagtcagcccgacctcataggggataaactggtcggtgggctactttccctgtccctcgactactgcttcgtgctggaggatgaggatggcatatgtggctacgccctcggcactgtcgacgtcacgccatttatcaaaaaatgtaagattagttggattccgttcatgcaggagaagtacacaaagcccaacggtgataaggagctcagcgaggccgagaagattatgttgtcctttcacgaggaacaggaggtcctccccgagacgttccttgctaatttcccgtctctgattaagatggacatccataaaaaggtgaccgaccctagcgtggccaaaagtatgatggcatgtcttctttcttctcttaaggctaatggatcacggggagctttctgcgaggtgcggcctgatgacaagcgtatcctggaattttactccaagttaggatgtttcgaaatcgctaagatggagggctttccaaaagatgtcgtcattctggggagaagcttgtag

SEQ ID NO: 173128 - DNA, 2034 bp, Artificial Sequence
  derived and/or modified sequence
atggtgcaaaaggagtcacaggctaccctcgaggagagggagtcagagctgtcttcaaacccggccgcctcagctggcgccagccttgaacctcctgcggcccccgctcctggcgaagataatcctgccggcgccggcggggctgccgtggcgggtgcggccgggggcgcaaggagattcctgtgcggggtcgtggaaggcttctacggcagaccatgggttatggaacagaggaaagaactgtttagacgcttacaaaagtgggaactgaatacttacctgtatgcccctaaagacgactataaacataggatgttctggagagaaatgtattcagtcgaagaggcggagcagctgatgactctgatcagtgcagcgcgagagtacgagatcgagttcatttatgctataagccctgggctcgacataacctttagcaaccctaaagaagtttccacactcaaacgcaaattggaccaggtctctcaattcggctgtagatcctttgctttgctcttcgatgatatcgatcataacatgtgtgccgcagacaaagaggtgttttcaagcttcgcccacgcacaggtgtcaattacaaacgagatctaccagtacctgggagagcccgaaacattcttattctgccctacagagtattgtggtacattctgctaccccaacgtctctcagtccccttatctgcgaaccgttggtgagaagctgcttcctgggattgaggtgctctggaccggccctaaggtggtgagcaaagaaattccagtcgaatcaattgaggaagtgtctaagatcattaaaagggccccagtcatttgggataatatacacgccaatgactacgatcagaaacgactgttccttggtccctacaaaggcaggtccactgagctgatacctcgattgaagggagtcctgaccaatccaaattgtgaatttgaagccaactatgttgcaattcacactctggcgacatggtacaaaagcaacatgaacggcgtgaggaaggacgtcgtaatgacggattcagaggattctacggtctctatacagatcaaactcgagaatgagggaagcgacgaagatattgagacggacgtgctgtactctccgcagatggccttaaaactggcactgacagaatggttgcaggaatttggggtgccccatcagtactcatcacggcaggtggcacacagtggcgctaaggcctcggtcgtcgacgggacaccactagtggccgccccaagcctgaatgccactaccgtggttaccactgtttaccaggaacctatcatgagccagggggcagccctgagcggtgagcctacaactcttactaaggaggaagaaaaaaagcaaccagacgaggagccgatggacatggttgtggagaagcaggaggaaacagatcacaaaaatgacaaccagatactgagcgaaatagtggaggccaagatggcggaagagctgaagccaatggatactgataaggagtccatcgctgagagcaaatcgccagagatgtccatgcaggaagattgcatatcagacatcgccccgatgcagactgacgaacaaactaacaaagaacagttcgtgccagggccaaacgagaagccgttgtatactgctgagccagtaacattagaggatctccagctgctcgccgaccttttttacctgccatacgagcacgggcctaagggcgcccagatgttgcgcgaattccagtggctgagggcaaactctagtgttgtgtctgtaaactgtaaggggaaagacagcgaaaagattgaggaatggcggagtcgggcagccaaattcgaagagatgtgtgggcttgtaatgggcatgtttacccggttgtccaactgcgctaacaggaccattctatacgatatgtactcttatgtgtgggacataaagtccattatgtccatggtgaagagcttcgttcagtggctggggaggtgtaccaggaataatcttttttcaagtaatatcttatctctgtag

SEQ ID NO: 173129 - DNA, 2751 bp, Artificial Sequence
  derived and/or modified sequence
atggtgcagaaggagagccaggccaccctggaggagcgggagagcgagctgagcagcaacccagctgccagcgctggggccagcctggagcccccagctgccccagcccctggagaggacaacccagctggagctggaggagctgctgtggccggggccgccggcggggcccggcgcttcctgtgtggggtggtggagggcttctacggccggccctgggtgatggagcagaggaaggagctgttccggcggctgcagaagtgggagctgaacacctacctgtatgcccccaaggatgactacaagcacaggatgttctggagggagatgtacagcgtggaggaggccgagcagctgatgaccctcatctctgctgcccgggagtatgaaattgagttcatctatgccatcagccctggcctggacatcaccttcagcaaccccaaggaggtgtccaccctgaagaggaagctggaccaggtgtcccagtttggctgccgcagctttgccctgctgtttgatgacatcgaccacaacatgtgtgccgctgacaaggaggtgttcagcagctttgcccacgcccaggtgtccatcaccaatgagatctaccagtacctgggggagcctgagaccttcctgttctgccccacagagtactgcggcaccttctgctacccaaatgtgtcccagagcccctacctgaggacagtgggggagaagctgctgcccggcatcgaggtgctgtggacaggccccaaggtggtgtccaaggagatccctgtggagagcattgaggaggtgtccaagatcatcaagagggcccctgtgatctgggacaacatccacgccaatgactatgaccagaagaggctcttcctgggcccctacaagggccgcagcacagagctgatcccccggctgaagggcgtgctgaccaaccccaactgtgaatttgaggccaactacgtggccatccacaccctggccacctggtacaagagcaacatgaatggagtgaggaaggatgtggtgatgacagacagcgaggacagcacagtgtccatccagatcaagctggagaatgaaggaagtgatgaggacatcgagacagatgtgctgtacagcccccagatggccctgaagctggccctgacagagtggctgcaggagtttggagtgccccaccagtacagcagccggcaggtggcccacagcggggccaaggcctctgtggtggatggcacccccctggtggccgcccccagcctgaatgccaccaccgtggtgaccaccgtgtaccaggagcccatcatgagccagggcgccgccctgtctggagagcccaccaccctgaccaaggaggaggagaagaagcagccagatgaggagcccatggacatggtggtggagaagcaggaggagacagaccacaagaatgacaaccagatcctgtctgaaattgtggaggccaagatggccgaggagctgaagcccatggacacagacaaggagagcattgctgagagcaagagccctgagatgtccatgcaggaggactgcatcagtgacatcgcccccatgcagacagatgagcagaccaacaaggagcagtttgtgcccggccccaatgagaagcccctgtacacagctgagcctgtgaccctggaggacctgcagctgctggccgacctcttctacctgccctatgaacatggccccaagggggcccagatgctgcgggagttccagtggctgcgggccaacagctctgtggtgtctgtgaactgcaagggcaaggacagcgagaagattgaggagtggaggagcagagctgccaagtttgaggagatgtgtggcctggtgatgggcatgttcacccggctgagcaactgtgccaacagaaccatcctgtatgacatgtacagctatgtgtgggacatcaagagcatcatgtccatggtgaagagctttgtgcagtggctgggctgccgcagccacagcagcgcccagttcctgattggagaccaggagccctgggccttccggggcggcctggccggggagttccagaggctgctgcccattgatggagccaatgacctcttcttccagcccccacccctgacccccaccagcaaggtgtacaccatccggccctacttccccaaggatgaggcctctgtgtacaagatctgccgggagatgtatgatgatggagtgggcctgcccttccagagccagcctgacctgattggagacaagctggtgggcggcctgctgagcctgagcctggactactgctttgtgctggaggatgaagatggcatctgtggctacgccctgggcaccgtggatgtgacccccttcatcaagaagtgcaagatctcctggatccccttcatgcaggagaagtacaccaagcccaatggagacaaggagctgtctgaggccgagaagatcatgctgtccttccacgaggagcaggaggtgctgcctgagaccttcctggccaacttccccagcctcatcaagatggacatccacaagaaggtgacagaccccagcgtggccaagtccatgatggcctgcctgctgagcagcctgaaggccaacggcagcagaggagccttctgtgaggtgcggccagatgacaagaggatcctggagttctacagcaagctgggctgctttgaaattgccaagatggagggcttccccaaggatgtggtgatcctgggccgcagcctgtag

SEQ ID NO: 173130 - DNA, 2034 bp, Artificial Sequence
  derived and/or modified sequence
atggtgcagaaggagagccaggccaccctggaggagcgggagagcgagctgagcagcaacccagctgccagcgctggggccagcctggagcccccagctgccccagcccctggagaggacaacccagctggagctggaggagctgctgtggccggggccgccggcggggcccggcgcttcctgtgtggggtggtggagggcttctacggccggccctgggtgatggagcagaggaaggagctgttccggcggctgcagaagtgggagctgaacacctacctgtatgcccccaaggatgactacaagcacaggatgttctggagggagatgtacagcgtggaggaggccgagcagctgatgaccctcatctctgctgcccgggagtatgaaattgagttcatctatgccatcagccctggcctggacatcaccttcagcaaccccaaggaggtgtccaccctgaagaggaagctggaccaggtgtcccagtttggctgccgcagctttgccctgctgtttgatgacatcgaccacaacatgtgtgccgctgacaaggaggtgttcagcagctttgcccacgcccaggtgtccatcaccaatgagatctaccagtacctgggggagcctgagaccttcctgttctgccccacagagtactgcggcaccttctgctacccaaatgtgtcccagagcccctacctgaggacagtgggggagaagctgctgcccggcatcgaggtgctgtggacaggccccaaggtggtgtccaaggagatccctgtggagagcattgaggaggtgtccaagatcatcaagagggcccctgtgatctgggacaacatccacgccaatgactatgaccagaagaggctcttcctgggcccctacaagggccgcagcacagagctgatcccccggctgaagggcgtgctgaccaaccccaactgtgaatttgaggccaactacgtggccatccacaccctggccacctggtacaagagcaacatgaatggagtgaggaaggatgtggtgatgacagacagcgaggacagcacagtgtccatccagatcaagctggagaatgaaggaagtgatgaggacatcgagacagatgtgctgtacagcccccagatggccctgaagctggccctgacagagtggctgcaggagtttggagtgccccaccagtacagcagccggcaggtggcccacagcggggccaaggcctctgtggtggatggcacccccctggtggccgcccccagcctgaatgccaccaccgtggtgaccaccgtgtaccaggagcccatcatgagccagggcgccgccctgtctggagagcccaccaccctgaccaaggaggaggagaagaagcagccagatgaggagcccatggacatggtggtggagaagcaggaggagacagaccacaagaatgacaaccagatcctgtctgaaattgtggaggccaagatggccgaggagctgaagcccatggacacagacaaggagagcattgctgagagcaagagccctgagatgtccatgcaggaggactgcatcagtgacatcgcccccatgcagacagatgagcagaccaacaaggagcagtttgtgcccggccccaatgagaagcccctgtacacagctgagcctgtgaccctggaggacctgcagctgctggccgacctcttctacctgccctatgaacatggccccaagggggcccagatgctgcgggagttccagtggctgcgggccaacagctctgtggtgtctgtgaactgcaagggcaaggacagcgagaagattgaggagtggaggagcagagctgccaagtttgaggagatgtgtggcctggtgatgggcatgttcacccggctgagcaactgtgccaacagaaccatcctgtatgacatgtacagctatgtgtgggacatcaagagcatcatgtccatggtgaagagctttgtgcagtggctgggccgctgcaccaggaacaacctcttcagcagcaacatcctgagcctgtag

SEQ ID NO: 173131 - DNA, 5146 bp, Artificial Sequence
  derived and/or modified sequence
aggcagcagcagagggagagctcggggcttggaggggaaacagcggaagacctaagattatcgggagggcagcagaggcagagaacgaggacaggacccttggccgtcttcttccagggaacgagaggtcacagcctcgctctccgcttaggcttctggcgccccagcttaaagccgaggctgcggctgacaaagggctcgcgccggtgccgccgcccttctcatccgggcattcgggtccctgcggagagggagggggaagggcagagggggaggggaaggagccggaggggcgcacacttggagctgaagccctctccagggctccgggccggtgccccaacggacagaggtcgaggaggacccgcagaggtggcagcggccgggggcaggaggatggtgcagaaggagagtcaagcgacgttggaggagcgggagagcgagctcagctccaaccctgccgcctctgcgggggcatcgctggagccgccggcagctccggcacccggagaagacaaccccgccggggctgggggagcggcggtggccggggctgcaggaggggctcggcggttcctctgcggtgtggtggaaggattttatggaagaccttgggttatggaacagagaaaagaactctttagaaggctccagaaatgggaattaaatacatacttgtatgccccaaaagatgactacaaacataggatgttttggcgagagatgtattcagtggaggaagctgagcaacttatgactctcatctctgctgcacgagaatatgagatagagttcatctatgcgatctcacctggattggatatcactttttctaaccccaaggaagtatccacattgaaacgtaaattggaccaggtttctcagtttgggtgcagatcatttgctttgctttttgatgatatagaccataatatgtgtgcagcagacaaagaggtattcagttcttttgctcatgcccaagtctccatcacaaatgaaatctatcagtacctaggagagccagaaactttcctcttctgtcccacagaatactgtggcactttctgttatccaaatgtgtctcagtctccatatttaaggactgtgggtgaaaagcttctacctggaattgaagtgctttggacaggtcccaaagttgtttctaaagaaattccagtagagtccatcgaagaggtttctaagattattaagagagctccagtaatctgggataacattcatgctaatgattatgatcagaagagactgtttctgggcccgtacaaaggaagatccacagaactcatcccacggttaaaaggagtcctcactaatccaaattgtgaatttgaagccaactacgttgctatccacacccttgccacctggtacaaatcaaacatgaatggagtgagaaaagatgtagtgatgactgacagtgaagatagtactgtgtccatccagataaaattagaaaatgaaggcagtgatgaagatattgaaactgatgtactctatagtccacagatggctctaaagctagcattaacagaatggttgcaagagtttggtgtgcctcatcaatacagcagtaggcaagttgcacacagtggagctaaagcaagtgtagttgatgggactcctttagttgcagcaccctctttaaatgccacaaccgtagtaacaacagtttatcaggagcccattatgagccagggagcagccttgagtggtgagcctactactctgaccaaggaagaagaaaagaaacagcctgatgaagaacccatggacatggtggtggaaaaacaagaagaaacggaccacaagaatgacaatcaaatactgagtgaaattgttgaagcgaaaatggcagaggaattgaaaccaatggacactgataaagagagcatagctgaatcaaaatccccagagatgtccatgcaagaagattgtattagtgacattgcccccatgcaaactgatgaacagacaaacaaggagcagtttgtgccaggtccaaatgaaaagcctttgtacactgcggaaccagtgaccctggaggatttgcagttacttgctgatctattctaccttccttacgagcatggacccaaaggagcacagatgttacgggaatttcaatggcttcgagcaaatagtagtgttgtcagtgtcaattgcaaaggaaaagactctgaaaaaattgaagaatggcggtcacgagcagccaagtttgaagagatgtgtggactagtgatgggaatgttcactcggctctccaattgtgccaacaggacaattctttatgacatgtactcctatgtttgggatatcaagagtataatgtctatggtgaagtcttttgtacagtggttagggtgtcgtagtcattcttcagcacaattcttaattggagaccaagaaccctgggcctttagaggtggtctagcaggagagttccagcgtttgctgccaattgatggggcaaatgatctcttttttcagccacctccactgactcctacctccaaagtttatactatcagaccttattttcctaaggatgaggcatccgtgtacaagatttgcagagaaatgtatgacgatggagtgggtttaccctttcaaagtcagcctgatcttattggagacaagttagtaggagggctgctttccctcagcctggattactgctttgtcctagaagatgaagatggcatatgtggttatgccttgggcactgtagatgtgaccccctttattaaaaaatgtaaaatttcctggatccccttcatgcaggagaagtataccaagccaaatggtgacaaggaactctctgaggctgagaaaataatgttgagtttccatgaagaacaggaagtactgccagaaactttccttgctaatttcccttctctgataaagatggacattcacaaaaaagtaactgacccaagtgtggccaaaagcatgatggcttgcctcctgtcttcactgaaggctaatggctcccggggagctttctgtgaagtgagaccagatgataaaagaattctggaattttacagcaagttaggatgttttgaaattgcaaaaatggaaggatttccaaaggatgtggttatacttggtcggagcctgtgacatttgttgacactgtgaactgtccaaaagtctcttaactgcaccttgtgaatggtagttgaggtcttcatacagttcagcctctagaatggtaacaaatcagccaattggattcgaaacaaagaagactatgtaaaactcacccatcacactttgagactactcactggttggaagaatatagtattgcagcaaatcctgtatgaaagagagatgtgggcttcctttttgagtcttgtgttaggtgctgagaccttttacatgggcttatacagggagagagtcttcaataaatgtagtcagcactattttctgcatccagtgtggttgcgtttctcacctgagagtaatcaagataacatctgtcatcttccttggtttattgagtgaaatgcctctcagtcttaggggacatggcagagatgaaagaaagaaagagtgggtttcagaagtgtcagggtggagtgattccaagtgggatggttgtggcattagtttaagctgaataaataatttcaatttggggcagttattctgctttttgtaaagccgtggccaattgtctcctgtaatgactgttggttcaggcatgttgtactttgtagggacaaatgtgcatttgtttgtggcaaaagcctacaattgacaaacttgtaaatttctttgtatataaactagctgtaacctgactatcctttgtgtttactgtttttgtaaatttttttcctctataaatgaaagggtgttggttcagaatggcactttgaataatgtaaaccagtgaaaagtggattttctttacttttgtctttgggtttggggttgtttttgttctttttgaagttttattatttttaaagtgcctcccacctaggcgtaggccatgaccatttggggtacgagagcctaattttgtaggacttaatctgttgaaaagtgcagttacttctggaaattaacctcaatattaggtcagcatgtgaaatgttggatttgacatgtcaggtagggttcagggactgattggtcccatttgccctcaggtcagttgtttaatctcaagacctgttactactgattttattaaatcagagtctttaattcttgcatgtttgtatctaatttctgaatgaatgagcacactttaaccagttatttacagttacctttttcctttaaccggattgtgaaagcttcatgtattttaatttagattctgtgtttttaagggttctgagcatgaagctggcagatagtcggcaggactcattttttcatcatggctggctgatttctccatagattgataacagtattttgttatcttgcttctctgtagttttgcatcagctgtttaactttgagctgagtgaggggagaggggtaaagagaaagaaacttaagttttctttcacagaactccaccattgtgggctttgagagagccctaaagcattgtacctagtggtacctagtgacttccaaccaaagcctttgagtatgcactaaataggtgagaagaaaggagagaaggtttttaggttagaaacctttaaccgatagaaggatatggtatgttgtaaagctggaaccaagtttgcatttttgagggcttgagatgaagggaagactcttaccagatagtaagacagctgagttttcctcagttttctcgtcttaacactagtggacaattctagcattttgtttggaggatttcagagttaacctcatggaattcaggattttttagcaagtttgcttttggttttatcttggcttttagtaatcatgttggctggtctggtcacaggtgactgtgaaacagatgccctggtcttgctttcatcactctaggatcatgaagtgctatgctatttcctggttatgaatattaaggttggaattacatttttattgattgtttggatcagagctcagttcctgtagaaaacgaactgtaaaagaccatgcaagaggcaaaataaaacttgaagtg

SEQ ID NO: 173132 - DNA, 3314 bp, Artificial Sequence
  derived and/or modified sequence
aggcagcagcagagggagagctcggggcttggaggggaaacagcggaagacctaagattatcgggagggcagcagaggcagagaacgaggacaggacccttggccgtcttcttccagggaacgagaggtcacagcctcgctctccgcttaggcttctggcgccccagcttaaagccgaggctgcggctgacaaagggctcgcgccggtgccgccgcccttctcatccgggcattcgggtccctgcggagagggagggggaagggcagagggggaggggaaggagccggaggggcgcacacttggagctgaagccctctccagggctccgggccggtgccccaacggacagaggtcgaggaggacccgcagaggtggcagcggccgggggcaggaggatggtgcagaaggagagtcaagcgacgttggaggagcgggagagcgagctcagctccaaccctgccgcctctgcgggggcatcgctggagccgccggcagctccggcacccggagaagacaaccccgccggggctgggggagcggcggtggccggggctgcaggaggggctcggcggttcctctgcggtgtggtggaaggattttatggaagaccttgggttatggaacagagaaaagaactctttagaaggctccagaaatgggaattaaatacatacttgtatgccccaaaagatgactacaaacataggatgttttggcgagagatgtattcagtggaggaagctgagcaacttatgactctcatctctgctgcacgagaatatgagatagagttcatctatgcgatctcacctggattggatatcactttttctaaccccaaggaagtatccacattgaaacgtaaattggaccaggtttctcagtttgggtgcagatcatttgctttgctttttgatgatatagaccataatatgtgtgcagcagacaaagaggtattcagttcttttgctcatgcccaagtctccatcacaaatgaaatctatcagtacctaggagagccagaaactttcctcttctgtcccacagaatactgtggcactttctgttatccaaatgtgtctcagtctccatatttaaggactgtgggtgaaaagcttctacctggaattgaagtgctttggacaggtcccaaagttgtttctaaagaaattccagtagagtccatcgaagaggtttctaagattattaagagagctccagtaatctgggataacattcatgctaatgattatgatcagaagagactgtttctgggcccgtacaaaggaagatccacagaactcatcccacggttaaaaggagtcctcactaatccaaattgtgaatttgaagccaactacgttgctatccacacccttgccacctggtacaaatcaaacatgaatggagtgagaaaagatgtagtgatgactgacagtgaagatagtactgtgtccatccagataaaattagaaaatgaaggcagtgatgaagatattgaaactgatgtactctatagtccacagatggctctaaagctagcattaacagaatggttgcaagagtttggtgtgcctcatcaatacagcagtaggcaagttgcacacagtggagctaaagcaagtgtagttgatgggactcctttagttgcagcaccctctttaaatgccacaaccgtagtaacaacagtttatcaggagcccattatgagccagggagcagccttgagtggtgagcctactactctgaccaaggaagaagaaaagaaacagcctgatgaagaacccatggacatggtggtggaaaaacaagaagaaacggaccacaagaatgacaatcaaatactgagtgaaattgttgaagcgaaaatggcagaggaattgaaaccaatggacactgataaagagagcatagctgaatcaaaatccccagagatgtccatgcaagaagattgtattagtgacattgcccccatgcaaactgatgaacagacaaacaaggagcagtttgtgccaggtccaaatgaaaagcctttgtacactgcggaaccagtgaccctggaggatttgcagttacttgctgatctattctaccttccttacgagcatggacccaaaggagcacagatgttacgggaatttcaatggcttcgagcaaatagtagtgttgtcagtgtcaattgcaaaggaaaagactctgaaaaaattgaagaatggcggtcacgagcagccaagtttgaagagatgtgtggactagtgatgggaatgttcactcggctctccaattgtgccaacaggacaattctttatgacatgtactcctatgtttgggatatcaagagtataatgtctatggtgaagtcttttgtacagtggttaggtaggtgcaccaggaataatctcttctcctcaaatatattgtccctttaaaaaaaattatcccacagggagaaaaacatttagggaattggcacatttccaagtctcttcaattcgttgcctaggtttctttcaaaaataggcattattgaagacttgagatgcaagtcttagtaaatacatcaagcacattaatttttctcccttgggctaattcagcataagtatcttaaaagtatgttagaaagtactgactttaacttgctctgactgaatgctttctggatggaaccctgtataccacttttatctgatttggagatgagacactatgaaatgtgactccacaagctttctgctgcttgctgtgtcttgataacattaatgctatgtttaacagaacaattgctgaaatgacctaaagggcctggcaagaggaagccatcctcccagccctgtgcgcatgcgagctttagtgtaaggctattctggtgctattcagtattatttcacgtggctttttctttatccttctaccaagtattggttttaccaggggatagaaattgtaatcccctaaacatctctgctacattaaatggacttttgtatgtctcctttgaacactgattttttttttttaaattgtcaaacttggtaaaaagcaccagcatggccaagtttctctagggacttcatttcattttcaggttttcaatccagctataaggaatatgtaatggacttatatacagcacacagcaggcagcaaggctgactgacatgtcatagttttcatagtagtcacaaatactatgatgggtttcatggtcttggttgtgaaatagatatctgaaacaccgtgagcttagaataaaaagtagtagtgagattttccactttctgcctgtatacctttgagctcttaaatattt

SEQ ID NO: 173133 - DNA, 2751 bp, Artificial Sequence
  derived and/or modified sequence
atggtgcagaaggagagccaggccaccctggaggagcgggagagcgagttgtctagcaatccagctgcctccgcgggggcaagcctcgaacctcccgcagcgcctgccccaggagaagacaaccctgccggagctggcggtgcagccgttgccggcgctgccgggggggcccgccgcttcctctgcggggtggtggaaggcttctacgggcggccttgggtaatggaacagcggaaggagttattcagaaggcttcagaaatgggaactaaatacctacctctacgctccaaaggacgactacaaacacagaatgttctggagggaaatgtattctgttgaagaggcagagcagttaatgacactgataagtgcagcgagagaatatgaaatcgagttcatttacgctatatccccaggactcgatattactttctcaaatccaaaagaggtcagtacattaaaacgcaaactcgaccaggtcagccagtttggatgtcgtagttttgccctgctgttcgatgatattgatcataacatgtgcgctgctgacaaggaggtcttttcaagtttcgcccacgcgcaggtttcaatcacaaacgaaatttaccaatatctgggggaaccagagacattccttttttgcccgacagagtattgtggtaccttctgctatcccaatgtctcgcagagtccttatcttaggacagtcggagagaagctcttgcctggcatcgaagtcttgtggaccggacctaaagtggtgagtaaggagatccccgtcgaaagcatagaggaggtcagcaagattattaaaagggccccagttatttgggacaacatccacgctaatgactatgaccagaaaagactttttctgggtccttataagggccgaagcactgagttaattcctcggctgaaaggggttctcaccaatcccaactgtgaattcgaagccaactacgtcgccatccacactctggccacatggtacaaatccaacatgaatggggtgcgcaaggacgtagtgatgaccgacagcgaagattcaactgtctctatccaaatcaaactggagaatgagggtagcgacgaggatatcgagacagacgtgctatattccccccagatggctctgaagttggcgcttaccgagtggctccaggagtttggcgtcccccaccaatatagctcccgccaggtggcgcactctggcgctaaagcaagcgttgtggatgggacccccctagtcgcagccccctctctgaatgctacaactgtcgtaacaacagtttatcaagagcccattatgagtcagggtgctgccttaagcggggagcccactacactcacaaaggaagaagagaaaaaacagcccgacgaggaacccatggacatggtggtggagaagcaggaggagaccgaccacaagaatgacaaccagatcctgtccgagattgttgaggctaagatggcagaggaattgaagcccatggatactgataaagagtccattgcggagagtaagagtcccgaaatgagcatgcaagaggattgcatttcagatatcgccccgatgcagacagatgagcagaccaacaaggaacaatttgtgcccgggcccaacgagaagccactgtacactgcagagcccgtgacactcgaagatcttcagcttttggctgaccttttttatttgccatacgaacacggacctaagggggctcagatgctacgggagttccagtggcttcgagctaatagcagtgttgtaagcgtcaattgcaaggggaaagacagcgagaaaattgaggagtggagaagccgagcggccaagttcgaagaaatgtgtgggctggtgatggggatgttcacccgcctttccaactgtgcgaatcggaccatcctttacgatatgtactcatacgtctgggatattaagagcatcatgtccatggtaaaatcttttgtgcagtggctgggatgtcggtctcatagctccgcccagtttctgattggcgaccaggagccctgggcatttaggggcgggttggcgggcgagttccagaggctgctaccaattgacggtgcgaacgacctgttcttccagcctccccccctgaccccaaccagcaaggtttataccattcggccatatttcccaaaagacgaggccagtgtgtacaagatttgtcgggagatgtatgacgacggggtagggctgccgttccagagccaaccggacttaattggcgataaattggtcggtggtttgctatccctgtccctggactattgtttcgtgttggaggacgaggatggcatctgtggttacgccctcggcactgtggacgtgaccccctttatcaagaagtgtaagatatcttggatccctttcatgcaggagaaatacacgaaacccaatggcgataaggaactgtctgaggccgagaagatcatgttaagtttccatgaagaacaggaggtacttcccgagacctttctggccaacttccccagtctaattaaaatggacattcataagaaagtaactgacccatcggttgctaagtctatgatggcgtgtctactgtcctcattaaaagcaaacggctcaagaggcgcgttctgtgaagtcaggcctgacgataagcggattctagagttttactccaaactgggctgcttcgagattgccaagatggaaggcttccccaaagacgtagtgatcctcggacgatcattgtag

SEQ ID NO: 173134 - DNA, 2034 bp, Artificial Sequence
  derived and/or modified sequence
atggtgcagaaggagagccaggccaccctggaggagcgggagagcgaactcagctctaatccagccgcatcagccggcgcgtcactggagccccccgctgcaccagcccctggcgaggacaatcctgccggtgcgggtggagccgcagttgctggagctgcgggaggtgccagaagatttctgtgtggggttgtggagggattctacggaaggccttgggtgatggaacaacgcaaagagttgtttcggcgcctgcagaaatgggagttaaacacctacctgtatgctccaaaggacgactataagcacaggatgttctggagagagatgtacagtgtggaagaggccgaacagctgatgaccttgatctctgcagcgcgggaatatgagatcgagtttatctatgcaatcagtcccggtctggatatcacattttcgaacccaaaggaagttagtactttaaagaggaagctggaccaggtcagtcaatttggctgccggtcttttgcccttctgttcgatgacattgaccataatatgtgcgcggcagacaaagaagtattctcatccttcgcccatgcacaggtgtccattaccaatgaaatctatcagtacctgggcgagcccgagacctttctgttctgcccaaccgaatattgtggcaccttctgctatcctaacgtctcacagagcccgtatctccgcacagtgggcgaaaaactgctgccaggtatcgaggtcctgtggacagggcctaaggtcgtaagcaaggagatcccagtggaatctatcgaggaggtgagtaagatcattaagcgcgcacctgtgatttgggataacattcacgcgaatgactacgatcagaaaagactcttcctgggcccatataaaggccggtccaccgagctgatcccccgacttaaaggagtgctcacgaacccaaattgcgagttcgaggctaattacgtcgctatacacaccctggcaacctggtacaagagcaatatgaatggagtgagaaaggacgtagtgatgactgactctgaggactcaactgtgagcattcagattaaactggagaatgaaggaagcgatgaggacattgagacagatgtgctttatagcccacagatggctctgaaactcgcacttaccgagtggctgcaggagttcggggtgcctcaccagtactcctccagacaggttgcccactccggagcaaaggcgtcagtggtcgatggcacaccacttgtggctgcaccaagtctcaatgcaacaactgtagtgacaacggtttatcaggagccaataatgagtcagggagccgccctgtcaggagagccaaccaccttgacaaaggaggaggaaaagaaacagcccgacgaagagccaatggatatggtcgtggaaaaacaggaggaaacagaccataagaacgataaccagattctttccgagattgtggaggcgaaaatggcggaggagcttaaaccaatggataccgataaggagtctatcgctgagtctaagagcccagagatgagtatgcaggaggactgtatcagcgacatcgcaccgatgcaaactgatgaacagactaataaagagcagtttgtgcctgggccgaatgaaaagcccctctacactgctgaacccgttacactggaagacctacagctgcttgccgacctgttttatcttccctatgaacacgggccgaagggtgctcaaatgctgcgggaatttcagtggctgcgcgcaaacagcagcgttgtaagcgtgaactgcaaagggaaagatagcgaaaagattgaagagtggcgcagccgcgccgccaagtttgaagagatgtgcggcctggtgatggggatgtttactagactgtctaactgtgctaacagaacaatcctgtatgacatgtattcttacgtgtgggatatcaagtctataatgtctatggtgaagagcttcgtccagtggctgggtcgctgtacccgtaacaatcttttctcatcaaacattctgtctttgtag

SEQ ID NO: 173135 - DNA, 2751 bp, Artificial Sequence
  derived and/or modified sequence
atggttcagaaggaatcccaagccacattggaagagagagagagcgagctcagttccaaccctgctgcatccgcaggtgctagcctagaaccccctgccgcacctgccccaggagaggataacccggctggggcaggtggcgctgccgtcgctggggcagcaggcggagcacggagattcctatgcggagtcgtggaagggttttacggtagaccatgggtgatggagcagcgcaaggaactcttccgcagactgcagaagtgggagctgaacacatacttatacgctcccaaggacgattataagcaccgcatgttttggagagaaatgtatagtgtcgaagaggccgaacaactcatgacgttaataagtgccgctcgagagtacgagattgaatttatctatgccattagccccggactggacattaccttcagtaatcccaaagaagtgtccacactgaaaagaaagttggaccaggtgtctcaattcggttgtaggtcctttgccttgctttttgatgacatcgaccataatatgtgcgctgctgataaagaggtgttttccagttttgctcacgcacaggtttctatcactaatgagatataccaataccttggcgaacctgagacctttctgttctgccccactgaatattgtggaacattttgctaccccaatgtctctcaatctccttacctccgtacagtgggtgagaaactattgcctggcattgaggtcttatggacggggccaaaggttgtatccaaagaaatccctgtggagtcaatcgaggaggtgtcaaagatcattaaaagggccccagttatttgggacaatatccacgcaaatgattatgatcagaagagactgttccttggaccatacaaaggacgctccactgagcttatcccccgtcttaaaggagtgcttaccaatcccaactgcgagtttgaggccaactacgtggccattcacaccctcgccacttggtataagtcaaacatgaacggggtgcggaaagacgtggtgatgaccgactccgaagacagcacggtgtcaatacaaatcaagttggaaaatgaaggatctgacgaagacatcgagacggacgtcctttattcaccccaaatggcacttaagttggccctgactgagtggctacaggagttcggtgtgccccaccagtatagtagtcgccaagttgcccacagcggcgctaaagcttccgtggtggatgggacacctctggtggccgctcccagcctcaatgccaccactgttgtcacaaccgtgtaccaagaacccatcatgagccagggtgcagccctgtccggggaaccaactacactgactaaagaggaagagaagaagcagcccgatgaagagccaatggacatggtagtggaaaagcaggaagaaacagatcataagaacgacaaccagatactgtcggaaattgtcgaggccaagatggctgaggagctgaaacctatggacaccgataaggagagtattgccgagtccaaaagtcccgagatgtcaatgcaagaggactgcatctccgacattgcacccatgcagaccgacgagcaaaccaataaggaacagttcgtaccgggaccaaacgaaaagcctttgtacacggccgaaccggtcacactggaagatctgcagctgcttgcggacctgttctacttgccatatgagcatggtcccaagggcgctcagatgttaagggagttccagtggctgagggccaatagctctgtggtatccgtgaattgcaaggggaaagattcagagaaaatcgaagagtggcggtccagagctgcaaagtttgaagaaatgtgtggattggtaatgggtatgttcacacggctgagtaattgtgccaatcggacgatactctatgacatgtactcatatgtgtgggatatcaaatctattatgagcatggttaagagctttgtgcagtggcttggctgtagaagccactcttctgcacagttcttgattggtgaccaggaaccatgggccttcagaggcggactggccggtgagtttcagagactgctgccaatcgacggggcaaacgatctttttttccaacctcccccattaacgcctactagtaaagtttataccatccgtccctacttcccaaaggacgaggcgtctgtttacaaaatatgccgcgagatgtacgacgatggggtgggactgcccttccagagccaacctgacctgatcggcgacaaattagtaggcggactcctctcactgagcctagactactgtttcgtgctggaagatgaagacggaatctgcggttacgcgttgggtacagtagacgtcactccgttcattaagaaatgtaagatatcctggattccgtttatgcaggagaaatacactaagcctaatggcgacaaagagctcagcgaagctgagaaaatcatgctgtctttccatgaagagcaggaagttctgcctgagaccttcctcgccaattttcctagcttgattaaaatggacatccacaaaaaggttactgacccgagtgttgccaagtctatgatggcctgtctcctgtcctcgttgaaggcgaacggtagtaggggcgcattttgtgaggtccgacctgatgataaaagaattcttgagttttatagcaagttgggctgctttgagatcgccaaaatggagggctttccgaaggatgtggttatccttggcagaagtctgtag

SEQ ID NO: 173136 - DNA, 2034 bp, Artificial Sequence
  derived and/or modified sequence
atggtgcagaaagaatcccaggccaccctcgaagaacgcgagagcgaactttccagcaacccggcagcctcggcaggagcctcactcgagccacccgctgcccctgcaccaggtgaagataacccagcaggggctggcggtgccgcagtagcgggtgccgcaggcggagctcgaaggtttctatgtggcgtggtggagggattctacggccgaccctgggtcatggagcaaaggaaggagttatttagaagactccagaaatgggagcttaacacatatctgtatgccccaaaggatgactacaaacacaggatgttctggagggaaatgtactctgttgaagaagccgagcaactgatgactcttataagtgctgctagagaatatgagatcgagttcatctacgccatatcacctgggctggacataactttttcaaatcccaaggaggtgtctaccctgaaaaggaagttagatcaggtgtcacagttcgggtgcagatcattcgccctgctgtttgatgacattgatcacaatatgtgtgccgcagataaagaggtcttcagcagttttgcccacgcccaggtgtccattacgaatgaaatatatcagtatctgggagagccagagacatttcttttttgcccgacagagtactgcggaactttttgttatccaaacgtcagccagtcaccttaccttcgcacggttggtgaaaagcttcttcctggcattgaggtcctctggaccggtcctaaagtagtgtccaaagagattccagtggagagtatagaggaggtgtcgaagataatcaagcgtgcgccagtgatctgggacaatattcatgcaaacgattatgaccagaagcgactgttcttgggcccatacaaaggcaggagcaccgagttaatccccaggctaaaaggcgtgctaacgaaccctaattgcgagttcgaggctaactatgttgccattcataccctggcaacttggtataaatccaatatgaatggggtgcgaaaagacgttgtgatgacagacagtgaggattcaaccgtctctatccagatcaagttagaaaacgaagggtcagatgaagatatcgagacagatgtcctctatagcccgcaaatggcactaaaattggccctgacagagtggctccaggagtttggggtgcctcaccagtatagcagcaggcaagtcgcccacagtggggcaaaggcatctgtggtcgatggcactccactagttgcagcgcctagcttaaatgcaacaaccgttgtgacgacagtgtatcaggaaccaatcatgagtcagggcgcagctttgtccggcgaacctaccacattaaccaaggaagaggagaagaagcagccggacgaggagcctatggacatggtggtggagaagcaggaggaaaccgatcacaaaaatgataaccagatactgtccgaaattgtggaggctaagatggcggaggaattgaaacccatggatactgacaaggagtcaattgctgaatccaaaagcccggagatgagcatgcaggaggactgcatttcagacattgcaccaatgcagaccgatgaacaaactaacaaagaacaattcgtacctggcccaaatgaaaagccactgtacacagcagagccagtgaccctggaggaccttcagcttttagccgatctgttctacctcccttacgagcatggacccaagggggctcaaatgctccgggagttccagtggctgcgtgccaattcatcagtggtgtcggtaaactgcaaaggtaaagatagcgagaaaattgaggaatggcggagcagagcagccaagttcgaggagatgtgtgggctcgtgatgggtatgttcacccggctgagcaactgtgccaacaggacgattctctatgacatgtacagttatgtgtgggacatcaaaagcatcatgagtatggtaaagagctttgtccagtggttgggcaggtgcaccagaaacaatctcttctcttctaacattctttctttgtag

SEQ ID NO: 173137 - DNA, 2751 bp, Artificial Sequence
  derived and/or modified sequence
atggtgcagaaggagagccaggccaccctggaggagagagagagcgagctgagcagcaaccccgccgccagcgccggcgccagcctggagccccccgccgcccccgcccccggcgaggacaaccccgccggcgccggcggcgccgccgtggccggcgccgccggcggcgccagaagattcctgtgcggcgtggtggagggcttctacggcagaccctgggtgatggagcagagaaaggagctgttcagaagactgcagaagtgggagctgaacacctacctgtacgcccccaaggacgactacaagcacagaatgttctggagagagatgtacagcgtggaggaggccgagcagctgatgaccctgatcagcgccgccagagagtacgagatcgagttcatctacgccatcagccccggcctggacatcaccttcagcaaccccaaggaggtgagcaccctgaagagaaagctggaccaggtgagccagttcggctgcagaagcttcgccctgctgttcgacgacatcgaccacaacatgtgcgccgccgacaaggaggtgttcagcagcttcgcccacgcccaggtgagcatcaccaacgagatctaccagtacctgggcgagcccgagaccttcctgttctgccccaccgagtactgcggcaccttctgctaccccaacgtgagccagagcccctacctgagaaccgtgggcgagaagctgctgcccggcatcgaggtgctgtggaccggccccaaggtggtgagcaaggagatccccgtggagagcatcgaggaggtgagcaagatcatcaagagagcccccgtgatctgggacaacatccacgccaacgactacgaccagaagagactgttcctgggcccctacaagggcagaagcaccgagctgatccccagactgaagggcgtgctgaccaaccccaactgcgagttcgaggccaactacgtggccatccacaccctggccacctggtacaagagcaacatgaacggcgtgagaaaggacgtggtgatgaccgacagcgaggacagcaccgtgagcatccagatcaagctggagaacgagggcagcgacgaggacatcgagaccgacgtgctgtacagcccccagatggccctgaagctggccctgaccgagtggctgcaggagttcggcgtgccccaccagtacagcagcagacaggtggcccacagcggcgccaaggccagcgtggtggacggcacccccctggtggccgcccccagcctgaacgccaccaccgtggtgaccaccgtgtaccaggagcccatcatgagccagggcgccgccctgagcggcgagcccaccaccctgaccaaggaggaggagaagaagcagcccgacgaggagcccatggacatggtggtggagaagcaggaggagaccgaccacaagaacgacaaccagatcctgagcgagatcgtggaggccaagatggccgaggagctgaagcccatggacaccgacaaggagagcatcgccgagagcaagagccccgagatgagcatgcaggaggactgcatcagcgacatcgcccccatgcagaccgacgagcagaccaacaaggagcagttcgtgcccggccccaacgagaagcccctgtacaccgccgagcccgtgaccctggaggacctgcagctgctggccgacctgttctacctgccctacgagcacggccccaagggcgcccagatgctgagagagttccagtggctgagagccaacagcagcgtggtgagcgtgaactgcaagggcaaggacagcgagaagatcgaggagtggagaagcagagccgccaagttcgaggagatgtgcggcctggtgatgggcatgttcaccagactgagcaactgcgccaacagaaccatcctgtacgacatgtacagctacgtgtgggacatcaagagcatcatgagcatggtgaagagcttcgtgcagtggctgggctgcagaagccacagcagcgcccagttcctgatcggcgaccaggagccctgggccttcagaggcggcctggccggcgagttccagagactgctgcccatcgacggcgccaacgacctgttcttccagcccccccccctgacccccaccagcaaggtgtacaccatcagaccctacttccccaaggacgaggccagcgtgtacaagatctgcagagagatgtacgacgacggcgtgggcctgcccttccagagccagcccgacctgatcggcgacaagctggtgggcggcctgctgagcctgagcctggactactgcttcgtgctggaggacgaggacggcatctgcggctacgccctgggcaccgtggacgtgacccccttcatcaagaagtgcaagatcagctggatccccttcatgcaggagaagtacaccaagcccaacggcgacaaggagctgagcgaggccgagaagatcatgctgagcttccacgaggagcaggaggtgctgcccgagaccttcctggccaacttccccagcctgatcaagatggacatccacaagaaggtgaccgaccccagcgtggccaagagcatgatggcctgcctgctgagcagcctgaaggccaacggcagcagaggcgccttctgcgaggtgagacccgacgacaagagaatcctggagttctacagcaagctgggctgcttcgagatcgccaagatggagggcttccccaaggacgtggtgatcctgggcagaagcctgtag

SEQ ID NO: 173138 - DNA, 2034 bp, Artificial Sequence
  derived and/or modified sequence
atggtgcagaaggagagccaggccaccctggaggagagagagagcgagctgagcagcaaccccgccgccagcgccggcgccagcctggagccccccgccgcccccgcccccggcgaggacaaccccgccggcgccggcggcgccgccgtggccggcgccgccggcggcgccagaagattcctgtgcggcgtggtggagggcttctacggcagaccctgggtgatggagcagagaaaggagctgttcagaagactgcagaagtgggagctgaacacctacctgtacgcccccaaggacgactacaagcacagaatgttctggagagagatgtacagcgtggaggaggccgagcagctgatgaccctgatcagcgccgccagagagtacgagatcgagttcatctacgccatcagccccggcctggacatcaccttcagcaaccccaaggaggtgagcaccctgaagagaaagctggaccaggtgagccagttcggctgcagaagcttcgccctgctgttcgacgacatcgaccacaacatgtgcgccgccgacaaggaggtgttcagcagcttcgcccacgcccaggtgagcatcaccaacgagatctaccagtacctgggcgagcccgagaccttcctgttctgccccaccgagtactgcggcaccttctgctaccccaacgtgagccagagcccctacctgagaaccgtgggcgagaagctgctgcccggcatcgaggtgctgtggaccggccccaaggtggtgagcaaggagatccccgtggagagcatcgaggaggtgagcaagatcatcaagagagcccccgtgatctgggacaacatccacgccaacgactacgaccagaagagactgttcctgggcccctacaagggcagaagcaccgagctgatccccagactgaagggcgtgctgaccaaccccaactgcgagttcgaggccaactacgtggccatccacaccctggccacctggtacaagagcaacatgaacggcgtgagaaaggacgtggtgatgaccgacagcgaggacagcaccgtgagcatccagatcaagctggagaacgagggcagcgacgaggacatcgagaccgacgtgctgtacagcccccagatggccctgaagctggccctgaccgagtggctgcaggagttcggcgtgccccaccagtacagcagcagacaggtggcccacagcggcgccaaggccagcgtggtggacggcacccccctggtggccgcccccagcctgaacgccaccaccgtggtgaccaccgtgtaccaggagcccatcatgagccagggcgccgccctgagcggcgagcccaccaccctgaccaaggaggaggagaagaagcagcccgacgaggagcccatggacatggtggtggagaagcaggaggagaccgaccacaagaacgacaaccagatcctgagcgagatcgtggaggccaagatggccgaggagctgaagcccatggacaccgacaaggagagcatcgccgagagcaagagccccgagatgagcatgcaggaggactgcatcagcgacatcgcccccatgcagaccgacgagcagaccaacaaggagcagttcgtgcccggccccaacgagaagcccctgtacaccgccgagcccgtgaccctggaggacctgcagctgctggccgacctgttctacctgccctacgagcacggccccaagggcgcccagatgctgagagagttccagtggctgagagccaacagcagcgtggtgagcgtgaactgcaagggcaaggacagcgagaagatcgaggagtggagaagcagagccgccaagttcgaggagatgtgcggcctggtgatgggcatgttcaccagactgagcaactgcgccaacagaaccatcctgtacgacatgtacagctacgtgtgggacatcaagagcatcatgagcatggtgaagagcttcgtgcagtggctgggcagatgcaccagaaacaacctgttcagcagcaacatcctgagcctgtag

SEQ ID NO: 173139 - protein, 735 aa, Artificial Sequence
  derived and/or modified sequence
MGESPASVVLNASGGLFSLKMETLESELTCPICLELFEDPLLLPCAHSLCFSCAHRILVSSCSSGESIEPITAFQCPTCRYVISLNHRGLDGLKRNVTLQNIIDRFQKASVSGPNSPSESRRERTYRPTTAMSSERIACQFCEQDPPRDAVKTCITCEVSYCDRCLRATHPNKKPFTSHRLVEPVPDTHLRGITCLDHENEKVNMYCVSDDQLICALCKLVGRHRDHQVASLNDRFEKLKQTLEMNLTNLVKRNSELENQMAKLIQICQQVEVNTAMHEAKLMEECDELVEIIQQRKQMIAVKIKETKVMKLRKLAQQVANCRQCLERSTVLINQAEHILKENDQARFLQSAKNIAERVAMATASSQVLIPDINFNDAFENFALDFSREKKLLEGLDYLTAPNPPSIREELCTASHDTITVHWISDDEFSISSYELQYTIFTGQANFISKSWCSWGLWPEIRKCKEAVSCSRLAGAPRGLYNSVDSWMIVPNIKQNHYTVHGLQSGTRYIFIVKAINQAGSRNSEPTRLKTNSQPFKLDPKMTHKKLKISNDGLQMEKDESSLKKSHTPERFSGTGCYGAAGNIFIDSGCHYWEVVMGSSTWYAIGIAYKSAPKNEWIGKNASSWVFSRCNSNFVVRHNNKEMLVDVPPHLKRLGVLLDYDNNMLSFYDPANSLHLHTFDVTFILPVCPTFTIWNKSLMILSGLPAPDFIDYPERQECNCRPQESPYVSGMKTCH

SEQ ID NO: 173140 - protein, 219 aa, Artificial Sequence
  derived and/or modified sequence
METLESELTCPICLELFEDPLLLPCAHSLCFSCAHRILVSSCSSGESIEPITAFQCPTCRYVISLNHRGLDGLKRNVTLQNIIDRFQKASVSGPNSPSESRRERTYRPTTAMSSERIACQFCEQDPPRDAVKTCITCEVSYCDRCLRATHPNKKPFTSHRLVEPVPDTHLRGITCLDHENEKVNMYCVSDDQLICALCKLVGRHRDHQVASLNDRFEKL

SEQ ID NO: 173141 - DNA, 7345 bp, Artificial Sequence
  derived and/or modified sequence
gtttctccggtcactcctgccaggggagaagacatgtaaacgtgcctccagaggaagggctgggggagctgggagtggcgggggcggcggaaggtgagcctgggaaggtggccgagcaccccttcttcttgggcccttcccagtgctcccttggggtgtcagccccagccccgtttgcccccactccgcctcccttttggaagggattgccttttttttcctctgcggcggcggaaatgacagtgtggtgctgccgtggtgtcatggtgctgcccctggactgaggggcgaaaactcttaagtttagctcgggaggcccagctgcggtagcatcgcggccgccgtgctgtcccctgcggggcgcgcgggctggcggatcccggctgctgcgcggcgtcggcgacggtagcggcagcggcggcgaaggcgggcggcggcctacagtggtagcggcggcggcggcgaccggggcccgggagctcgcgccggagcccgagccaacccgctgcggaggcagacgagagcccagcgccctcgagcgagcggaggagatggctggcacctgggaacgctatgggtgaaagcccagcctccgtggttcttaatgcctcaggaggactattttcactaaagatggaaacactggagtctgaattgacctgtccaatctgcctagagttgtttgaagacccccttctgctcccttgtgctcacagcctctgcttcagctgtgcccatcgcattttggtatcaagctgcagctctggtgaatccattgaacccattactgctttccagtgtcctacctgcaggtatgttatctcgctgaaccaccggggcctggatggcctcaagaggaatgtgactctgcagaacattattgatcgcttccagaaggcttcagtcagtgggcccaattcccctagtgagagccgccgggaaaggacttacaggcccaccactgccatgtctagcgagcgaattgcttgccaattctgtgagcaggacccgccaagggatgcagtaaaaacatgcatcacctgtgaggtctcctactgtgaccgttgcctgcgggccacgcaccccaacaagaaacctttcaccagccaccgcctggtggaaccagtgccagacacacatcttcgagggatcacctgcctggaccatgagaatgagaaagtgaacatgtactgtgtatctgatgaccaattgatctgtgccttatgcaaactggtgggtcgtcaccgagaccatcaggtcgcatccctgaatgatcgatttgagaaactcaagcaaactctggagatgaacctcaccaacctggttaagcgcaacagcgaactagaaaatcaaatggccaaactaatacagatctgccagcaggttgaggtgaatactgctatgcatgaggcaaaacttatggaagaatgtgacgagttggtagagatcatccagcagaggaagcaaatgatcgctgtcaaaatcaaagagacaaaggttatgaaactgagaaagttggcacagcaggttgctaattgccgccagtgtcttgaacggtcaacagtcctcatcaaccaagctgagcatatcctgaaagaaaatgaccaggcacggtttctacagtctgcaaaaaatattgctgagagggtcgctatggcaactgcatcttctcaagttctgattccagacatcaattttaatgatgcctttgaaaactttgctttagatttttccagagaaaagaaactgctagaggggttagattatttaacagccccaaacccaccatctatccgagaagaactctgtactgcctcccatgacaccattacagtccactggatctcggatgatgagttcagcatcagctcctatgagcttcagtacaccatattcactggccaggctaacttcatcagtaagtcatggtgtagttggggcctgtggccagagataaggaaatgtaaggaagcagtaagctgctcaagattggccggggcgccacgaggcctgtataattcagtagacagctggatgattgttcccaacattaaacagaaccattacacagtgcatggactccagagcgggactcgctacatcttcatcgttaaagccataaaccaagccggcagccggaacagtgaacctacccgactaaaaacaaacagccaaccctttaaattggatcccaaaatgactcacaagaagttgaagatctccaatgatggattgcagatggagaaggatgaaagctctctaaagaagagccacaccccagagaggtttagtggcacagggtgctatggggcagcaggaaatatattcattgacagtggctgccactattgggaggtggtcatgggttcctcaacatggtatgcaattggcattgcctacaaatcagctccaaagaatgaatggattggcaagaatgcctcctcatgggtcttctctcgctgcaatagtaacttcgtggtgagacacaacaacaaggaaatgctggtggatgtgcccccacacctgaagcgtctgggtgtcctcctggattatgacaacaatatgctgtctttctatgacccagctaactctctccatcttcatacttttgatgtgaccttcattcttccagtttgtccaacatttacaatctggaacaaatccctaatgatcctgtctggcttgcctgccccagattttattgattaccctgagcggcaggaatgcaactgcaggcctcaagaatccccttatgtttctgggatgaaaacctgtcattaagtttcaggagagtatataattcactggctctctagttcagcagttcttcccctcctacacctaagttagcgttcaatatacgagacacaaaataaagtttgtttgaagcatccaaaataactagatattgcagatttaatttttgtgcattaaagcttgtatttgaattaatttattgagtttttcagaacaaattatctgagtagtctgcgttcaagccattggagaaaaatttagaaaatgcctctgttgtcattggagaattaaaaattcccaatgatttaagaatataaattatattggaagcaattagggtaattctagttaaataatgtggaaaggtgccctgaataaggagctagcaagccagagcggggggtggtcagcctttctagtactggccagtttggccatgtagaattttgaacagtgtcaaattatcacatattatattttacttttgatgaaaacctatcatcaagggtttgttaggaaaccatgaatgtgtatatgtaatatataaagtgaacatatatgtactttatatatattcacttgtgtatgtatgtttatgcatattcactttatatattacatatacacaaaaaacttttttttccaaacaccacctcgaactagaacaaaaaactttttaatttgctaatttgagtgagaaatatactggaagggaaaataagttacaccatccatttttgtcccctaaaggaaacatcaaaatcaatcaacatttatttcctccctctatccatcattgccttcctccctcctgtcacgcacacatacacatgcaaccatgacacagataatgggaagagctttattggattagcagagatttacagacaagattgcacaagagatgctgttgctggatagaaaattgatcaggtagaagtgatgctacctacttgaggatggccatctgaattgttaaaaattctgtcatagactattaaaaaaaaagttttactactcccaagtacacacagttatgagaattaggcttttaaaaagttgcacagtgaaggctctttaggaacctactttacttaatcagtaaaaattgagtattattgatgcaccaactattcccatataaatgtacttgctttttcagataaaacacttctgaagtgctcaagaatgtctgaaaacagtttgttttcttaaataggataaataatcattccttttgcaatcttgtttacagtattcattctcttagccaatccctccacgcaaatggagacaaacttcatcccagtcctaaccagtatagttgaagggaatggagccttgtagtctatgatttttttttttaaatttccatcgaagggattggggatgtcagagagccagagctttcccctttccaggagctaagttggcttcggaagtcttctgggatttgtgaaaatattactgttgtaaaattacaaagtggtagccataacaactccctcagattggagacttgaaatgtcaaaactcccctcttcctttcccctagtttggtggatgctcatttattaattcattcaataaactattagatgccaggtaccaaactactgccatgggagtgcacatattaacaaaatgctctacctgctgccaaatggcttactattctgtggaagaaacaaagtatataatcctccccaataacagttatgtattgtttgttcacttaatgtggaaggcaagactgatgcagacacacaaggaaggctcaaaaatataaatctagcagcaatgtcatcttttttgattttaaataccatatgtgcttactgctaatcaggaaatgaacaacctcagtaaaattcatcagtgctggtaaatagtttgctgtagtggaaagctcataacctttggattcaaatgatcctagtttctgtaccatttattagcgttgtgacctaggacaagtacctcacttctctgagcctgtttcctcctctgtaaaataatgtctacttcacaaggctgtttcaaaggttaaaaaagatagcatatgtaaactgtcttagctcagcgcttgacatttcctaagtgtgccataaatattaatctctttccttactcccagctccaatacagcgtaacagtgctttaaaatgtatgtccttcatttctccttcatttctcagtcacctttgtctcttccctagggcatatccccaaattcttaaacaaaaaaaaatgatttttttccccttcatcaaacttttcactggctcccttagcacccagtagaaggtcccaactccttacagagtctgggttttcatgtccctgtttgcttacacagcttaatcttttgccactttccccctcacattgattaaggtagccaagtttaactatttacacaactattcacacaagttattctctgggcctgcagcagaaacatgattaacaattttaatgcccagagtaaacaacagaaatttttcttaaattaaaggaatagtgtgaaaatgctgtaagtacagaaaatgcaacctccattccagtagaacaatttcctttgccttgtccttggctctccaaaactgttcatttattgtggtgtcttttagattttagtgccctgggacaaagatctaatttccccaccctacttttgactctatcctggactacctttcctcacctctatctctctcaaccagactaactctttattccttagacttgatgatgcatccctctttagagatccaaagacaccccaagcatccccctctctcagcaataatcacattgtatagcagtgtttttcaaagtgtggtcctcacaccgcctgtgttagaatcacctttagtgtttgttaaaagaattgattttgggttcccactcctgacctaaccagaatatctgagaacataggcaggaatttacatttttgacaagctcctcatgattctgatgcaccaaaaattttaatgaataatcatcttccctactagactgaacaccttgagaggaaggactgtgtcttttattgttgttatattgttaatacctggcacagtgcttggaacattagcttggctaatgtttattgaatgaatgtatgaatgaaaaaatgcattatgaaagtttcctcttgtactctcatgttcgtagtgatgtttgttacttcctgggcagaaaagcttggttactactccatttgagctgtattaattctattttgcagagatatcaaggctcctacataataaatgatcattgtcctcctcaaaaactctttggcagttatcttggggaaatgtctttggagcatatggcaccattgttttcagtaacatttcagtcttgtcaaactttgttgtttgaaggtggatttacatttcggttatagccaaaaatcactcaaagctaagcctacttaaaaaagtggggaattaaactgggtttggagtaagcaatgaagtttgactctgaagtcccaaattctgagtcaaacagtgaaaaatgacttctaagatacaacatggtgacaaagtacttagtgggggtgcgatgggccccagatatttacttcagttaacttggcttttatagaatcctggcaatgccatggaccttaagagaagtaattggctacctctagctaaacccagctggacaaagagaataggacttgtatttaacattttcaaagaaggtgactgcataagcttttgttgttgttgctctactcaacctgttctccacaactgtttctaccagaagattattttatgtctgcaatttatgcttgtttccactttttatattgtcttattgaagaaagcacaaaaataatcaaaaataaagtaaaacctgttttgagagtatgaaagaaattttaatgccacattgaggttctggctacttgtaagtaagagtaactgcatctggatgtgtttttattatacaattctatgtgtatctttagatgcagtgaaattcagattgcagcaaaatcacttatctgttcttttcggctaaaacactctaggtgaattttctaaacttccatggtttacatatttatatatgactaccaagatggagcaatccacggatggacttttgaataaactcaaatatttgatactgcttcctccaaggaatggagagtgtcaggcaggtaggtaagaaccactcctacacttatttctagctcctgaagccaactgcagccttggagccaatggctgtatttggctgtgtgttacaggttggccaaactgattgccatcaggtcagacaaaactgccttttatggtgtagtctgccagcttcagacatatgctgtattgttgttattggctagactatttattagactattgttggactattttttatcaaatgctttaccccacgcctgtttgtattgggagctctggaccaatagtgtctctcctagtgacagaaatatgagcatctgtggattacacagcctcatccctctctacaatattccagcccatccaaaatgctatattatgaattaaataaatatatatgtattcatgaa

SEQ ID NO: 173142 - DNA, 2208 bp, Artificial Sequence
  derived and/or modified sequence
atgggtgagtcccctgcctcggtcgttctgaacgccagcggcggcctctttagcctcaagatggagaccctggaaagcgagctcacttgtcctatatgcttggaactgtttgaagatcctctgttgctcccttgtgcccatagcttgtgcttttcctgtgcacaccgaatacttgtatcgagctgttcctcaggtgagagtattgagccaatcacagctttccagtgcccaacgtgtcggtatgtcattagtttaaaccaccggggtctggacggtttgaagagaaacgtgactttacagaatattatcgaccgcttccagaaagctagcgtgagtggccctaattctccttcagaatcaaggcgcgagcgtacctaccggcccacgaccgctatgtctagcgaacgcatagcttgccagttctgcgagcaggacccacctagggacgccgtaaaaacatgcattacatgcgaggtttcttactgtgatagatgcctgcgagctacacatccaaacaaaaagccattcacttctcacagactggtggaaccggttccagatacccatctgcgaggcatcacttgcctcgaccatgagaacgaaaaggtaaatatgtactgcgtgtcagacgaccagttgatttgtgctctctgtaaattagtgggccggcatagggaccaccaggtcgcaagcttgaacgatcgattcgagaaattgaaacagactctggaaatgaacctgactaatctcgtcaagcgaaactccgagctggagaatcagatggccaagctgatccaaatttgtcagcaggtggaagtaaatacggcaatgcacgaagctaaacttatggaggagtgtgacgagctggtcgagatcattcagcagcggaaacagatgatagctgtgaaaatcaaagaaaccaaagttatgaaactgagaaagcttgctcagcaggtcgcaaactgccggcaatgccttgaaaggagcacagtgctcatcaaccaggcggagcatatactaaaggagaacgatcaagcaagatttctgcagtctgctaagaatatcgctgagcgggttgcaatggctactgcctctagccaagtactcataccagacatcaacttcaatgatgcattcgaaaattttgcgctcgacttcagccgtgagaagaagctgcttgaaggcctcgattatctcaccgcacctaacccgccaagcatccgcgaggaactctgcacggccagccacgatacaataaccgtccactggatttccgatgacgagttctctatttcaagctacgagctgcagtacactatctttacaggccaggctaatttcatttcgaagtcatggtgctcttggggtctgtggccagagattaggaagtgcaaggaggccgtatcttgttctcgcctcgctggcgcccccaggggtctatacaactccgtcgactcctggatgattgtgccaaatatcaagcagaaccattacacagtacacggcctccagtctggcaccaggtatatctttatcgtgaaggctatcaaccaggctgggagtaggaactcagaaccaactcgacttaaaactaatagccaaccctttaaattggaccctaagatgacccacaagaagctgaagatctcaaatgacgggctccagatggagaaggacgagagtagtctgaagaagtcccatacgccggagagattcagcggtactggctgttacggtgcagccggaaatatcttcattgactcagggtgccattattgggaagtggtgatggggagctccacctggtatgctatagggatcgcctacaagagcgcacctaagaatgaatggatagggaagaatgcatcatcctgggtgttctcgcggtgtaactctaacttcgtggtgcgccataataacaaggagatgctcgtggacgtgccgcctcatctcaagcgtctgggcgtcctcctggactatgacaataatatgctatcgttctatgatccagcaaactcactacatctgcacacttttgacgtcacgttcatactccctgtctgccctaccttcaccatctggaataagtcactgatgatcctgtctgggctccccgcccccgattttatcgactatcccgagcgacaggagtgcaattgcagaccacaagagtccccctatgtgtcaggcatgaagacttgccactag

SEQ ID NO: 173143 - DNA, 2208 bp, Artificial Sequence
  derived and/or modified sequence
atgggagagagccctgcctctgtggtgctgaatgccagcggcggcctcttcagcctgaagatggagaccctggagagcgagctgacctgccccatctgcctggagctgtttgaggaccccctgctgctgccctgtgcccacagcctgtgcttcagctgtgcccaccgcatcctggtgagcagctgcagcagcggggagagcattgagcccatcacagccttccagtgccccacctgccgctacgtgatcagcctgaaccaccggggcctggatggcctgaagagaaatgtgaccctgcagaacatcatcgaccgcttccagaaggcctctgtgtctggccccaacagccccagcgagagcagaagagagaggacctaccggcccaccacagccatgagcagcgagagaattgcctgccagttctgtgagcaggaccccccaagagatgctgtgaagacctgcatcacctgtgaggtgtcctactgtgaccgctgcctgcgggccacccaccccaacaagaagcccttcaccagccaccggctggtggagcctgtgcctgacacccacctgcggggcatcacctgcctggaccatgaaaatgagaaggtgaacatgtactgtgtgtctgatgaccagctgatctgtgccctgtgcaagctggtgggccgccaccgggaccaccaggtggccagcctgaatgacagatttgagaagctgaagcagaccctggagatgaacctgaccaacctggtgaagagaaattctgagctggagaaccagatggccaagctgatccagatctgccagcaggtggaggtgaacacagccatgcatgaggccaagctgatggaggagtgtgatgagctggtggagatcatccagcagaggaagcagatgattgctgtgaagatcaaggagaccaaggtgatgaagctgaggaagctggcccagcaggtggccaactgccggcagtgcctggagaggagcacagtgctgatcaaccaggccgagcacatcctgaaggaaaatgaccaggcccgcttcctgcagagcgccaagaacattgctgagcgggtggccatggccacagccagcagccaggtgctgatcccagacatcaacttcaatgatgcctttgagaactttgccctggacttcagccgggagaagaagctgctggagggcctggactacctgacagcccccaacccccccagcatccgggaggagctgtgcacagccagccatgacaccatcaccgtgcactggatcagtgatgatgagttcagcatcagcagctatgagctgcagtacaccatcttcaccggccaggccaacttcatcagcaagtcctggtgctcctggggcctgtggccagagatcaggaagtgcaaggaggccgtgtcctgcagccggctggccggggccccccggggcctgtacaacagcgtggacagctggatgattgtgcccaacatcaagcagaaccactacacagtgcacggcctgcagagcggcacccgctacatcttcatcgtgaaggccatcaaccaggccggcagcaggaacagcgagcccacccggctgaagaccaacagccagcccttcaagctggaccccaagatgacccacaagaagctgaagatcagcaatgatggcctgcagatggagaaggatgagagcagcctgaagaagagccacaccccagagcgcttctctggaacaggctgctacggggctgctggcaacatcttcatcgacagcggctgccactactgggaggtggtgatgggcagcagcacctggtacgccatcggcatcgcctacaagagcgcccccaagaatgagtggattggcaagaatgccagctcctgggtgttcagccgctgcaacagcaactttgtggtgcgccacaacaacaaggagatgctggtggatgtgcccccccacctgaagaggctgggcgtgctgctggactatgacaacaacatgctgtccttctatgaccctgccaacagcctgcacctgcacacctttgatgtgaccttcatcctgcctgtgtgccccaccttcaccatctggaacaagagcctgatgatcctgagcggcctgcctgccccagacttcatcgactacccagagcggcaggagtgcaactgccggccccaggagagcccctacgtgtctggcatgaagacctgccactag

SEQ ID NO: 173144 - DNA, 2876 bp, Artificial Sequence
  derived and/or modified sequence
gagaagacatgtaaacgtgcctccagaggaagggctgggggagctgggagtggcgggggcggcggaaggtgagcctgggaaggtggccgagcaccccttcttcttgggcccttcccagtgctcccttggggtgtcagccccagccccgtttgcccccactccgcctcccttttggaagggattgccttttttttcctctgcggcggcggaaatgacagtgtggtgctgccgtggtgtcatggtgctgcccctggactgaggggcgaaaactcttaagtttagctcgggaggcccagctgcggtagcatcgcggccgccgtgctgtcccctgcggggcgcgcgggctggcggatcccggctgctgcgcggcgtcggcgacggtagcggcagcggcggcgaaggcgggcggcggcctacagtggtagcggcggcggcggcgaccggggcccgggagctcgcgccggagcccgagccaacccgctgcggaggcagacgagagcccagcgccctcgagcgagcggaggagatggctggcacctgggaacgctatgggtgaaagcccagcctccgtggttcttaatgcctcaggaggactattttcactaaagatggaaacactggagtctgaattgacctgtccaatctgcctagagttgtttgaagacccccttctgctcccttgtgctcacagcctctgcttcagctgtgcccatcgcattttggtatcaagctgcagctctggtgaatccattgaacccattactgctttccagtgtcctacctgcaggtatgttatctcgctgaaccaccggggcctggatggcctcaagaggaatgtgactctgcagaacattattgatcgcttccagaaggcttcagtcagtgggcccaattcccctagtgagagccgccgggaaaggacttacaggcccaccactgccatgtctagcgagcgaattgcttgccaattctgtgagcaggacccgccaagggatgcagtaaaaacatgcatcacctgtgaggtctcctactgtgaccgttgcctgcgggccacgcaccccaacaagaaacctttcaccagccaccgcctggtggaaccagtgccagacacacatcttcgagggatcacctgcctggaccatgagaatgagaaagtgaacatgtactgtgtatctgatgaccaattgatctgtgccttatgcaaactggtgggtcgtcaccgagaccatcaggtcgcatccctgaatgatcgatttgagaaactcaagcaaactctggagatgaacctcaccaacctggttaagcgcaacagcgaactagaaaatcaaatggccaaactaatacagatctgccagcaggttgaggtgaatactgctatgcatgaggcaaaacttatggaagaatgtgacgagttggtagagatcatccagcagaggaagcaaatgatcgctgtcaaaatcaaagagacaaaggttatgaaactgagaaagttggcacagcaggttgctaattgccgccagtgtcttgaacggtcaacagtcctcatcaaccaagctgagcatatcctgaaagaaaatgaccaggcacggtttctacagtctgcaaaaaatattgctgagagggtcgctatggcaactgcatcttctcaagttctgattccagacatcaattttaatgatgcctttgaaaactttgctttagatttttccagagaaaagaaactgctagaggggttagattatttaacagccccaaacccaccatctatccgagaagaactctgtactgcctcccatgacaccattacagtccactggatctcggatgatgagttcagcatcagctcctatgagcttcagtacaccatattcactggccaggctaacttcatcagtaagtcatggtgtagttggggcctgtggccagagataaggaaatgtaaggaagcagtaagctgctcaagattggccggggcgccacgaggcctgtataattcagtagacagctggatgattgttcccaacattaaacagaaccattacacagtgcatggactccagagcgggactcgctacatcttcatcgttaaagccataaaccaagccggcagccggaacagtgaacctacccgactaaaaacaaacagccaaccctttaaattggatcccaaaatgactcacaagaagttgaagatctccaatgatggattgcagatggagaaggatgaaagctctctaaagaagagccacaccccagagaggtttagtggcacagggtgctatggggcagcaggaaatatattcattgacagtggctgccactattgggaggtggtcatgggttcctcaacatggtatgcaattggcattgcctacaaatcagctccaaagaatgaatggattggcaagaatgcctcctcatgggtcttctctcgctgcaatagtaacttcgtggtgagacacaacaacaaggaaatgctggtggatgtgcccccacacctgaagcgtctgggtgtcctcctggattatgacaacaatatgctgtctttctatgacccagctaactctctccatcttcatacttttgatgtgaccttcattcttccagtttgtccaacatttacaatctggaacaaatccctaatgatcctgtctggcttgcctgccccagattttattgattaccctgagcggcaggaatgcaactgcaggcctcaagaatccccttatgtttctgggatgaaaacctgtcattaagtttcaggagagtatataattcactggctctctagttcagcagttcttcccctcctacacctaagttagcgttcaatatacgagacacaaaataaagtttgtttgaagcatccaaaataa

SEQ ID NO: 173145 - DNA, 2208 bp, Artificial Sequence
  derived and/or modified sequence
atgggcgagagccccgccagcgtggtgctgaacgccagcggcggcctgttctcgcttaagatggaaactctggaaagcgagctgacatgccctatctgtctggaattgtttgaggatccactgctcttaccctgtgctcacagcctatgtttttcgtgcgcgcacagaatcttagtctcttcatgttcttcaggggagtccatcgagcccattaccgcatttcagtgtcccacttgccggtacgtcatttcactcaaccataggggactggacggactcaagaggaacgtgactctgcagaatattatcgatcgcttccagaaggcctcagtcagcggccccaattctccatctgagtctcggcgggagcggacctaccggccaactaccgcgatgagtagcgagagaatagcctgccagttttgtgagcaggatcctccacgcgatgcagtcaagacatgtattacctgcgaggtaagctactgtgatcgttgtctgagagcaactcaccccaataaaaagcccttcacctcccacagattagttgagcctgtgccagacacacatctgcgcggcatcacatgtttggaccacgagaatgaaaaggtcaacatgtactgtgtttcagacgaccaactcatctgtgctttgtgcaaacttgtcggaaggcacagagaccaccaggtcgcctctctgaacgatagattcgaaaagctgaaacaaaccctggaaatgaacttaactaatttggtgaagagaaactcagagctcgagaatcagatggcaaaactcatccaaatttgtcagcaggtcgaggtcaacacggccatgcacgaagcaaagcttatggaagaatgcgacgaactggtggaaatcattcaacagcgaaagcagatgatcgcagttaaaattaaggagaccaaagtgatgaagcttcgcaaattggcccagcaggtggcgaattgtcgacaatgcctggagaggagcactgttctgatcaaccaggcagagcatatcctgaaggaaaacgatcaagctcgtttcctgcaatcagccaaaaatatcgccgagcgagtagccatggcaacagctagttcgcaggtgctgatacccgacatcaattttaacgacgctttcgaaaattttgccctagacttctccagagaaaaaaagcttctggaaggcctggattacctgacagcacctaaccccccctcaattagggaggagctgtgtacagccagccatgacaccattactgtgcattggatcagtgatgacgaattctcaatctcttcctacgagcttcagtacactatctttaccggccaagctaattttatctctaagtcttggtgttcgtggggcctgtggcctgaaatccggaagtgtaaagaggctgtctcatgtagcaggctggcaggcgctccgcgcggactgtataactcggttgactcatggatgattgtgccaaatattaagcaaaatcactatactgtgcacggcctccaaagcgggacacgctacattttcatcgttaaggccattaatcaggcgggttccagaaatagcgagcccacccggttgaagacaaatagccagccttttaagctggatccaaagatgacccacaagaaactgaagatcagcaatgatggtcttcaaatggagaaagacgagtccagtctgaaaaagagccataccccagagcgcttttcaggtactgggtgctacggtgccgccggtaacattttcatcgattccggctgtcactattgggaagtcgtgatgggcagttctacttggtacgctatcggcatcgcctataaaagcgctcctaagaatgagtggattggcaagaacgcctcttcctgggtgttttctcgctgcaatagcaactttgtcgttcgtcacaataacaaagagatgctggtggatgtgccacctcacctgaagcgcctcggcgttctgcttgattatgacaataacatgctatcgttctacgaccccgctaactccctccacctccacaccttcgacgttacattcatactccccgtgtgccctacttttacaatttggaacaagtccctaatgattctttctggtttaccagcccccgatttcattgattaccccgaacggcaagagtgtaattgccgcccgcaggagtcgccttatgttagcggcatgaagacctgccactag

SEQ ID NO: 173146 - DNA, 2208 bp, Artificial Sequence
  derived and/or modified sequence
atgggcgaaagtcccgctagtgtggtgttgaacgcgtctgggggacttttttcactgaagatggagactcttgagtctgagctcacctgccctatttgcctggaactgttcgaggatcctcttttactaccttgcgcacattccctttgctttagttgcgcccaccgtatactggtcagctcgtgcagctccggagaatccattgaacccatcactgcatttcagtgtcctacctgccggtacgttatctccctaaaccatcgaggcctggacggcctgaagcggaacgtgacactccagaatataatcgatcgatttcagaaagccagcgtttccggcccaaacagtcccagtgagagccggcgtgagcgcacataccgccctaccaccgcaatgagctctgaaagaatcgcctgccagttctgcgagcaagatccccctcgggacgcagttaagacatgtataacatgcgaagttagttactgtgaccggtgtctccgggctactcacccaaacaaaaagccatttacctcccaccggttggtagagccagtgcccgacactcacctgaggggcataacctgtctggatcacgagaacgaaaaagtgaatatgtattgtgtgagcgacgaccagctgatttgcgcactctgtaaactggtcggacgtcatagagatcaccaggtcgctagtctgaatgacagatttgagaagcttaaacaaaccctggaaatgaacctgacgaatctggttaagagaaactccgaactggagaatcagatggcaaaactcattcagatttgtcaacaggtggaagtgaacaccgcaatgcatgaggccaagcttatggaggaatgcgacgaactggtggaaataattcagcagcgtaagcagatgattgccgtgaaaataaaagaaaccaaggtcatgaaactaaggaagctggcccaacaagttgctaattgccgccagtgtctcgagcggtcaaccgtgctgatcaaccaggctgagcacatcttgaaagagaacgatcaggctcggttcctgcagagtgccaaaaacattgcagagagggttgccatggccacagcctccagccaggtacttatcccagatattaactttaatgacgcttttgagaactttgccttggacttctcccgagaaaagaagctgctcgagggccttgattatctgaccgcccctaacccgccaagcattcgagaggaactgtgcactgcttctcacgacactattaccgttcactggatcagcgatgacgagttttcaatcagttcctatgagctgcagtacacaattttcacgggccaggccaactttattagcaagtcttggtgtagctggggcctgtggcctgaaatacggaagtgtaaagaagccgtgtcttgctccagacttgctggagctcccaggggcctctacaactcggttgactcctggatgatcgtccctaatatcaagcagaaccactacactgtgcacgggcttcagtctggcacacgctacattttcatcgttaaggccattaatcaagccggttcaagaaactcagagcctacccgtctgaagactaactcccagccctttaaattggatcccaagatgacacataaaaaactcaagattagcaatgacgggttgcagatggaaaaggacgagtccagtctcaaaaaaagccatactccagaaaggttttctggaaccgggtgctacggcgctgcgggaaatatcttcatagactctggctgtcactactgggaggtggtcatgggaagctccacttggtacgccattgggattgcatacaaaagcgctcccaaaaacgagtggattggcaagaacgcctccagttgggtattcagcagatgtaactcaaactttgttgtcaggcacaacaataaggagatgctggtggatgttcctccccatctcaagagactgggggtcttgttggactacgataataacatgttgtcgttctacgacccagctaattcactccacctccacaccttcgatgtgactttcatcctaccagtgtgtcctaccttcactatttggaataagtctttaatgattctcagcggtttacccgctcccgattttatcgactatccggagagacaggaatgtaactgtagaccacaggaatccccttatgtcagtggtatgaagacctgtcattag

SEQ ID NO: 173147 - DNA, 2208 bp, Artificial Sequence
  derived and/or modified sequence
atgggcgagagccccgccagcgtggtgctgaacgccagcggcggcctgttcagcctgaagatggagaccctggagagcgagctgacctgccccatctgcctggagctgttcgaggaccccctgctgctgccctgcgcccacagcctgtgcttcagctgcgcccacagaatcctggtgagcagctgcagcagcggcgagagcatcgagcccatcaccgccttccagtgccccacctgcagatacgtgatcagcctgaaccacagaggcctggacggcctgaagagaaacgtgaccctgcagaacatcatcgacagattccagaaggccagcgtgagcggccccaacagccccagcgagagcagaagagagagaacctacagacccaccaccgccatgagcagcgagagaatcgcctgccagttctgcgagcaggacccccccagagacgccgtgaagacctgcatcacctgcgaggtgagctactgcgacagatgcctgagagccacccaccccaacaagaagcccttcaccagccacagactggtggagcccgtgcccgacacccacctgagaggcatcacctgcctggaccacgagaacgagaaggtgaacatgtactgcgtgagcgacgaccagctgatctgcgccctgtgcaagctggtgggcagacacagagaccaccaggtggccagcctgaacgacagattcgagaagctgaagcagaccctggagatgaacctgaccaacctggtgaagagaaacagcgagctggagaaccagatggccaagctgatccagatctgccagcaggtggaggtgaacaccgccatgcacgaggccaagctgatggaggagtgcgacgagctggtggagatcatccagcagagaaagcagatgatcgccgtgaagatcaaggagaccaaggtgatgaagctgagaaagctggcccagcaggtggccaactgcagacagtgcctggagagaagcaccgtgctgatcaaccaggccgagcacatcctgaaggagaacgaccaggccagattcctgcagagcgccaagaacatcgccgagagagtggccatggccaccgccagcagccaggtgctgatccccgacatcaacttcaacgacgccttcgagaacttcgccctggacttcagcagagagaagaagctgctggagggcctggactacctgaccgcccccaacccccccagcatcagagaggagctgtgcaccgccagccacgacaccatcaccgtgcactggatcagcgacgacgagttcagcatcagcagctacgagctgcagtacaccatcttcaccggccaggccaacttcatcagcaagagctggtgcagctggggcctgtggcccgagatcagaaagtgcaaggaggccgtgagctgcagcagactggccggcgcccccagaggcctgtacaacagcgtggacagctggatgatcgtgcccaacatcaagcagaaccactacaccgtgcacggcctgcagagcggcaccagatacatcttcatcgtgaaggccatcaaccaggccggcagcagaaacagcgagcccaccagactgaagaccaacagccagcccttcaagctggaccccaagatgacccacaagaagctgaagatcagcaacgacggcctgcagatggagaaggacgagagcagcctgaagaagagccacacccccgagagattcagcggcaccggctgctacggcgccgccggcaacatcttcatcgacagcggctgccactactgggaggtggtgatgggcagcagcacctggtacgccatcggcatcgcctacaagagcgcccccaagaacgagtggatcggcaagaacgccagcagctgggtgttcagcagatgcaacagcaacttcgtggtgagacacaacaacaaggagatgctggtggacgtgcccccccacctgaagagactgggcgtgctgctggactacgacaacaacatgctgagcttctacgaccccgccaacagcctgcacctgcacaccttcgacgtgaccttcatcctgcccgtgtgccccaccttcaccatctggaacaagagcctgatgatcctgagcggcctgcccgcccccgacttcatcgactaccccgagagacaggagtgcaactgcagaccccaggagagcccctacgtgagcggcatgaagacctgccactag

SEQ ID NO: 173148 - protein, 242 aa, Artificial Sequence
  derived and/or modified sequence
MLLLAPQMLSLLLLALPVLASPAYVAPAPGQALQQTGIVGGQEAPRSKWPWQVSLRVRGPYWMHFCGGSLIHPQWVLTAAHCVEPDIKDLAALRVQLREQHLYYQDQLLPVSRIIVHPQFYIIQTGADIALLELEEPVNISSHIHTVTLPPASETFPPGMPCWVTGWGDVDNNVHLPPPYPLKEVEVPVVENHLCNAEYHTGLHTGHSFQIVRDDMLCAGSENHDSCQGDSGGPLVCKVNGT

SEQ ID NO: 173149 - protein, 235 aa, Artificial Sequence
  derived and/or modified sequence
MLSLLLLALPVLASPAYVAPAPGQALQQTGIVGGQEAPRSKWPWQVSLRVRGPYWMHFCGGSLIHPQWVLTAAHCVEPDIKDLAALRVQLREQHLYYQDQLLPVSRIIVHPQFYIIQTGADIALLELEEPVNISSHIHTVTLPPASETFPPGMPCWVTGWGDVDNNVHLPPPYPLKEVEVPVVENHLCNAEYHTGLHTGHSFQIVRDDMLCAGSENHDSCQGDSGGPLVCKVNGT

SEQ ID NO: 173150 - DNA, 708 bp, Artificial Sequence
  derived and/or modified sequence
atgctgagcctgctgctgctggccctgcccgtgctggccagccccgcctacgtggcccccgcccccggccaggccctgcagcagaccggcatcgtgggcggccaggaggcccccagaagcaagtggccctggcaggtgagcctgagagtgagaggcccctactggatgcacttctgcggcggcagcctgatccacccccagtgggtgctgaccgccgcccactgcgtggagcccgacatcaaggacctggccgccctgagagtgcagctgagagagcagcacctgtactaccaggaccagctgctgcccgtgagcagaatcatcgtgcacccccagttctacatcatccagaccggcgccgacatcgccctgctggagctggaggagcccgtgaacatcagcagccacatccacaccgtgaccctgccccccgccagcgagaccttcccccccggcatgccctgctgggtgaccggctggggcgacgtggacaacaacgtgcacctgccccccccctaccccctgaaggaggtggaggtgcccgtggtggagaaccacctgtgcaacgccgagtaccacaccggcctgcacaccggccacagcttccagatcgtgagagacgacatgctgtgcgccggcagcgagaaccacgacagctgccagggcgacagcggcggccccctggtgtgcaaggtgaacggcacctag

SEQ ID NO: 173151 - DNA, 729 bp, Artificial Sequence
  derived and/or modified sequence
atgttgttactggccccccaaatgcttagtttgttgctgcttgcccttccagtgctcgcttcgccagcttacgtcgcccctgctccaggacaggccttgcagcagacaggcatcgtgggtggacaggaggccccgcgatcgaaatggccctggcaagtgtctcttagggtacgcggaccgtattggatgcatttctgtggtggatctttgatccatcctcagtgggtgctgacagccgcccactgcgtggagcctgatatcaaggacctcgcggccctgagggtgcagctgagggagcagcatctgtactatcaggatcagttactgccagtgagcagaataatcgtgcacccccagttttatattatccaaacaggtgcagacattgccttgctcgagctggaagagcccgtcaatatatccagccacatccatacagtgacacttccgccagcatctgaaacgttccccccaggcatgccttgctgggtaaccggctggggcgatgtcgataacaacgtccacctacctccaccatatccgttgaaggaggtagaggtcccagtcgtagagaatcacctgtgcaacgccgagtaccatacaggcctgcacacaggccactcgtttcagatagtgagagatgacatgctgtgtgcagggtccgaaaaccacgacagttgccaaggtgattccggcggacccctcgtgtgtaaagtcaatggaacttag

SEQ ID NO: 173152 - DNA, 708 bp, Artificial Sequence
  derived and/or modified sequence
atgctgagcctactcctgctggcattgccagtgttagcctcccccgcctacgtggctcccgccccagggcaagcactgcaacagaccggcatcgtgggggggcaggaggctccaaggtccaagtggccatggcaggtaagtctgagagtacgagggccctattggatgcacttttgtgggggcagcttgatccatccacagtgggtactgacggccgcccattgcgtggaacctgacatcaaggacctagctgcacttcgggtgcagctacgagaacagcacctctactatcaggatcagttattgccagtgtctcgcattatagtacacccacagttttacatcattcagaccggagccgacattgctttgcttgagcttgaggagccagttaacatctcctcccacatccacaccgtcactctcccgcccgccagtgagacctttcccccagggatgccctgctgggtgactgggtggggcgatgttgataataatgtgcacctcccacccccttatcctcttaaggaggttgaggtgcctgtcgtggagaatcatctgtgcaatgccgagtatcatactggattgcacacaggtcacagtttccagattgtgagggacgacatgttgtgcgccggctctgaaaaccacgactcttgccagggcgactctggcggaccactcgtctgcaaagtgaacggaacatag

SEQ ID NO: 173153 - DNA, 729 bp, Artificial Sequence
  derived and/or modified sequence
atgctgctgctggccccccagatgctgagcctgctgctgctggccctgcctgtgctggccagccctgcctacgtggccccagcccctggccaggccctgcagcagacaggcatcgtgggcggccaggaggcccccaggagcaagtggccctggcaggtgtccctgcgggtgcggggcccctactggatgcacttctgtggcggcagcctcatccacccccagtgggtgctgacagctgcccactgtgtggagccagacatcaaggacctggccgccctgcgggtgcagctgcgggagcagcacctgtactaccaggaccagctgctgcctgtgagccgcatcatcgtgcacccccagttctacatcatccagacaggagctgacatcgccctgctggagctggaggagcctgtgaacatcagcagccacatccacacagtgaccctgcccccagccagcgagaccttccccccaggcatgccctgctgggtgacaggctggggagatgtggacaacaacgtgcacctgcccccaccctaccccctgaaggaggtggaggtgcctgtggtggagaaccacctgtgcaatgctgagtaccacacaggcctgcacacaggccacagcttccagatcgtgagagatgacatgctgtgtgccggcagcgagaaccacgacagctgccagggcgacagcggcggccccctggtgtgcaaggtgaatggcacctag

SEQ ID NO: 173154 - DNA, 708 bp, Artificial Sequence
  derived and/or modified sequence
atgctgagcctgctgctgctggccctgcctgtgctggccagccctgcctacgtggccccagcccctggccaggccctgcagcagacaggaattgtgggcggccaggaggcccccaggagcaagtggccctggcaggtgtccctgcgggtgcggggcccctactggatgcacttctgtggcggcagcctcatccacccccagtgggtgctgacagctgcccactgtgtggagccagacatcaaggacctggccgccctgcgggtgcagctgcgggagcagcacctgtactaccaggaccagctgctgcctgtgagccgcatcatcgtgcacccccagttctacatcatccagacaggagctgacatcgccctgctggagctggaggagcctgtgaacatcagcagccacatccacacagtgaccctgcccccagccagcgagaccttccccccaggcatgccctgctgggtgacaggctggggagatgtggacaacaacgtgcacctgcccccaccctaccccctgaaggaggtggaggtgcctgtggtggagaaccacctgtgcaatgctgagtaccacacaggcctgcacacaggccacagcttccagatcgtgagagatgacatgctgtgtgccggctctgaaaatcatgacagctgccagggcgacagcggcggccccctggtgtgcaaggtgaatggcacctag

SEQ ID NO: 173155 - DNA, 729 bp, Artificial Sequence
  derived and/or modified sequence
atgctgctgctggccccccagatgctgagcctgctgctgctggccctgcctgtgctggcctcaccagcatatgtggcacccgcgcctggccaggctctacaacagactgggatcgtcggcggacaggaggcacccagatccaaatggccgtggcaagtctctctcagggtaagaggtccctactggatgcatttctgcggaggaagtcttatacacccacaatgggtgctaaccgctgcacactgtgttgagcccgatattaaggatctggcggccctgagggtgcagctccgggagcagcatctgtactatcaagaccagcttctgcctgtgtccaggatcatcgtgcaccctcagttctacattatacaaaccggggctgatatcgctctcctggaacttgaagagcccgtgaacatcagttcacatattcacaccgtgactctgccccctgcgtctgagacattccccccaggtatgccgtgttgggttactggatggggcgatgtagataataacgtgcacctacctccgccctaccctctgaaagaagtggaggtgcctgtcgtcgaaaaccacctgtgtaatgcggagtaccacacgggcttacacactggtcatagcttccagatagtacgagatgatatgttgtgcgccgggtcagagaatcatgattcgtgtcagggagacagtggcggccccctagtctgtaaagtcaacggaacgtag

SEQ ID NO: 173156 - DNA, 708 bp, Artificial Sequence
  derived and/or modified sequence
atgctgagcctgctgctgctggccctgcccgtgctggccagccccgcctacgtggcacctgccccaggccaggcgctgcagcaaaccggtatagtgggcgggcaggaggcccccagatccaaatggccttggcaggtgtccctcagagtgcgcggtccctactggatgcatttttgtggaggcagcctgattcacccacagtgggtgctgacagcagctcattgcgtcgagccggacattaaggaccttgctgcactgcgcgtacagcttcgggaacagcatctgtactaccaagatcagttattgcccgtctccaggatcatagtccatccccagttctacataatccagacaggtgccgacattgccctcttagaactggaagagcccgtgaatatttcctctcatatccatacggtaacccttcctccagcctctgaaacgttcccccccggaatgccttgttgggtcaccggatggggggatgtggataataacgtgcatttacctccgccataccctctgaaggaggttgaggttccggtcgtggaaaaccacctctgtaatgctgaataccacactggcctccacacaggtcattctttccagatcgtacgcgacgacatgctgtgcgcaggaagcgagaaccacgactcctgccagggagactctgggggccctttggtgtgcaaggtgaatggaacctag

SEQ ID NO: 173157 - DNA, 729 bp, Artificial Sequence
  derived and/or modified sequence
atgctgctgttagctcctcagatgctgagtctgcttctcctggcattaccggtgctcgcttctcccgcttatgttgcgcctgccccaggccaggcgctgcagcagaccggtatcgttggtgggcaggaggcacctcgaagcaaatggccttggcaggtctccctccgcgtgagaggaccttattggatgcatttctgcggtgggagtttaatacacccacagtgggttctcactgcggctcactgtgtagagccagacattaaggatcttgccgcactgcgtgtgcagctgcgggaacagcatctctactaccaggaccagctgctgcctgtttcacggattatcgtacatccacagttctatatcatccagaccggggctgacatcgcactcctggagcttgaagaacccgtgaatattagttcgcacatccatactgtaacattgcccccagcctctgagaccttcccaccgggaatgccatgctgggtgaccggatggggggacgtcgataataacgttcatttacctccaccatatccgctcaaggaggttgaagtgcccgtcgtggagaatcatctgtgtaatgcagagtaccatactggtctgcatacaggacacagctttcagattgttcgtgatgacatgctgtgcgccggttccgagaaccatgatagctgccaaggggattcaggcggaccactggtctgtaaggtgaatggcacctag

SEQ ID NO: 173158 - DNA, 708 bp, Artificial Sequence
  derived and/or modified sequence
atgctgagcctcctgttattagctttacccgtcttggcgagtcccgcatatgtggcgcctgctcctggtcaggctcttcagcagactgggatcgtgggcggacaagaggctccgcgttctaaatggccttggcaagtgtcattacgcgtgcgtgggccttactggatgcacttttgcggcggaagcctaattcatcctcagtgggtactgactgccgcacactgcgtggaaccagacatcaaagatttagctgcgttgagagtgcagttgagggaacagcacctgtactaccaggaccaattgctgccagtctctcgaatcatcgtgcaccctcagttctacattattcagaccggggcagacatcgcactgcttgagctggaagaaccggttaacatatcttcccatatccacaccgtgacactgcctcccgcatctgagacatttccccctgggatgccctgttgggtaaccggttggggggacgtggacaacaatgttcatctgccgccaccctatcccctgaaagaggttgaagtccccgtggtggaaaaccatctgtgcaatgccgaataccacacaggtctacataccggacattcctttcagatagtgcgagatgatatgctatgtgccggttccgagaatcatgactcctgtcaaggggatagtggtggaccacttgtgtgtaaggtgaatggtacttag

SEQ ID NO: 173159 - DNA, 963 bp, Artificial Sequence
  derived and/or modified sequence
ggagcagagtggcccagcctcagactcagagcaccaagacccaggcccgcaggcctggacccaccccggtccccccgtcccagctccattcttcaccccacaatctgtagcccccagccctgccctgtgaggcccggccaggcccacgatgctcctccttgctccccagatgctgagcctgctgctgctggcgctgcccgtcctggcgagcccggcctacgtggcccctgccccaggccaggccctgcagcaaacgggcattgttggggggcaggaggcccccaggagcaagtggccctggcaggtgagcctgagagtccgcggcccatactggatgcacttctgcgggggctccctcatccacccccagtgggtgctaaccgcggcgcactgcgtggaaccggacatcaaggatctggccgccctcagggtgcaactgcgggagcagcacctctactaccaggaccagctgctgccggtcagcaggatcatcgtgcacccacagttctacatcatccagaccggggcggacatcgccctgctggagctggaggagcccgtgaacatctccagccacatccacacggtcacgctgccccctgcctcggagaccttccccccggggatgccgtgctgggtcactggctggggcgacgtggacaataatgtgcacctgccgccgccatacccgctgaaggaggtggaagtccccgtagtggaaaaccacctttgcaacgcggaatatcacaccggcctccatacgggccacagctttcaaatcgtccgcgatgacatgctgtgtgcggggagcgaaaatcacgactcctgccagggtgactctggagggcccctggtctgcaaggtgaatggcacctaactgcaggcgggcgtggtcagctgggaggagagctgtgcccagcccaaccggcctggcatctacacccgtgtcacctactacttgga

SEQ ID NO: 173160 - DNA, 827 bp, Artificial Sequence
  derived and/or modified sequence
cccgctgggtagaaggaacagggagtggccaggatgctgagcctgctgctgctggcgctgcccgtcctggcgagcccggcctacgtggcccctgccccaggccaggccctgcagcaaacgggcattgttggggggcaggaggcccccaggagcaagtggccctggcaggtgagcctgagagtccgcggcccatactggatgcacttctgcgggggctccctcatccacccccagtgggtgctaaccgcggcgcactgcgtggaaccggacatcaaggatctggccgccctcagggtgcaactgcgggagcagcacctctactaccaggaccagctgctgccggtcagcaggatcatcgtgcacccacagttctacatcatccagaccggggcggacatcgccctgctggagctggaggagcccgtgaacatctccagccacatccacacggtcacgctgccccctgcctcggagaccttccccccggggatgccgtgctgggtcactggctggggcgacgtggacaataatgtgcacctgccgccgccatacccgctgaaggaggtggaagtccccgtagtggaaaaccacctttgcaacgcggaatatcacaccggcctccatacgggccacagctttcaaatcgtccgcgatgacatgctgtgtgcggggagcgaaaatcacgactcctgccagggtgactctggagggcccctggtctgcaaggtgaatggcacctaactgcaggcgggcgtggtcagctgggaggagagctgtgcccagcccaaccggcctggcatctacacccgtgtcacctactacttgga

SEQ ID NO: 173161 - DNA, 729 bp, Artificial Sequence
  derived and/or modified sequence
atgctgctgctggccccccagatgctgagcctgctgctgctggccctgcccgtgctggccagccccgcctacgtggcccccgcccccggccaggccctgcagcagaccggcatcgtgggcggccaggaggcccccagaagcaagtggccctggcaggtgagcctgagagtgagaggcccctactggatgcacttctgcggcggcagcctgatccacccccagtgggtgctgaccgccgcccactgcgtggagcccgacatcaaggacctggccgccctgagagtgcagctgagagagcagcacctgtactaccaggaccagctgctgcccgtgagcagaatcatcgtgcacccccagttctacatcatccagaccggcgccgacatcgccctgctggagctggaggagcccgtgaacatcagcagccacatccacaccgtgaccctgccccccgccagcgagaccttcccccccggcatgccctgctgggtgaccggctggggcgacgtggacaacaacgtgcacctgccccccccctaccccctgaaggaggtggaggtgcccgtggtggagaaccacctgtgcaacgccgagtaccacaccggcctgcacaccggccacagcttccagatcgtgagagacgacatgctgtgcgccggcagcgagaaccacgacagctgccagggcgacagcggcggccccctggtgtgcaaggtgaacggcacctag

SEQ ID NO: 173162 - protein, 894 aa, Artificial Sequence
  derived and/or modified sequence
MRPMRIFVNDDRHVMAKHSSVYPTQEELEAVQNMVSHTERALKAVSDWIDEQEKGSSEQAESDNMDVPPEDDSKEGAGEQKTEHMTRTLRGVMRVGLVAKGLLLKGDLDLELVLLCKEKPTTALLDKVADNLAIQLAAVTEDKYEILQSVDDAAIVIKNTKEPPLSLTIHLTSPVVREEMEKVLAGETLSVNDPPDVLDRQKCLAALASLRHAKWFQARANGLKSCVIVIRVLRDLCTRVPTWGPLRGWPLELLCEKSIGTANRPMGAGEALRRVLECLASGIVMPDGSGIYDPCEKEATDAIGHLDRQQREDITQSAQHALRLAAFGQLHKVLGMDPLPSKMPKKPKNENPVDYTVQIPPSTTYAITPMKRPMEEDGEEKSPSKKKKKIQKKEEKAEPPQAMNALMRLNQLKPGLQYKLVSQTGPVHAPIFTMSVEVDGNSFEASGPSKKTAKLHVAVKVLQDMGLPTGAEGRDSSKGEDSAEETEAKPAVVAPAPVVEAVSTPSAAFPSDATAEQGPILTKHGKNPVMELNEKRRGLKYELISETGGSHDKRFVMEVEVDGQKFQGAGSNKKVAKAYAALAALEKLFPDTPLALDANKKKRAPVPVRGGPKFAAKPHNPGFGMGGPMHNEVPPPPNLRGRGRGGSIRGRGRGRGFGGANHGGYMNAGAGYGSYGYGGNSATAGYSQFYSNGGHSGNASGGGGGGGGGSSGYGSYYQGDNYNSPVPPKHAGKKQPHGGQQKPSYGSGYQSHQGQQQSYNQSPYSNYGPPQGKQKGYNHGQGSYSYSNSYNSPGGGGGSDYNYESKFNYSGSGGRSGGNSYGSGGASYNPGSHGGYGGGSGGGSSYQGKQGGYSQSNYNSPGSGQNYSGPPSSYQSSQGGYGRNADHSMNYQYR

SEQ ID NO: 173163 - protein, 764 aa, Artificial Sequence
  derived and/or modified sequence
MRPMRIFVNDDRHVMAKHSSVYPTQEELEAVQNMVSHTERALKAVSDWIDEQEKGSSEQAESDNMDVPPEDDSKEGAGEQKTEHMTRTLRGVMRVGLVAKGLLLKGDLDLELVLLCKEKPTTALLDKVADNLAIQLAAVTEDKYEILQSVDDAAIVIKNTKEPPLSLTIHLTSPVVREEMEKVLAGETLSVNDPPDVLDRQKCLAALASLRHAKWFQARANGLKSCVIVIRVLRDLCTRVPTWGPLRGWPLELLCEKSIGTANRPMGAGEALRRVLECLASGIVMPDGSGIYDPCEKEATDAIGHLDRQQREDITQSAQHALRLAAFGQLHKVLGMDPLPSKMPKKPKNENPVDYTVQIPPSTTYAITPMKRPMEEDGEEKSPSKKKKKIQKKEEKAEPPQAMNALMRLNQLKPGLQYKLVSQTGPVHAPIFTMSVEVDGNSFEASGPSKKTAKLHVAVKVLQDMGLPTGAEGRDSSKGEDSAEETEAKPAVVAPAPVVEAVSTPSAAFPSDATAEQGPILTKHGKNPVMELNEKRRGLKYELISETGGSHDKRFVMEVEVDGQKFQGAGSNKKVAKAYAALAALEKLFPDTPLALDANKKKRAPVPVRGGPKFAAKPHNPGFGMGGPMHNEVPPPPNLRGRGRGGSIRGRGRGRGFGGANHGGYMNAGAGYGSYGYGGNSATAGYSKSSRPPPPSRPRCCVVRCSGSPCGPSCDPYLAVFGTPCLQWFVSCHYNFVWVEFLSFCSSVSLCLFTLRVSGNSVCL

SEQ ID NO: 173164 - protein, 1078 aa, Artificial Sequence
  derived and/or modified sequence
MAKMEVKTSLLDNMIGVGDMVLLEPLNEETFINNLKKRFDHSEIYTYIGSVVISVNPYRSLPIYSPEKVEEYRNRNFYELSPHIFALSDEAYRSLRDQDKDQCILITGESGAGKTEASKLVMSYVAAVCGKGAEVNQVKEQLLQSNPVLEAFGNAKTVRNDNSSRFGKYMDIEFDFKGDPLGGVISNYLLEKSRVVKQPRGERNFHVFYQLLSGASEELLNKLKLERDFSRYNYLSLDSAKVNGVDDAANFRTVRNAMQIVGFMDHEAESVLAVVAAVLKLGNIEFKPESRVNGLDESKIKDKNELKEICELTGIDQSVLERAFSFRTVEAKQEKVSTTLNVAQAYYARDALAKNLYSRLFSWLVNRINESIKAQTKVRKKVMGVLDIYGFEIFEDNSFEQFIINYCNEKLQQIFIELTLKEEQEEYIREDIEWTHIDYFNNAIICDLIENNTNGILAMLDEECLRPGTVTDETFLEKLNQVCATHQHFESRMSKCSRFLNDTSLPHSCFRIQHYAGKVLYQVEGFVDKNNDLLYRDLSQAMWKASHALIKSLFPEGNPAKINLKRPPTAGSQFKASVATLMKNLQTKNPNYIRCIKPNDKKAAHIFNEALVCHQIRYLGLLENVRVRRAGYAFRQAYEPCLERYKMLCKQTWPHWKGPARSGVEVLFNELEIPVEEYSFGRSKIFIRNPRTLFKLEDLRKQRLEDLATLIQKIYRGWKCRTHFLLMKKSQIVIAAWYRRYAQQKRYQQTKSSALVIQSYIRGWKARKILRELKHQKRCKEAVTTIAAYWHGTQVRREYRKFFRANAGKKIYEFTLQRIVQKYFLEMKNKMPSLSPIDKNWPSRPYLFLDSTHKELKRIFHLWRCKKYRDQFTDQQKLIYEEKLEASELFKDKKALYPSSVGQPFQGAYLEINKNPKYKKLKDAIEEKIIIAEVVNKINRANGKSTSRIFLLTNNNLLLADQKSGQIKSEVPLVDVTKVSMSSQNDGFFAVHLKEGSEAASKGDFLFSSDHLIEMATKLYRTTLSQTKQKLNIEISDEFLVQFRQDKVCVKFIQGNQKNGSVPTCKRKNNRLLEVAVP

SEQ ID NO: 173165 - protein, 83 aa, Artificial Sequence
  derived and/or modified sequence
MAKMEVKTSLLDNMIGVGDMVLLEPLNEETFINNLKKRFDHSEIYTYIGSVVISVNPYRSLPIYSPEKVEEYRNRNFYELSPH

SEQ ID NO: 173166 - DNA, 3237 bp, Artificial Sequence
  derived and/or modified sequence
atggccaagatggaagtgaaaacatcgctgctggacaacatgataggcgttggggacatggtgctcttggagccactgaatgaagagacattcataaataatctgaagaagcggtttgatcattctgagatctacacttacatcggaagtgtagtcatctccgtaaatccctacagaagcctgccaatttacagtcccgagaaggtcgaggaatatcgtaatcgtaatttttacgagctgagcccgcatatcttcgcgctttctgacgaagcataccgaagcttgcgtgatcaagataaggatcagtgtatcttgatcacaggcgagagcggcgcaggcaagaccgaagccagtaagctagtgatgtcatacgtagctgccgtgtgcggtaagggagcagaagtgaaccaggtcaaagaacagcttctccagagtaaccccgttctcgaggctttcggaaatgcaaagactgtacgtaatgacaattcaagccgtttcgggaagtatatggacatagagttcgacttcaagggggatccattgggtggtgtcatcagtaactatctgctcgaaaagagtagagtggttaagcaaccccgcggggagaggaatttccacgtcttctatcagttgctgtccggggctagcgaagaactgttgaacaagttaaagctcgagcgcgatttttcacgctataactacctctcactggacagcgctaaggtgaacggggtagacgatgcagcaaacttcaggacagtgcgcaacgcaatgcagatcgtgggttttatggaccatgaggccgaaagcgtgctagctgtagtggcagctgtgttgaagctaggcaatattgagtttaaacctgaatccagagtgaacggactggacgagtccaagataaaggataaaaacgaattgaaggagatctgcgaactcactggtattgaccaaagcgttctggagagagccttttcttttagaactgttgaagccaagcaagagaaggtgtctactacgctgaatgtggctcaagcatactatgccagggacgcattggccaaaaatttatactctagattattttcctggctggtgaacaggataaacgagagcattaaagcccagacgaaagttcggaagaaagtgatgggcgttttggatatctatggttttgagatattcgaggacaactcctttgagcagtttattattaactactgcaatgagaaattgcaacagatctttatcgagctcacactcaaagaggaacaggaggaatatatccgtgaggacattgagtggactcacatagactatttcaataatgccattatctgcgacctgatagaaaacaacacgaacggcattctggctatgctggatgaggaatgtctccgcccgggcacagtgaccgacgagacattcttggaaaaactgaaccaagtgtgtgctacacaccagcattttgaaagcaggatgtcgaaatgctcccggttcctgaatgacacttcactcccccactcctgctttaggatccagcactatgctggcaaggtgttgtaccaggtggaaggtttcgtggataagaataacgatctcctgtatagagacctctcccaagccatgtggaaggcttctcacgccttgatcaagtccctgtttccggagggaaaccctgccaagattaatctgaaacggcccccaacagctggctctcagttcaaggcttcagtcgccacacttatgaaaaatttgcagactaagaaccccaattatatccggtgcattaaacccaacgacaaaaaggccgctcatattttcaacgaggcactcgtgtgccaccaaatccggtacttaggccttctcgagaacgtcagggtaaggcgagccgggtacgctttccgacaagcgtacgagccttgcctcgagcgttataaaatgctgtgcaagcaaacatggcctcattggaagggaccggcgagaagcggtgtagaagtcctgttcaatgaattggagatcccggtagaggaatactcatttggccgttcaaagatcttcattcggaatccgcgaaccctatttaaactcgaggacctgagaaaacagcgcttggaagacctcgccaccttgatacagaagatttaccgggggtggaaatgccggacccacttcctcctcatgaaaaagtcccagatcgtaatagccgcttggtacagacgctacgcccaacagaaaaggtaccagcaaactaagagttctgcactggtgattcagagttacatcaggggttggaaggctagaaagatactacgggagctgaagcatcagaagcggtgtaaggaggctgtgactactatcgctgcttattggcacgggacccaggtgaggcgcgaataccgcaagtttttcagagcaaacgctgggaagaagatttatgaatttactttgcagaggatcgtacagaaatactttcttgagatgaaaaacaagatgccaagtctgtcccctatcgacaaaaattggccctctcgaccgtatctttttctggactcaacgcataaagagctgaagagaattttccacctttggcgatgcaaaaaataccgcgaccagtttacagatcaacagaagctgatttacgaagagaagctcgaggctagtgagttattcaaggacaaaaaggctctgtacccatcctcagtgggtcagcccttccagggggcttacttggaaattaacaagaacccaaaatacaagaagttaaaagatgctatcgaagagaagatcatcattgcagaggtcgtcaacaagatcaaccgtgcaaacggtaaatctacgtctcggatcttcctgcttacgaataacaatctgttgcttgccgatcaaaaaagcgggcagataaaatccgaagtgcccctggtagatgttactaaggtctccatgtcatcgcagaatgatggattcttcgccgtacacctgaaggaagggagcgaagccgcgagcaaaggggattttctgttctcatcggatcaccttattgagatggcaacaaagctttaccgaacaacccttagccaaaccaaacagaagctgaacattgagatcagcgatgagtttctggtccagtttagacaagacaaagtgtgtgtcaaattcatacagggcaaccagaagaatggctccgtgcctacttgcaaaagaaagaacaatagactactggaagttgccgtgccttag

SEQ ID NO: 173167 - DNA, 492 bp, Artificial Sequence
  derived and/or modified sequence
atggctaagatggaagtgaagacttcactactagacaacatgataggcgttggggatatggtgctacttgagccattgaacgaggaaacttttatcaataatctaaaaaagaggtttgaccattctgagatatacacctacatcgggagcgtggtcatatccgtgaacccatatcgcagcctccccatctattctcccgagaaagtggaggaataccggaaccggaacttctacgagctgagcccacacattttcgcgctgtcagacgaagcatacagaagcctgcgagaccaggataaagaccaatgtatcctcatcaccggcgaatcaggcgcgggcaagaccgaggcatccaaattggtgatgtcatacgtcgccgctgtttgtgggaagggagcagaagtgaaccaggtaaaggagcagttacttcagagtaacccagtcttggaggccttcggcaatgcaaagacggtgcggaacgataactcttag

SEQ ID NO: 173168 - DNA, 450 bp, Artificial Sequence
  derived and/or modified sequence
atggccaaaatggaagtgaagacctccctccttgacaatatgattggcgttggcgacatggtgttactcgagccactcaacgaagaaacctttataaacaatcttaagaaacgatttgatcacagcgaaatatacacatatatcgggtccgttgtaatcagcgtgaatccgtacagatccctgccgatatactcccctgaaaaagtggaggaatatagaaacaggaacttctacgagctgagccctcacatattcgccttgagcgatgaggcgtatagatctctgagagaccaggataaggatcaatgcatcttgattacgggggagagtggggcagggaagactgaggcgtctaagctcgtgatgagctatgtggcggctgtgtgcggcaaaggggccgaagttaatcaggtgaaggagcagctgttgcagagtaaccccgtgctctag

SEQ ID NO: 173169 - DNA, 924 bp, Artificial Sequence
  derived and/or modified sequence
atggctaagatggaagtgaaaacctccctgctggataacatgatcggcgtgggcgatatggttcttctggagccactgaacgaggagacttttatcaacaatctcaagaagagatttgaccattcagagatctacacgtatattggaagcgtcgtgatctccgtaaacccataccgctcactgccgatctattcaccagaaaaagtagaagaatacaggaaccggaacttttatgaactgtccccacacatatttgccctctccgatgaagcctaccggtcccttcgggaccaggacaaggaccaatgcatcttaatcacaggggaaagcggggctggcaagactgaggctagcaagctggtgatgtcatatgtcgccgctgtttgcggcaagggagcagaggttaatcaggttaaagaacagctccttcaatctaaccccgtcttagaagctttcggtaacgctaaaactgtccgtaacgacaattccagtaggtttggtaaatacatggatatcgaattcgatttcaagggcgacccactgggaggcgtaatatccaattatctgttagaaaaatcacgcgtggtaaagcagcctaggggcgaaagaaattttcacgtgttttatcagctgctaagcggggccagcgaggagctcttgaacaaactcaagctcgagcgggacttctctagatacaactatctaagcttagactccgcgaaagttaacggcgtggatgatgctgccaatttccggactgtacggaacgctatgcagatcgttggattcatggatcacgaagccgagagcgttttggcagtcgttgccgctgtactgaaattgggcaacatcgagttcaaaccggagtcccgagtgaacgggctcgatgagtccaagatcaaggacaagaatgagtccaagtag

SEQ ID NO: 173170 - DNA, 912 bp, Artificial Sequence
  derived and/or modified sequence
atggctaagatggaagtgaaaaccagcctattggacaatatgataggagttggcgacatggtgctgctagaaccactgaatgaggaaacattcatcaataatctgaaaaagcgctttgatcactcagagatctacacttatattggtagcgtcgttatcagcgtcaatccatatcggagccttccaatttattccccagagaaggtggaggagtacagaaatcgcaatttctatgaactcagccctcatattttcgcactgtctgacgaggcctacagatctctgcgggaccaggacaaagatcagtgtatcctgatcaccggcgaaagcggagccggcaagactgaggccagcaaactggtgatgagctatgttgctgccgtatgtgggaagggagccgaggtaaaccaagttaaggaacagctgctgcagtctaatcctgtcttggaagcgttcggaaatgccaagaccgtgaggaatgataattcttcaaggtttggcaaatacatggatatcgaattcgatttcaaaggtgatcctctgggtggagtgatctcaaattatctacttgagaaaagccgggttgtcaaacaacccaggggcgagaggaactttcatgtcttctatcagctgctgtccggggcctctgaagaacttttaaacaagttgaaactcgagagggacttctctaggtataattacctgtccctggactctgcaaaggtcaacggggtggatgatgcagcaaactttcgtacagtgcgcaacgctatgcagattgtgggttttatggatcatgaggctgaatccgttttggcggtggttgctgcggtgttaaaactgggcaacattgagttcaaacctgagagccgtgtgaatgggctggatgagtcaaaaatcaaggataaatag

SEQ ID NO: 173171 - DNA, 3237 bp, Artificial Sequence
  derived and/or modified sequence
atggccaagatggaggtgaagaccagcctgctggacaacatgattggagtgggggacatggtgctgctggagcccctgaatgaggagaccttcatcaacaacctgaagaagagatttgaccacagcgagatctacacctacatcggctctgtggtgatctctgtgaacccctaccgcagcctgcccatctacagccctgagaaggtggaggagtacagaaacagaaacttctatgagctgagcccccacatctttgccctgagtgatgaggcctaccgcagcctgcgggaccaggacaaggaccagtgcatcctgatcactggagagagcggggccggcaagacagaggccagcaagctggtgatgtcctatgtggccgctgtgtgtgggaaaggagctgaggtgaaccaggtgaaggagcagctgctgcagagcaaccctgtgctggaggcctttggaaatgccaagacagtgagaaatgacaacagcagcagatttgggaagtacatggacatcgagtttgacttcaagggggaccccctgggcggcgtcatcagcaactacctgctggagaagagccgggtggtgaagcagcccagaggagagaggaacttccacgtgttctaccagctgctgagcggggccagcgaggagctgctgaacaagctgaagctggagcgggacttcagccgctacaactacctgagcctggacagcgccaaggtgaatggagtggatgatgctgccaacttcagaacagtgagaaatgccatgcagatcgtgggcttcatggaccacgaggccgagagcgtgctggccgtggtggccgctgtgctgaagctgggcaacatcgagttcaagccagagagccgggtgaatggcctggatgagagcaagatcaaggacaagaatgagctgaaggagatctgtgagctgactggaattgaccagagcgtgctggagcgggccttctccttcagaacagtggaggccaagcaggagaaggtgtccaccaccctgaatgtggcccaggcctactatgccagagatgccctggccaagaacctgtacagccgcctcttctcctggctggtgaaccgcatcaatgaaagcatcaaggcccagaccaaggtgaggaagaaggtgatgggcgtgctggacatctacggctttgagatctttgaggacaacagctttgagcagttcatcatcaactactgcaatgagaagctgcagcagatcttcatcgagctgaccctgaaggaggagcaggaggagtacatccgggaggacatcgagtggacccacatcgactacttcaacaatgccatcatctgtgacctgattgagaacaacaccaacggcatcctggccatgctggatgaagaatgtctgcggcccggcaccgtgacagatgagaccttcctggagaagctgaaccaggtgtgtgccacccaccagcactttgagagcaggatgagcaagtgcagccgcttcctgaatgacaccagcctgccccacagctgcttccgcatccagcactacgccggcaaggtgctgtaccaggtggagggctttgtggacaagaacaatgacctgctgtacagagacctgagccaggccatgtggaaggccagccacgccctgatcaagagcctcttccctgagggcaacccagccaagatcaacctgaagaggcctcccacagctggcagccagttcaaggcctctgtggccaccctgatgaagaacctgcagaccaagaaccccaactacatccgctgcatcaagcccaatgacaagaaggccgcccacatcttcaatgaggccctggtgtgccaccagatccgctacctgggcctgctggagaatgtgcgggtgcggcgggccggctacgccttccggcaggcctatgagccctgcctggagcgctacaagatgctgtgcaagcagacctggccccactggaagggccctgcccggtctggagtggaggtgctcttcaatgagctggagatccctgtggaggagtacagctttggccgcagcaagatcttcatccggaaccccaggaccctcttcaagctggaggacctgaggaagcagaggctggaggacctggccaccctcatccagaagatctaccggggctggaagtgcaggacccacttcctgctgatgaagaagagccagatcgtgattgctgcctggtacagaagatatgcccagcagaagcgctaccagcagaccaagagcagcgccctggtgatccagagctacatccggggctggaaggccaggaagatcctgcgggagctgaagcaccagaagcgctgcaaggaggccgtgaccaccatcgccgcctactggcacggcacccaggtgcggcgggagtacaggaagttcttccgggccaatgccggcaagaagatctatgagttcaccctgcagagaattgtgcagaagtacttcctggagatgaagaacaagatgcccagcctgagccccatcgacaagaactggcccagccggccctacctgttcctggacagcacccacaaggagctgaagaggatcttccacctgtggcgctgcaagaagtacagagaccagttcacagaccagcagaagctgatctatgaggagaagctggaggccagcgagctgttcaaggacaagaaggccctgtaccccagctctgtgggccagcccttccagggcgcctacctggagatcaacaagaaccccaagtacaagaagctgaaggatgccatcgaggagaagatcatcatcgccgaggtggtgaacaagatcaacagagccaacgggaagagcaccagccgcatcttcctgctgaccaacaacaacctgctgctggccgaccagaagagcggccagatcaagtctgaggtgcccctggtggatgtgaccaaggtgtccatgagcagccagaatgatggcttctttgctgtgcacctgaaggagggcagcgaggccgccagcaagggggacttcctgttcagcagtgaccacctgattgagatggccaccaagctgtaccgcaccaccctgagccagaccaagcagaagctgaacatcgagatcagtgatgagttcctggtgcagttccggcaggacaaggtgtgtgtgaagttcatccagggcaaccagaagaatggatctgtgcccacctgcaagaggaagaacaaccggctgctggaggtggccgtgccctag

SEQ ID NO: 173172 - DNA, 492 bp, Artificial Sequence
  derived and/or modified sequence
atggccaagatggaggtgaagaccagcctgctggacaacatgattggagtgggggacatggtgctgctggagcccctgaatgaggagaccttcatcaacaacctgaagaagagatttgaccacagcgagatctacacctacatcggctctgtggtgatctctgtgaacccctaccgcagcctgcccatctacagccctgagaaggtggaggagtacagaaacagaaacttctatgagctgagcccccacatctttgccctgagtgatgaggcctaccgcagcctgcgggaccaggacaaggaccagtgcatcctgatcactggagagagcggggccggcaagacagaggccagcaagctggtgatgtcctatgtggccgctgtgtgtgggaaaggagctgaggtgaaccaggtgaaggagcagctgctgcagagcaaccctgtgctggaggcctttggaaatgccaagacagtgagaaatgacaacagctag

SEQ ID NO: 173173 - DNA, 450 bp, Artificial Sequence
  derived and/or modified sequence
atggccaagatggaggtgaagaccagcctgctggacaacatgattggagtgggggacatggtgctgctggagcccctgaatgaggagaccttcatcaacaacctgaagaagagatttgaccacagcgagatctacacctacatcggctctgtggtgatctctgtgaacccctaccgcagcctgcccatctacagccctgagaaggtggaggagtacagaaacagaaacttctatgagctgagcccccacatctttgccctgagtgatgaggcctaccgcagcctgcgggaccaggacaaggaccagtgcatcctgatcactggagagagcggggccggcaagacagaggccagcaagctggtgatgtcctatgtggccgctgtgtgtgggaaaggagctgaggtgaaccaggtgaaggagcagctgctgcagagcaaccctgtgctgtag

SEQ ID NO: 173174 - DNA, 924 bp, Artificial Sequence
  derived and/or modified sequence
atggccaagatggaggtgaagaccagcctgctggacaacatgattggagtgggggacatggtgctgctggagcccctgaatgaggagaccttcatcaacaacctgaagaagagatttgaccacagcgagatctacacctacatcggctctgtggtgatctctgtgaacccctaccgcagcctgcccatctacagccctgagaaggtggaggagtacagaaacagaaacttctatgagctgagcccccacatctttgccctgagtgatgaggcctaccgcagcctgcgggaccaggacaaggaccagtgcatcctgatcactggagagagcggggccggcaagacagaggccagcaagctggtgatgtcctatgtggccgctgtgtgtgggaaaggagctgaggtgaaccaggtgaaggagcagctgctgcagagcaaccctgtgctggaggcctttggaaatgccaagacagtgagaaatgacaacagcagcagatttgggaagtacatggacatcgagtttgacttcaagggggaccccctgggcggcgtcatcagcaactacctgctggagaagagccgggtggtgaagcagcccagaggagagaggaacttccacgtgttctaccagctgctgagcggggccagcgaggagctgctgaacaagctgaagctggagcgggacttcagccgctacaactacctgagcctggacagcgccaaggtgaatggagtggatgatgctgccaacttcagaacagtgagaaatgccatgcagatcgtgggcttcatggaccacgaggccgagagcgtgctggccgtggtggccgctgtgctgaagctgggcaacatcgagttcaagccagagagccgggtgaatggcctggatgagagcaagatcaaggacaagaatgaaagcaagtag

SEQ ID NO: 173175 - DNA, 912 bp, Artificial Sequence
  derived and/or modified sequence
atggccaagatggaggtgaagaccagcctgctggacaacatgattggagtgggggacatggtgctgctggagcccctgaatgaggagaccttcatcaacaacctgaagaagagatttgaccacagcgagatctacacctacatcggctctgtggtgatctctgtgaacccctaccgcagcctgcccatctacagccctgagaaggtggaggagtacagaaacagaaacttctatgagctgagcccccacatctttgccctgagtgatgaggcctaccgcagcctgcgggaccaggacaaggaccagtgcatcctgatcactggagagagcggggccggcaagacagaggccagcaagctggtgatgtcctatgtggccgctgtgtgtgggaaaggagctgaggtgaaccaggtgaaggagcagctgctgcagagcaaccctgtgctggaggcctttggaaatgccaagacagtgagaaatgacaacagcagcagatttgggaagtacatggacatcgagtttgacttcaagggggaccccctgggcggcgtcatcagcaactacctgctggagaagagccgggtggtgaagcagcccagaggagagaggaacttccacgtgttctaccagctgctgagcggggccagcgaggagctgctgaacaagctgaagctggagcgggacttcagccgctacaactacctgagcctggacagcgccaaggtgaatggagtggatgatgctgccaacttcagaacagtgagaaatgccatgcagatcgtgggcttcatggaccacgaggccgagagcgtgctggccgtggtggccgctgtgctgaagctgggcaacatcgagttcaagccagagagccgggtgaatggcctggatgagagcaagatcaaggacaagtag

SEQ ID NO: 173176 - DNA, 5026 bp, Artificial Sequence
  derived and/or modified sequence
ggtggctcccgttcctgcccgcgcgccgaggggcgaatcccaggcagcgaggtcgccgcccccgcccctcggccggcccctccgccagcgggcgagaggggagtggccgggctcctcccgccgccgctgagcactccgcagctgggtgcgcacgggagcctcaaccgcggcgcgtggaggcagtaccagagcgcgcggcgcgcagtcggccggcagccgcgggacagccttggcagaacagccgcggcgggagccccgcagccccgggctgggcccgcgtcccggagcgccaccggagagcgaggacgacgtggaggcggagtggcgcccggcgaggtagcgccaggcgagctggagaccatggccaaaatggaggtgaaaacctcacttctggacaatatgattggagttggggatatggttcttttagaacctctcaatgaggagaccttcatcaacaacctcaagaagcgctttgaccacagtgaaatatacacatacattggaagtgtggttatatctgttaacccataccggtctttacccatttattcaccagagaaagtggaagaatacaggaacagaaatttttatgaactgagccctcacatctttgccctttcggatgaagcatacagatccctacgagatcaagataaggaccaatgtattctcattactggggaaagtggagcaggaaaaacagaggccagtaagcttgtcatgtcctatgtggcagctgtttgtggaaaaggagcagaagttaatcaagttaaagaacagcttttacagtccaacccggtcctggaagcttttggaaatgccaaaactgtaaggaatgacaactcctctagatttggcaaatatatggatattgaatttgactttaaaggcgatccactaggaggagtaataagtaactatcttttagagaaatctcgggttgttaaacagccaagaggtgaaagaaacttccatgtgttctatcagctgctctctggtgcctctgaagagctcctcaataaacttaagcttgagagggatttcagcaggtataactacctgagtctggattcggccaaagtgaatggagtggatgatgcagcaaattttagaaccgtgcggaatgccatgcagattgtgggctttatggatcatgaagctgagtctgtcttggcggtggtggcagcagtgttgaaactggggaacattgagttcaagcccgaatctcgagtgaatggtctagatgaaagcaaaatcaaagataaaaatgagttaaaagaaatttgtgaattgaccggcattgatcaatcagttctagaacgagcattcagtttccgaacagttgaggccaaacaggagaaagtttcaactacactgaatgtggctcaggcttattatgcccgtgatgctctggctaaaaacctctacagcaggttgttttcatggttggtaaatcgaatcaatgaaagcattaaggcacaaacaaaagtgagaaagaaggtcatgggtgttctggacatttatggctttgagattttcgaggacaacagctttgagcagttcattattaattattgtaacgaaaagctgcaacaaatcttcattgaacttactcttaaagaagagcaggaggagtatatacgggaggatatagaatggactcacattgactacttcaataatgctatcatttgtgacctaatagaaaataacacaaatggaatcctggccatgctggatgaagagtgcctcagacctggcacagtcactgatgagaccttcttagaaaagctgaaccaagtatgtgccacccaccagcattttgagagcaggatgagcaagtgctctcggttcctcaatgacacgtctctgcctcacagctgcttcaggatccagcattatgctggaaaggtgctgtaccaggtggaaggattcgttgacaaaaacaatgaccttctctatcgagacctgtcccaagccatgtggaaggccagccatgccctcatcaagtctttgttccccgaagggaatcccgccaagatcaacctgaaaaggcctcctacagcaggctcacagttcaaggcatccgtggccactctgatgaaaaacctacagaccaagaacccaaactatattaggtgtatcaaaccgaatgataaaaaagcagcacacatcttcaacgaggctctagtgtgtcatcagatcaggtacctggggcttttggagaacgtccgagtgcggagggcaggctacgccttcaggcaggcctatgaaccttgcctagaaagatacaaaatgctttgtaaacaaacatggcctcattggaaaggaccagccaggtctggtgtggaggtcctatttaatgaattagaaattcccgtggaagaatactcctttggtagatcaaagatattcatccgaaacccaagaacattattcaaattagaagacctgaggaagcaacgcctggaggacttggccactctcattcagaagatatatcgggggtggaaatgccgcacacacttcctgctaatgaaaaaaagccaaattgtgattgccgcctggtacaggagatatgcgcaacaaaagaggtaccagcagacaaagagttccgccttagtaattcagtcttatatccggggttggaaggctcgaaaaattctgcgggaactgaagcatcaaaagcgctgtaaggaagcagtcacgaccattgctgcatattggcatgggacccaggtacgtagagaatacaggaaattcttcagagccaatgctggaaagaaaatctatgagtttacgcttcagagaattgtgcaaaaatacttcttggaaatgaaaaataagatgccttccttatctccaatagacaagaattggccctcaagaccttacttattcttggattctactcacaaggagctaaaaaggattttccacttgtggaggtgtaaaaaatacagggaccaattcacagaccagcagaaacttatttatgaagagaaactagaagccagtgaactcttcaaagacaagaaggctttatacccatctagtgttgggcaaccattccaaggggcttacctggaaatcaacaagaaccccaagtataagaaactcaaagatgccattgaagaaaagatcatcattgctgaagtcgtgaacaaaattaaccgtgctaatgggaagagtacatctcggattttcctcttaacaaacaataatctccttcttgctgaccaaaagtctggacaaatcaagtcagaggttccattggtggatgtgaccaaggtatcaatgagctcacaaaatgatggcttcttcgccgtccacctcaaagagggctcagaagcagctagtaaaggagactttctcttcagcagtgatcacctgattgaaatggccaccaagctctatcgcacaactctcagccaaaccaaacagaagctcaatattgagatttccgatgagttcctggtacagttcagacaggacaaagtatgtgtgaagtttattcagggaaaccagaaaaatgggagtgtcccaacatgtaaacgaaaaaacaaccgtctccttgaagttgctgtcccttaactggcgcctcctctctactttcatggacttgttcctttgtaatagtgcaatttggttttgttttatttggggttcattgtatgtttgggaatcaccaaaggcttttagagttctttggcaaaataaaaatatttgactaatcaatttttattattggaatagttttaacctttcaaatacatgttctgtcctggagcaggattgtagaaactaacagtgtctattttcatgtctgatgtgttcttcctttagtcatcatgttaggtctgtgtaccctaaatcagcatattactcataaatcattaattaatataagcataggaaatggtcttaaaagatactgcattcattcatcagatatttattccatgcctactctatgctaggcactgtgctagatggtatgaaaacttattaggaacctttttgtttttgagaccattgcattctggctggtttgtgctggtttaacgacatctaagaaggtttagaaatggtgagaccaaaacaataactgttaatgatggacagcattattaggaaccctgtagtatgatatttaacaatataggcttcaagaagggctggtcctaagagggggcagaaatgaatgaccaggttaaatccctctacatgtggtttctgtttgaaaaaaagaaaactgacatttgaacaggacttttaatttgtttaaaactctggtaattacttgtaacagtagaaaatagaagtcattcttattttagaaaaagtgacagaagcagtccagtaagattatatgtttctgtttctggtaaataccatatatgatcctcgaaatgataatatctccagaatattgttttcacccaaatttgagtagatattttaaacacctaacaaagtaaagggctaaaagccattcagatagcagtaaaacattctgtatgatgtgcaataaaacatccaagatcttttttgaaagttttatttataatatacatttttgtatgagaaaggtgattggtacagggtgcctattttagtcatggatcaaaatttgtgtaacttgcagggctttctttctttttcttcaaatttacaagggttcattttggaaactacattttaaactttggaatcaaattgtttcttatttgggaggataatgtatatacattggtattatgttaaataataaaattgttctaatttggtgccatttcctgaatcacaactgtatttttgtatctcaagctattttcatatgttgtgtgtcaatgtatcatctctcagaaaggttttacaatccaaacattatatgttctctgtgtaactgaatttcacttatcttttataaaccagaaacattaattgaaaatattttctggggattttctcttgacttgtatttttaaaaattgctcacataaagaagttctcagaagtc

SEQ ID NO: 173177 - DNA, 572 bp, Artificial Sequence
  derived and/or modified sequence
aaacccgcaaggcgcggaggccgccgcgacgctcaccggggggcgctgtgaagccggcaccgggcggacagagctggagaccatggccaaaatggaggtgaaaacctcacttctggacaatatgattggagttggggatatggttcttttagaacctctcaatgaggagaccttcatcaacaacctcaagaagcgctttgaccacagtgaaatatacacatacattggaagtgtggttatatctgttaacccataccggtctttacccatttattcaccagagaaagtggaagaatacaggaacagaaatttttatgaactgagccctcacatctttgccctttcggatgaagcatacagatccctacgagatcaagataaggaccaatgtattctcattactggggaaagtggagcaggaaaaacagaggccagtaagcttgtcatgtcctatgtggcagctgtttgtggaaaaggagcagaagttaatcaagttaaagaacagcttttacagtccaacccggtcctggaagcttttggaaatgccaaaactgtaaggaatgacaactcct

SEQ ID NO: 173178 - DNA, 374 bp, Artificial Sequence
  derived and/or modified sequence
ggaagttaacttttcttaatcgggtttctacaaggtagttcactattgtatgttttatttcttaccaaaacttttcttgggaaaatttgttttattgctccatacgtggtcaagctggagaccatggccaaaatggaggtgaaaacctcacttctggacaatatgattggagttggggatatggttcttttagaacctctcaatgaggagaccttcatcaacaacctcaagaagcgctttgaccacagtgaaatatacacatacattggaagtgtggttatatctgttaacccataccggtctttacccatttattcaccagagaaagtggaagaatacaggaacagaaatttttatgaactgagccctcacat

SEQ ID NO: 173179 - DNA, 542 bp, Artificial Sequence
  derived and/or modified sequence
agagacgggagctacgaagggtggtggggccgggaagagagttggggagagggttgggagagggtgatgagagcgcgctggagagctggagaccatggccaaaatggaggtgaaaacctcacttctggacaatatgattggagttggggatatggttcttttagaacctctcaatgaggagaccttcatcaacaacctcaagaagcgctttgaccacagtgaaatatacacatacattggaagtgtggttatatctgttaacccataccggtctttacccatttattcaccagagaaagtggaagaatacaggaacagaaatttttatgaactgagccctcacatctttgccctttcggatgaagcatacagatccctacgagatcaagataaggaccaatgtattctcattactggggaaagtggagcaggaaaaacagaggccagtaagcttgtcatgtcctatgtggcagctgtttgtggaaaaggagcagaagttaatcaagttaaagaacagcttttacagtccaacccggtcctgg

SEQ ID NO: 173180 - DNA, 1176 bp, Artificial Sequence
  derived and/or modified sequence
gccgggctcctcccgccgccgctgagcactccgcagctgggtgcgcacgggagcctcaaccgcggcgcgtggaggcagtaccagagcgcgcggcgcgcagtcggccggcagccgcgggacagccttggcagaacagccgcggcgggagccccgcagccccgggctgggcccgcgtcccggagcgccaccggagagcgaggacgacgtggaggcggagtggcgcccggcgaggtagcgccaggcgagctggagaccatggccaaaatggaggtgaaaacctcacttctggacaatatgattggagttggggatatggttcttttagaacctctcaatgaggagaccttcatcaacaacctcaagaagcgctttgaccacagtgaaatatacacatacattggaagtgtggttatatctgttaacccataccggtctttacccatttattcaccagagaaagtggaagaatacaggaacagaaatttttatgaactgagccctcacatctttgccctttcggatgaagcatacagatccctacgagatcaagataaggaccaatgtattctcattactggggaaagtggagcaggaaaaacagaggccagtaagcttgtcatgtcctatgtggcagctgtttgtggaaaaggagcagaagttaatcaagttaaagaacagcttttacagtccaacccggtcctggaagcttttggaaatgccaaaactgtaaggaatgacaactcctctagatttggcaaatatatggatattgaatttgactttaaaggcgatccactaggaggagtaataagtaactatcttttagagaaatctcgggttgttaaacagccaagaggtgaaagaaacttccatgtgttctatcagctgctctctggtgcctctgaagagctcctcaataaacttaagcttgagagggatttcagcaggtataactacctgagtctggattcggccaaagtgaatggagtggatgatgcagcaaattttagaaccgtgcggaatgccatgcagattgtgggctttatggatcatgaagctgagtctgtcttggcggtggtggcagcagtgttgaaactggggaacattgagttcaagcccgaatctcgagtgaatggtctagatgaaagcaaaatcaaagataaaaatgaaagtaaa

SEQ ID NO: 173181 - DNA, 1310 bp, Artificial Sequence
  derived and/or modified sequence
tttcctcagttagattgcacatgcatgagaagcagtagatgtgtctctcattctttcttctttcattgcctgctaagtactgtttgtataccagtagcatgggtcagagtgggaggttgtcaacagaagagtccagcatgtatccatgatggactctcgatcaactttatatgattaactcatataaaacagccctgtatggaagctgaggctgcctcttcctagccacaggatattgacctactttccccttcttatctgcttgcaaaatatttgttgtacttagtgtgttctccctgtcacaacgaatgtttgtctctctctttcatatgaactgaaggctaaagtgctagttaaatcagtggaaaaagcaatggagaagaaaagttgctggagaccatggccaaaatggaggtgaaaacctcacttctggacaatatgattggagttggggatatggttcttttagaacctctcaatgaggagaccttcatcaacaacctcaagaagcgctttgaccacagtgaaatatacacatacattggaagtgtggttatatctgttaacccataccggtctttacccatttattcaccagagaaagtggaagaatacaggaacagaaatttttatgaactgagccctcacatctttgccctttcggatgaagcatacagatccctacgagatcaagataaggaccaatgtattctcattactggggaaagtggagcaggaaaaacagaggccagtaagcttgtcatgtcctatgtggcagctgtttgtggaaaaggagcagaagttaatcaagttaaagaacagcttttacagtccaacccggtcctggaagcttttggaaatgccaaaactgtaaggaatgacaactcctctagatttggcaaatatatggatattgaatttgactttaaaggcgatccactaggaggagtaataagtaactatcttttagagaaatctcgggttgttaaacagccaagaggtgaaagaaacttccatgtgttctatcagctgctctctggtgcctctgaagagctcctcaataaacttaagcttgagagggatttcagcaggtataactacctgagtctggattcggccaaagtgaatggagtggatgatgcagcaaattttagaaccgtgcggaatgccatgcagattgtgggctttatggatcatgaagctgagtctgtcttggcggtggtggcagcagtgttgaaactggggaacattgagttcaagcccgaatctcgagtgaatggtctagatgaaagcaaaatcaaagataaaaa

SEQ ID NO: 173182 - DNA, 3237 bp, Artificial Sequence
  derived and/or modified sequence
atggccaagatggaggtgaagaccagcctgctggacaacatgatcggggtcggtgatatggtactgctagagccgctgaacgaagaaacttttattaacaacctcaaaaagcggtttgaccacagcgagatttacacatacattggctccgtggtgatctccgtgaacccttaccggagtctcccaatttactcgcctgaaaaggtggaagagtatcgcaaccgcaacttttacgaactgtctcctcatatcttcgctttatccgatgaagcctatcgcagtctccgagaccaagataaggaccaatgcatacttatcactggcgaatctggagccggaaaaacagaggcctccaagctggtaatgtcatatgtcgctgccgtgtgtgggaaaggggcggaggtgaaccaagtcaaagagcaactactgcagagcaacccagtactggaggcctttggcaacgccaaaactgttagaaacgataattcgtcccggttcgggaagtacatggacatcgagttcgacttcaaaggcgaccctcttgggggagtcatctcaaattatttactggaaaagagtagagttgtcaaacagcctcgtggggaacgcaactttcatgtgttttatcagctgctgtctggagcgagcgaggagctgcttaataagctgaagctggagcgcgatttctcaagatataactatctgagtctcgattcagctaaagtcaatggcgtggacgatgcggcaaactttcgaacggtccgcaatgcaatgcagattgtcggctttatggaccacgaggcagagtctgtattagccgtggtcgccgccgtgctcaagctcggtaatatcgagttcaagcctgaatcccgggtgaacgggttagatgaatcaaagattaaggacaagaatgagctgaaggagatctgtgaactcactggtattgatcagtctgtgctggagcgggcgtttagtttccgtacagtggaggctaagcaggagaaggtttcaacaaccctcaacgtggctcaagcttactatgcccgtgacgcgctagcaaaaaatctgtattcccgactcttctcctggttagtcaatagaattaacgagagtatcaaagcccagactaaggtcagaaagaaagtgatgggcgtactcgacatatacggttttgagatcttcgaagataattcctttgagcagtttattatcaattactgcaatgagaaactgcaacaaatcttcatagagctaacgctgaaggaagaacaagaggaatatatccgggaagacatcgaatggacgcatatagattactttaacaacgccatcatttgcgatctgatagagaataacactaacgggattctagccatgctcgatgaggaatgcttacgacctggcaccgttaccgacgaaacattcttggagaagctaaatcaggtctgcgccactcaccaacacttcgagtctcgaatgagtaaatgcagtcgcttcctgaatgacaccagcttgccacattcttgtttccggatccaacattatgcaggtaaagttctgtatcaggtggaagggtttgtggacaagaacaacgacctgctgtacagggacctcagtcaggcaatgtggaaagcttcccatgccctaatcaaatccctcttccctgaaggcaatcctgccaagatcaatttgaaaaggcccccgaccgcgggatcccagtttaaggccagcgtggcaactctaatgaaaaacttacagaccaagaaccccaattatatcagatgcattaagccgaacgataagaaagctgctcacatcttcaacgaagcgctcgtgtgtcaccagatcagatacttgggcttactggaaaatgtgagggtgaggcgcgccgggtacgcattccggcaggcttacgagccatgtctagagagatataaaatgctctgtaaacagacctggcctcactggaagggacctgccaggagcggcgttgaagtgttgtttaatgaactggagattcctgtggaagaatatagttttggccgctcaaaaatattcatcagaaaccccaggacactgttcaaactcgaggatctccgcaaacagagactagaggatctggcaactctcatacagaagatctatcgcggctggaaatgtcgcacccactttttgttaatgaagaaatctcaaattgttatcgcagcctggtacagacgctatgcccagcaaaaacggtaccagcagaccaaatccagtgcactcgttattcagtcctatatccgtggatggaaagcacggaaaattctgagagagttgaagcatcagaaaagatgcaaggaagcagtaaccaccatcgcagcttattggcacgggacccaggtgcggagagagtaccgtaagtttttccgcgctaatgcaggaaaaaaaatctacgaattcacacttcagcgcatcgttcaaaagtactttctggaaatgaagaacaaaatgcccagtttaagccccatcgacaagaactggccgagccgaccttacctattcctggattccacacacaaggaacttaagagaatttttcatttatggaggtgcaaaaaatatcgggaccagtttaccgaccagcaaaaactaatctacgaagagaaattagaagcgtcggagctgttcaaagacaaaaaagcactgtatcctagctcagtgggacagcccttccagggggcttatctagagattaataagaacccaaagtacaagaaactgaaagacgccattgaagagaaaatcatcattgcagaagttgtgaataaaatcaatagggcgaacggaaagagtacaagcaggatctttttgcttacaaataataatttgctcttagccgatcagaaatcaggccagatcaaaagtgaagttcccctggtggatgtgaccaaggtgtccatgtcttctcagaacgacggcttctttgccgtgcatctcaaagagggctccgaagccgcttctaaaggggacttcctattctcatcggaccacctcatcgaaatggcaaccaaactgtatcgcaccaccctctcccaaacaaagcagaagctgaacatagaaatcagcgatgagttcttagtccagttccgtcaggataaagtctgtgtcaaatttatccaggggaatcaaaaaaatggaagcgtgccaacatgtaagcgcaagaacaatcgtctcctggaagtggccgtcccatag

SEQ ID NO: 173183 - DNA, 492 bp, Artificial Sequence
  derived and/or modified sequence
atggccaagatggaggtgaagaccagcctgctggacaacatgatcggcgtcggcgatatggtgctgttagagcctctcaatgaggagactttcattaacaatctcaaaaagaggtttgaccactcagaaatctacacttacatcggctctgtcgtgatcagtgttaacccatacagatcgcttcctatctacagccccgaaaaagtggaagagtacagaaacagaaacttttatgaactgtccccacacattttcgctctgtccgatgaggcctacaggagtcttcgggatcaggacaaggaccaatgtatcctaatcactggcgagtcaggcgccggcaagaccgaagcctccaagctggttatgagctacgtcgctgcagtctgcggcaaaggagccgaagttaatcaggtgaaagagcaactcctgcagagcaatcccgtcctcgaggcctttggcaatgctaagacagttcggaatgacaattcctag

SEQ ID NO: 173184 - DNA, 450 bp, Artificial Sequence
  derived and/or modified sequence
atggccaagatggaggtgaagaccagcctgctggacaacatgatcggagtgggcgatatggttctgctggaaccccttaacgaagagacattcatcaataatctaaagaagcgctttgaccactccgagatctacacttatattggatctgtggttatttccgtgaacccctaccggtccctaccaatctatagccccgagaaagtggaagagtatagaaatagaaacttctatgagctgagtccccatatcttcgctctttccgacgaagcttataggagcttaagggatcaggataaagaccaatgtattctgattacgggcgagtccggcgcaggcaaaacagaagcctcaaaactggttatgtcatacgtggccgccgtttgcggcaagggagctgaggttaaccaggttaaagaacagctgttacagagcaaccctgttctatag

SEQ ID NO: 173185 - DNA, 924 bp, Artificial Sequence
  derived and/or modified sequence
atggccaagatggaggtgaagaccagcctgctggacaacatgatcggcgtgggggatatggttcttctagagccactgaacgaagagactttcatcaacaacctgaagaagcgttttgaccatagtgagatctacacctatatcggtagcgtcgtcattagtgtgaacccttatcggtcactgcctatctatagccccgaaaaggtggaggagtataggaatcgaaatttttacgaactgtccccacacatttttgcactttctgacgaagcttatagaagtctgcgagatcaggacaaggaccagtgtattctgattacgggtgaaagcggtgccggaaagaccgaagcctccaagttggtcatgtcctacgtcgcagctgtgtgtggaaagggggccgaagttaatcaggtgaaggaacagttgctgcagtccaacccagtactggaggcttttgggaacgctaaaactgttaggaacgacaattcaagtcgattcgggaaatatatggacatagaattcgacttcaaaggcgaccccctcgggggagtgatatcgaattacctgcttgaaaagtcgagggtcgttaaacagcctaggggcgaacgcaattttcacgtattttaccagctgctgtccggtgcatctgaagagctgctgaataaactgaagctggagagggactttagcaggtataactacctgtccctggatagcgcgaaagtcaatggcgtggatgatgctgcaaacttcagaaccgtccggaacgcaatgcagatcgtcgggttcatggatcacgaggcagagtccgtgttagcagtggtggccgctgtcctcaagctcggcaatatagagttcaaacccgagtccagagtgaacggcctggacgaaagcaagatcaaggacaagaatgaatccaagtag

SEQ ID NO: 173186 - DNA, 912 bp, Artificial Sequence
  derived and/or modified sequence
atggccaagatggaggtgaagaccagcctgctggacaacatgatcggagtaggcgacatggtgctgcttgagcctctgaatgaggagacgttcattaataatctgaaaaaacggtttgaccattctgagatctatacatacatagggtctgtcgttatctctgtgaacccttaccggagcctgcctatttatagccccgaaaaagtggaggaatataggaatagaaacttttatgagcttagtccacatattttcgccctatccgacgaggcataccgctctctgcgcgaccaggacaaggatcagtgtattctgataacgggcgagtctggggccggcaagactgaagcgagtaagcttgtgatgagctatgtggccgcagtgtgcggtaaaggcgctgaagtcaaccaggtgaaggagcagctcttgcagtccaatcctgtgctggaagcgtttggcaatgctaagaccgttcgcaatgacaacagcagtcgcttcggaaagtacatggacatcgaattcgatttcaagggggacccgctcgggggcgtaataagtaattacctgctagaaaaatctagggtcgtgaaacagcccaggggtgagagaaacttccacgttttctaccaacttttaagcggagcctccgaggaactgttgaacaagttaaaactagagagggatttctcccgctacaactacctgtctcttgactctgccaaggtgaatggagttgatgacgcggcaaacttcagaaccgtcagaaatgcaatgcaaattgtcgggtttatggaccatgaagcagagtctgtgttggcagtggtggccgccgtcttgaagcttggcaacatcgagtttaagcccgaaagcagggtgaatgggctcgacgagtcaaagatcaaggataaatag

SEQ ID NO: 173187 - DNA, 3237 bp, Artificial Sequence
  derived and/or modified sequence
atggctaaaatggaggttaaaacgagcctacttgacaatatgatcggagtcggggatatggttctcctcgagccattgaatgaagagaccttcataaataacctaaaaaaacggttcgatcattccgaaatctacacctatatcggatccgttgtgatctctgttaatccttacaggagtctgcctatttacagcccagaaaaggttgaggaatacagaaacaggaacttctacgaattgtctccccacattttcgcgctgtcagacgaggcctacaggtctctaagggaccaagataaggaccagtgcatacttatcaccggagaaagtggagctgggaagacagaggccagcaaattggttatgtcatatgttgccgctgtgtgcggaaagggcgctgaggtgaatcaggtcaaggaacagctgctgcagtctaatccggtgcttgaagcgtttggcaatgcaaagaccgtgagaaacgataacagctccagatttggtaaatacatggatatcgaatttgattttaaaggcgaccctctggggggtgtgatttcaaattacctactagagaagtcccgagtcgtaaagcagcctcggggagagcgcaatttccacgtcttctaccagttgctttccggagcttcagaagagttgctcaacaagttaaaactagagcgcgatttctcacgatataattacctctcccttgattctgccaaggtgaacggggtggatgacgcagccaacttccgaactgtcagaaatgcaatgcaaatcgtgggatttatggatcatgaggccgaaagcgtgttagcagttgttgcagctgtgctgaagctgggtaatatcgaatttaagcccgagtctagagtaaacggactggacgagtccaagatcaaggataaaaatgagctgaaagagatctgtgagctgacagggatcgatcaaagcgttctagaacgggctttctcttttagaactgtggaagcaaaacaggagaaggtgtccacaaccttaaacgtggctcaggcctattatgcgagagatgcgctggcgaaaaacctgtatagtaggctcttctcctggttggtgaatcgcatcaatgagtccattaaggcccaaacaaaggtccggaagaaagtcatgggagtgcttgacatttatggattcgagatcttcgaagacaattcttttgagcaatttatcatcaattactgcaacgaaaaactgcaacaaatcttcattgaactaactttgaaggaggagcaggaagaatacattcgcgaagacatagagtggacccatatcgactattttaataacgctatcatttgcgacttgatagaaaacaataccaatgggatcctcgccatgctggacgaagagtgtttgcgccctggaacagtgactgatgaaacattcctagagaagctaaatcaggtgtgtgctacccatcagcacttcgagagcaggatgtcaaagtgttcccggtttctcaacgacacatctctgccccactcctgttttaggatccagcactacgccggtaaggtactttaccaggtcgaaggttttgtggacaagaataacgacctgttgtatagggatctgtcacaggcaatgtggaaagcctctcacgcccttatcaagtctctctttcctgaaggaaatcctgctaaaattaatctgaaacggcctcctacagctggcagccagttcaaggctagcgtcgcaacactgatgaaaaatcttcagactaaaaatccgaactacattaggtgtattaagcctaacgacaaaaaggcagctcacattttcaacgaggctttggtctgccaccagatcaggtatctggggctgttggagaatgtccgagttagaagagccggatatgcatttcggcaggcctacgaaccctgcctcgaaaggtacaagatgctgtgcaagcagacctggccacactggaagggacccgctagatcaggagtagaagtgctgttcaatgagctggagattccggtggaggagtactccttcggaagatctaaaatcttcataagaaatcctcgaacgctgttcaagctggaagatctgcggaagcagagactcgaagaccttgccaccctcatccagaaaatttaccgaggctggaagtgtcgaacccactttctgctcatgaagaagagccagatcgtgatcgcagcctggtatagacgatacgcccagcaaaaacggtaccagcagactaagagtagtgccttagttatccagtcttacatcaggggctggaaggcgcgaaagatcctaagagagctgaagcaccaaaagaggtgtaaagaggctgtgaccaccattgccgcttactggcacggcacccaggtacggagggagtatcgtaagttctttcgagcaaatgcaggcaagaagatttacgagtttacactgcaaaggattgtgcaaaagtattttctggagatgaaaaacaagatgccatctctgagccccatcgataagaattggccgtcaaggccctatctgttcctggattctacgcacaaagaacttaaacggatttttcacctgtggagatgtaaaaagtacagggaccagttcactgaccagcaaaagttgatctacgaagagaagctcgaagccagtgagctgtttaaggataagaaggctctctacccctcctctgttggacagccgttccagggcgcttatctggagataaacaaaaaccctaaatacaagaaactgaaggacgcaattgaggagaagatcattattgctgaggtagtgaacaagattaatcgggcaaacggcaagtctacgagtcggatctttctcctgaccaacaacaatttactcctcgcagaccagaaatcgggacagatcaagtccgaggttccgctggtggacgtgaccaaggtaagcatgtcctcgcagaatgatggctttttcgctgtccatttaaaggagggttctgaagctgccagcaaaggagactttctgttctcctcagaccacttaatagaaatggccaccaagctctacaggaccactctgtcacagactaagcagaagctgaacatcgaaatcagtgacgaatttctagtccagtttaggcaggataaagtgtgtgttaaatttatccagggcaaccagaaaaatggatccgttccaacatgtaaaaggaagaacaacagacttctcgaggttgccgtgccttag

SEQ ID NO: 173188 - DNA, 492 bp, Artificial Sequence
  derived and/or modified sequence
atggcaaagatggaagttaaaacctctctgcttgataacatgataggagttggagacatggtactccttgaaccactcaatgaagagacctttattaacaacctgaaaaagcgctttgatcacagtgagatttacacatacatagggtcagtcgtgatctctgtgaatccgtatcgatccctgccgatctacagtcccgagaaggtggaggagtataggaataggaatttctacgagctgtcgccacacatcttcgcactgtccgatgaagcgtacaggtcactccgagaccaggacaaggaccagtgtattttaatcaccggagaatctggggctggaaagacagaagcaagcaaactcgttatgtcgtatgtagctgcagtgtgtggaaagggggcagaggtgaaccaagtgaaagagcagctgctccaatccaacccagtgttggaggccttcggcaacgcaaagacagttcggaacgacaattcatag

SEQ ID NO: 173189 - DNA, 450 bp, Artificial Sequence
  derived and/or modified sequence
atggccaagatggaggtgaagacaagcctgttggataatatgattggagtgggtgatatggtcctacttgagccattaaatgaggaaacgttcatcaacaacctgaagaagaggttcgaccactcggagatctatacctatattgggtctgtggtgattagcgtgaatccttataggtctctgccaatctacagccccgagaaggttgaggagtataggaatcgtaacttctacgagttatcgccacacatctttgcactgagcgatgaggcataccggtcgctaagggaccaggacaaggatcaatgcattctcatcactggtgagagcggggctgggaaaacagaagctagcaaactcgtcatgagttacgtggctgccgtttgtggaaagggggctgaggttaatcaggtgaaagagcagctcttgcaatcaaatcccgtgctgtag

SEQ ID NO: 173190 - DNA, 924 bp, Artificial Sequence
  derived and/or modified sequence
atggccaaaatggaagtgaaaacgtctctcttggacaatatgattggggtgggcgatatggtgctgctagagcctcttaacgaagagacatttattaataacttgaagaagcgcttcgaccacagtgagatttatacctacattggaagtgtggtaattagcgtgaatccttataggagtctcccaatctacagcccagaaaaggtcgaggagtaccgcaacagaaacttttacgagctgagtccccacatctttgctctgagcgacgaagcttaccgtagccttcgggaccaagataaagatcagtgtattcttatcactggcgagagcggtgcaggaaagaccgaggcttccaaactggtgatgtcctacgtggctgctgtttgtggtaaaggggctgaggtgaatcaagtgaaagaacaattgctccaaagcaacccagtcctagaagcctttggcaatgcaaagactgtcagaaatgacaatagctcacgcttcgggaagtacatggacattgagtttgattttaaaggtgatcctctgggcggtgtgatctccaactatcttcttgaaaaatcacgggtggtcaagcaaccacgtggggaacgaaacttccacgtgttctaccagcttctgtctggggctagcgaggaactcttgaataagctcaaactggaaagggatttctcacgctacaattatctgtctctggatagcgccaaagtcaacggcgtcgacgatgcagctaacttcagaacggtgcggaatgctatgcaaatagtcgggtttatggatcatgaggcggagtctgtgctggctgtagttgccgcagtcttgaagctcgggaatattgagttcaagccagaatcccgggtgaacggactggacgagtccaaaattaaggacaaaaacgagtccaagtag

SEQ ID NO: 173191 - DNA, 912 bp, Artificial Sequence
  derived and/or modified sequence
atggccaagatggaagtcaagacctccctgctggataacatgatcggggtgggggacatggttttgctggaaccactgaacgaagagaccttcattaataatctgaaaaagagattcgaccatagcgaaatctacacgtacatcggatccgttgttatttccgtgaacccttacaggagcctgccaatttactcaccagaaaaggtagaagagtatcggaacaggaatttctatgaattgtcccctcacatatttgctctgtcagatgaggcctacaggagccttcgggaccaggataaggaccagtgcattttgataacaggagaatccggggctggaaagacagaagcctctaagctagtgatgtcttatgtggccgcagtgtgtggaaaaggggctgaagtcaaccaggttaaagagcagttattacaatcaaacccagttttggaggcttttgggaatgccaaaacagtgagaaatgacaatagctctcggtttggcaagtacatggatatcgagtttgatttcaaaggagatcccctcggaggtgtgatctcgaattacctgctggaaaagtccagggtggtgaaacaacctcgaggggagcgcaatttccatgtcttctatcagctactgtcaggagcctcagaggaactgctgaataaactgaagctcgagagagacttcagtcgatataactacttgagtctggattctgccaaagtgaacggtgtggacgatgccgctaacttcaggaccgtgcgaaatgctatgcagatcgtgggcttcatggaccacgaggcagagtccgtgctagcagtggtggctgcagtgttaaagcttggcaacatcgaattcaagcctgaaagccgggtgaacggactggacgagtccaaaattaaggacaaatag

SEQ ID NO: 173192 - DNA, 3237 bp, Artificial Sequence
  derived and/or modified sequence
atggccaagatggaggtgaagaccagcctgctggacaacatgatcggcgtgggcgacatggtgctgctggagcccctgaacgaggagaccttcatcaacaacctgaagaagagattcgaccacagcgagatctacacctacatcggcagcgtggtgatcagcgtgaacccctacagaagcctgcccatctacagccccgagaaggtggaggagtacagaaacagaaacttctacgagctgagcccccacatcttcgccctgagcgacgaggcctacagaagcctgagagaccaggacaaggaccagtgcatcctgatcaccggcgagagcggcgccggcaagaccgaggccagcaagctggtgatgagctacgtggccgccgtgtgcggcaagggcgccgaggtgaaccaggtgaaggagcagctgctgcagagcaaccccgtgctggaggccttcggcaacgccaagaccgtgagaaacgacaacagcagcagattcggcaagtacatggacatcgagttcgacttcaagggcgaccccctgggcggcgtgatcagcaactacctgctggagaagagcagagtggtgaagcagcccagaggcgagagaaacttccacgtgttctaccagctgctgagcggcgccagcgaggagctgctgaacaagctgaagctggagagagacttcagcagatacaactacctgagcctggacagcgccaaggtgaacggcgtggacgacgccgccaacttcagaaccgtgagaaacgccatgcagatcgtgggcttcatggaccacgaggccgagagcgtgctggccgtggtggccgccgtgctgaagctgggcaacatcgagttcaagcccgagagcagagtgaacggcctggacgagagcaagatcaaggacaagaacgagctgaaggagatctgcgagctgaccggcatcgaccagagcgtgctggagagagccttcagcttcagaaccgtggaggccaagcaggagaaggtgagcaccaccctgaacgtggcccaggcctactacgccagagacgccctggccaagaacctgtacagcagactgttcagctggctggtgaacagaatcaacgagagcatcaaggcccagaccaaggtgagaaagaaggtgatgggcgtgctggacatctacggcttcgagatcttcgaggacaacagcttcgagcagttcatcatcaactactgcaacgagaagctgcagcagatcttcatcgagctgaccctgaaggaggagcaggaggagtacatcagagaggacatcgagtggacccacatcgactacttcaacaacgccatcatctgcgacctgatcgagaacaacaccaacggcatcctggccatgctggacgaggagtgcctgagacccggcaccgtgaccgacgagaccttcctggagaagctgaaccaggtgtgcgccacccaccagcacttcgagagcagaatgagcaagtgcagcagattcctgaacgacaccagcctgccccacagctgcttcagaatccagcactacgccggcaaggtgctgtaccaggtggagggcttcgtggacaagaacaacgacctgctgtacagagacctgagccaggccatgtggaaggccagccacgccctgatcaagagcctgttccccgagggcaaccccgccaagatcaacctgaagagaccccccaccgccggcagccagttcaaggccagcgtggccaccctgatgaagaacctgcagaccaagaaccccaactacatcagatgcatcaagcccaacgacaagaaggccgcccacatcttcaacgaggccctggtgtgccaccagatcagatacctgggcctgctggagaacgtgagagtgagaagagccggctacgccttcagacaggcctacgagccctgcctggagagatacaagatgctgtgcaagcagacctggccccactggaagggccccgccagaagcggcgtggaggtgctgttcaacgagctggagatccccgtggaggagtacagcttcggcagaagcaagatcttcatcagaaaccccagaaccctgttcaagctggaggacctgagaaagcagagactggaggacctggccaccctgatccagaagatctacagaggctggaagtgcagaacccacttcctgctgatgaagaagagccagatcgtgatcgccgcctggtacagaagatacgcccagcagaagagataccagcagaccaagagcagcgccctggtgatccagagctacatcagaggctggaaggccagaaagatcctgagagagctgaagcaccagaagagatgcaaggaggccgtgaccaccatcgccgcctactggcacggcacccaggtgagaagagagtacagaaagttcttcagagccaacgccggcaagaagatctacgagttcaccctgcagagaatcgtgcagaagtacttcctggagatgaagaacaagatgcccagcctgagccccatcgacaagaactggcccagcagaccctacctgttcctggacagcacccacaaggagctgaagagaatcttccacctgtggagatgcaagaagtacagagaccagttcaccgaccagcagaagctgatctacgaggagaagctggaggccagcgagctgttcaaggacaagaaggccctgtaccccagcagcgtgggccagcccttccagggcgcctacctggagatcaacaagaaccccaagtacaagaagctgaaggacgccatcgaggagaagatcatcatcgccgaggtggtgaacaagatcaacagagccaacggcaagagcaccagcagaatcttcctgctgaccaacaacaacctgctgctggccgaccagaagagcggccagatcaagagcgaggtgcccctggtggacgtgaccaaggtgagcatgagcagccagaacgacggcttcttcgccgtgcacctgaaggagggcagcgaggccgccagcaagggcgacttcctgttcagcagcgaccacctgatcgagatggccaccaagctgtacagaaccaccctgagccagaccaagcagaagctgaacatcgagatcagcgacgagttcctggtgcagttcagacaggacaaggtgtgcgtgaagttcatccagggcaaccagaagaacggcagcgtgcccacctgcaagagaaagaacaacagactgctggaggtggccgtgccctag

SEQ ID NO: 173193 - DNA, 492 bp, Artificial Sequence
  derived and/or modified sequence
atggccaagatggaggtgaagaccagcctgctggacaacatgatcggcgtgggcgacatggtgctgctggagcccctgaacgaggagaccttcatcaacaacctgaagaagagattcgaccacagcgagatctacacctacatcggcagcgtggtgatcagcgtgaacccctacagaagcctgcccatctacagccccgagaaggtggaggagtacagaaacagaaacttctacgagctgagcccccacatcttcgccctgagcgacgaggcctacagaagcctgagagaccaggacaaggaccagtgcatcctgatcaccggcgagagcggcgccggcaagaccgaggccagcaagctggtgatgagctacgtggccgccgtgtgcggcaagggcgccgaggtgaaccaggtgaaggagcagctgctgcagagcaaccccgtgctggaggccttcggcaacgccaagaccgtgagaaacgacaacagctag

SEQ ID NO: 173194 - DNA, 450 bp, Artificial Sequence
  derived and/or modified sequence
atggccaagatggaggtgaagaccagcctgctggacaacatgatcggcgtgggcgacatggtgctgctggagcccctgaacgaggagaccttcatcaacaacctgaagaagagattcgaccacagcgagatctacacctacatcggcagcgtggtgatcagcgtgaacccctacagaagcctgcccatctacagccccgagaaggtggaggagtacagaaacagaaacttctacgagctgagcccccacatcttcgccctgagcgacgaggcctacagaagcctgagagaccaggacaaggaccagtgcatcctgatcaccggcgagagcggcgccggcaagaccgaggccagcaagctggtgatgagctacgtggccgccgtgtgcggcaagggcgccgaggtgaaccaggtgaaggagcagctgctgcagagcaaccccgtgctgtag

SEQ ID NO: 173195 - DNA, 924 bp, Artificial Sequence
  derived and/or modified sequence
atggccaagatggaggtgaagaccagcctgctggacaacatgatcggcgtgggcgacatggtgctgctggagcccctgaacgaggagaccttcatcaacaacctgaagaagagattcgaccacagcgagatctacacctacatcggcagcgtggtgatcagcgtgaacccctacagaagcctgcccatctacagccccgagaaggtggaggagtacagaaacagaaacttctacgagctgagcccccacatcttcgccctgagcgacgaggcctacagaagcctgagagaccaggacaaggaccagtgcatcctgatcaccggcgagagcggcgccggcaagaccgaggccagcaagctggtgatgagctacgtggccgccgtgtgcggcaagggcgccgaggtgaaccaggtgaaggagcagctgctgcagagcaaccccgtgctggaggccttcggcaacgccaagaccgtgagaaacgacaacagcagcagattcggcaagtacatggacatcgagttcgacttcaagggcgaccccctgggcggcgtgatcagcaactacctgctggagaagagcagagtggtgaagcagcccagaggcgagagaaacttccacgtgttctaccagctgctgagcggcgccagcgaggagctgctgaacaagctgaagctggagagagacttcagcagatacaactacctgagcctggacagcgccaaggtgaacggcgtggacgacgccgccaacttcagaaccgtgagaaacgccatgcagatcgtgggcttcatggaccacgaggccgagagcgtgctggccgtggtggccgccgtgctgaagctgggcaacatcgagttcaagcccgagagcagagtgaacggcctggacgagagcaagatcaaggacaagaacgagagcaagtag

SEQ ID NO: 173196 - DNA, 912 bp, Artificial Sequence
  derived and/or modified sequence
atggccaagatggaggtgaagaccagcctgctggacaacatgatcggcgtgggcgacatggtgctgctggagcccctgaacgaggagaccttcatcaacaacctgaagaagagattcgaccacagcgagatctacacctacatcggcagcgtggtgatcagcgtgaacccctacagaagcctgcccatctacagccccgagaaggtggaggagtacagaaacagaaacttctacgagctgagcccccacatcttcgccctgagcgacgaggcctacagaagcctgagagaccaggacaaggaccagtgcatcctgatcaccggcgagagcggcgccggcaagaccgaggccagcaagctggtgatgagctacgtggccgccgtgtgcggcaagggcgccgaggtgaaccaggtgaaggagcagctgctgcagagcaaccccgtgctggaggccttcggcaacgccaagaccgtgagaaacgacaacagcagcagattcggcaagtacatggacatcgagttcgacttcaagggcgaccccctgggcggcgtgatcagcaactacctgctggagaagagcagagtggtgaagcagcccagaggcgagagaaacttccacgtgttctaccagctgctgagcggcgccagcgaggagctgctgaacaagctgaagctggagagagacttcagcagatacaactacctgagcctggacagcgccaaggtgaacggcgtggacgacgccgccaacttcagaaccgtgagaaacgccatgcagatcgtgggcttcatggaccacgaggccgagagcgtgctggccgtggtggccgccgtgctgaagctgggcaacatcgagttcaagcccgagagcagagtgaacggcctggacgagagcaagatcaaggacaagtag

SEQ ID NO: 173197 - protein, 1258 aa, Artificial Sequence
  derived and/or modified sequence
MEKYVRLQKIGEGSFGKAILVKSTEDGRQYVIKEINISRMSSKEREESRREVAVLANMKHPNIVQYRESFEENGSLYIVMDYCEGGDLFKRINAQKGVLFQEDQILDWFVQICLALKHVHDRKILHRDIKSQNIFLTKDGTVQLGDFGIARVLNSTVELARTCIGTPYYLSPEICENKPYNNKSDIWALGCVLYELCTLKHAFEAGSMKNLVLKIISGSFPPVSLHYSYDLRSLVSQLFKRNPRDRPSVNSILEKGFIAKRIEKFLSPQLIAEEFCLKTFSKFGSQPIPAKRPASGQNSISVMPAQKITKPAAKYGIPLAYKKYGDKKLHEKKPLQKHKQAHQTPEKRVNTGEERRKISEEAARKRRLEFIEKEKKQKDQIISLMKAEQMKRQEKERLERINRAREQGWRNVLSAGGSGEVKAPFLGSGGTIAPSSFSSRGQYEHYHAIFDQMQQQRAEDNEAKWKREIYGRGLPERGILPGVRPGFPYGAAGHHHFPDADDIRKTLKRLKAVSKQANANRQKGQLAVERAKQVEEFLQRKREAMQNKARAEGHMVYLARLRQIRLQNFNERQQIKAKLRGEKKEANHSEGQEGSEEADMRRKKIESLKAHANARAAVLKEQLERKRKEAYEREKKVWEEHLVAKGVKSSDVSPPLGQHETGGSPSKQQMRSVISVTSALKEVGVDSSLTDTRETSEEMQKTNNAISSKREILRRLNENLKAQEDEKGKQNLSDTFEINVHEDAKEHEKEKSVSSDRKKWEAGGQLVIPLDELTLDTSFSTTERHTVGEVIKLGPNGSPRRAWGKSPTDSVLKILGEAELQLQTELLENTTIRSEISPEGEKYKPLITGEKKVQCISHEINPSAIVDSPVETKSPEFSEASPQMSLKLEGNLEEPDDLETEILQEPSGTNKDESLPCTITDVWISEEKETKETQSADRITIQENEVSEDGVSSTVDQLSDIHIEPGTNDSQHSKCDVDKSVQPEPFFHKVVHSEHLNLVPQVQSVQCSPEESFAFRSHSHLPPKNKNKNSLLIGLSTGLFDANNPKMLRTCSLPDLSKLFRTLMDVPTVGDVRQDNLEIDEIEDENIKEGPSDSEDIVFEETDTDLQELQASMEQLLREQPGEEYSEEEESVLKNSDVEPTANGTDVADEDDNPSSESALNEEWHSDNSDGEIASECECDSVFNHLEELRLHLEQEMGFEKFFEVYEKIKAIHEDEDENIEICSKIVQNILGNEHQHLYAKILHLVMADGAYQEDNDE

SEQ ID NO: 173198 - DNA, 3777 bp, Artificial Sequence
  derived and/or modified sequence
atggagaagtacgtccgcctacaaaaaatcggcgaagggtcattcggaaaagctatactcgtgaagtctactgaagacggccgccagtacgttattaaggagattaacatctcccggatgagctccaaggagcgcgaggaatcacggcgagaggtcgccgtgttagcaaacatgaagcatcccaatatcgtgcagtacagggaaagcttcgaggagaacgggagtctctatattgttatggactattgtgaaggaggtgacctctttaagagaatcaacgcgcagaaaggagtcctgttccaggaggaccagatcctggactggttcgtccagatttgcttagcactgaaacacgttcacgacaggaaaattcttcaccgtgacatcaaatctcagaacatctttctgactaaggacggtaccgtccagctgggggatttcgggattgctcgggtgctgaacagtacggtcgaactcgctcggacctgtatcggcacaccctattacctttcacccgagatatgtgaaaataagccctacaataacaaatcagacatttgggcactgggatgcgtcctgtacgagctgtgcaccttgaaacatgccttcgaggcaggctccatgaagaacctagtgctgaaaataatttccgggagctttccgcccgtcagcctgcattactcttacgatctgcgatccctcgtgtctcagcttttcaaacgcaaccccagagacaggccttccgttaactcaatattggagaaggggtttattgcgaagcgaatcgaaaagtttctgagcccacagctgattgccgaggaattttgtcttaagacattcagcaaattcgggagtcagcccatacccgccaagcggcctgcaagtggacagaacagcatttcggttatgccagcccagaagatcacgaagcccgcagcaaagtatggcattcctctggcttacaagaagtatggcgacaaaaaactgcacgaaaagaaacccctacagaagcacaagcaggcacaccagacccccgagaaacgggttaacaccggcgaagagaggcggaagatctccgaggaggctgcccgaaagagacggctagagttcattgagaaggaaaagaaacagaaagatcagataatttccctgatgaaggcagaacaaatgaagcgccaggaaaaagagcggctagagagaattaatcgtgcacgagaacagggatggcgtaacgtactgagcgccggcggtagtggagaggtgaaagctcctttcctggggtcaggtggcacaatcgcacccagctctttctcttcacggggtcagtacgagcactatcatgccatcttcgatcagatgcagcagcagcgagctgaagataacgaagcaaaatggaagagggagatctacgggcgggggctgcctgaaagaggaattctgccaggagtccgaccaggattcccttatggagcagcgggtcaccatcactttccggacgccgacgatataagaaaaacacttaagcggctgaaggcggtcagcaaacaggccaacgctaatcggcagaaaggtcagctcgcagtcgagcgggccaaacaggtggaggaattccttcaaaggaagagggaagcgatgcaaaataaggcccgggccgagggccacatggtctatttggctcggcttcgccaaatcagactacagaacttcaacgagaggcagcaaatcaaggccaaactgcggggggaaaaaaaagaggcaaaccattccgaaggccaggaaggttcagaagaggctgatatgagacgcaagaagattgagagccttaaggcccacgctaacgctagagcggctgtgcttaaagagcagctggaacgaaagagaaaagaagcttacgagagggaaaaaaaggtctgggaagagcatcttgttgccaaaggcgtcaaatcatctgacgtctcccctcccttgggccaacatgagaccggggggtcccctagtaagcagcaaatgcggtcagtgattagtgtgacctcagctcttaaggaggtgggcgtggacagctccctaaccgacactagggagaccagcgaagaaatgcagaaaacaaacaatgccatatcaagcaaacgcgagatccttcgcagacttaacgaaaatctgaaagcccaagaggacgagaaagggaaacaaaacctctccgataccttcgaaatcaacgtgcacgaggacgctaaggagcacgagaaggagaaatcagtgagtagcgaccggaagaaatgggaagctggcggacagttagtgatacccctcgacgagttgactttggacacatcatttagcacaaccgaacgccacactgtaggtgaggtgatcaaacttggaccaaacggttctcccagacgcgcgtgggggaaaagtccgactgatagcgtattaaaaattctgggcgaggctgaactgcaactgcagaccgaacttttagagaacacaacaatccggtctgagatttctcccgagggagagaagtacaaaccactgatcaccggagagaaaaaagtccagtgcatctcccacgagatcaacccatccgcaattgtagactcccccgtggagaccaagagcccggaattctctgaggcctctcctcagatgagcctcaaactggagggaaacctggaggagcctgacgaccttgagaccgagatactccaggagccgagcggaacaaataaggatgagtcacttccttgtaccatcaccgacgtctggatatctgaggagaaggaaactaaagagacgcagagtgctgaccgaattacaatacaagagaacgaggtgtcagaagacggcgtctctagcaccgtggaccagctttccgatattcatattgaacctgggactaacgattcgcagcactccaaatgcgacgtcgataagtcggtgcagcctgagcccttctttcacaaagttgtccacagcgagcacctaaaccttgtgccccaggtacagtcagtgcaatgcagtcctgaagagagctttgcctttcgaagccacagccatttgcctcccaaaaacaaaaacaaaaattcattgttaattggtctaagtactggcctgtttgacgccaataaccctaaaatgcttcggacttgttcccttcctgatctgtctaagctctttcggaccctcatggatgtgcccaccgtgggcgatgtcagacaagacaaccttgaaattgatgaaattgaggacgagaatatcaaagagggcccctccgacagcgaggatatcgtgtttgaggagaccgacactgacctccaggagcttcaagccagcatggaacaactgttgcgagagcagccgggggaggaatacagcgaggaagaagagagcgttcttaagaatagtgatgtcgagccaacggccaacggtacagatgtggcagatgaggatgataatccaagcagtgagtcagctctgaatgaggaatggcattctgacaattctgatggcgaaattgcctctgaatgtgagtgcgactccgtatttaatcacctggaagaactcaggctgcatctggagcaggagatgggctttgagaaattttttgaggtgtacgagaagatcaaggccatccacgaggatgaggacgaaaatatcgagatatgcagtaaaattgtacaaaatatcctcggcaatgagcaccagcacctatatgcaaaaattttacacttggtcatggccgacggggcataccaggaggacaacgacgagtag

SEQ ID NO: 173199 - DNA, 3777 bp, Artificial Sequence
  derived and/or modified sequence
atggagaagtatgtgcggctgcagaagatcggggagggcagctttgggaaggccatcctggtgaagagcacagaagatggccggcagtatgtgatcaaggagatcaacatcagcaggatgagcagcaaggagcgggaggagagcagaagagaggtggccgtgctggccaacatgaagcaccccaacatcgtgcagtaccgggagagctttgaggagaatggcagcctgtacatcgtgatggactactgtgagggcggggacctcttcaagaggatcaatgcccagaagggcgtgctcttccaggaggaccagatcctggactggtttgtgcagatctgcctggccctgaagcacgtgcatgacaggaagatcctgcaccgggacatcaagagccagaacatcttcctgaccaaggatggcaccgtgcagctgggggactttggaattgcccgggtgctgaacagcacagtggagctggcccggacctgcatcggcaccccctactacctgagccctgagatctgtgagaacaagccctacaacaacaagagtgacatctgggccctgggctgtgtgctgtatgagctgtgcaccctgaagcacgcctttgaagctggctccatgaagaacctggtgctgaagatcatcagcggcagcttcccccctgtgtccctgcactacagctatgacctgcggagcctggtgtcccagctgttcaagaggaacccccgggaccggcccagcgtgaacagcatcctggagaagggcttcatcgccaagagaattgagaagttcctgagcccccagctgattgctgaggagttctgcctgaagaccttcagcaagtttggcagccagcccatcccagccaagaggcctgccagcggccagaacagcatctctgtgatgcctgcccagaagatcaccaagccagctgccaagtatggcatccccctggcctacaagaagtacggggacaagaagctgcacgagaagaagcccctgcagaagcacaagcaggcccaccagaccccagagaagagggtgaacacaggagaggagaggaggaagatcagcgaggaggccgccaggaagaggcggctggagttcatcgagaaggagaagaagcagaaggaccagatcatcagcctgatgaaggccgagcagatgaagaggcaggagaaggagcggctggagcgcatcaacagagcccgggagcagggctggagaaatgtgctgtctgctgggggcagcggggaggtgaaggcccccttcctgggcagcggcggcaccatcgcccccagcagcttcagcagccggggccagtatgagcactaccacgccatctttgaccagatgcagcagcagagagcagaagataatgaggccaagtggaagcgggagatctacggccggggcctgcctgagcggggcatcctgcccggggtgcggcccggcttcccctatggagctgctggccaccaccacttcccagatgctgatgacatcaggaagaccctgaagaggctgaaggctgtgtccaagcaggccaatgccaaccggcagaagggccagctggccgtggagcgggccaagcaggtggaggagttcctgcagaggaagcgggaggccatgcagaacaaggcccgggcagagggccacatggtgtacctggcccggctgcggcagatccggctgcagaacttcaatgaaaggcagcagatcaaggccaagctgcggggggagaagaaggaggccaaccacagcgagggccaggagggcagcgaggaggccgacatgaggaggaagaagattgagagcctgaaggcccacgccaatgcccgggctgctgtgctgaaggagcagctggagaggaagaggaaggaggcctatgagcgggagaagaaggtgtgggaggagcacctggtggccaagggcgtgaagagcagtgatgtgagcccccccctgggccagcatgaaacaggaggcagccccagcaagcagcagatgaggagcgtcatctctgtgaccagcgccctgaaggaggtgggcgtggacagcagcctgacagacacccgggagaccagcgaggagatgcagaagaccaacaatgccatcagcagcaagcgggagatcctgcggcggctgaatgaaaacctgaaggcccaggaggatgagaagggcaagcagaacctgagtgacacctttgagatcaacgtgcatgaagatgccaaggagcacgagaaggagaagtctgtgtccagtgacaggaagaagtgggaggccggcggccagctggtgatccccctggatgagctgaccctggacaccagcttcagcaccacagagcggcacacagtgggggaggtgatcaagctgggccccaacggcagcccccggcgggcctggggcaagagccccacagacagcgtgctgaagatcctgggggaggccgagctgcagctgcagacagagctgctggagaacaccaccatccgctctgagatcagccctgagggggagaagtacaagcccctcatcaccggggagaagaaggtgcagtgcatcagccatgagatcaaccccagcgccatcgtggacagccctgtggagaccaagagccctgagttcagcgaggccagcccccagatgagcctgaagctggagggcaacctggaggagccagatgacctggagacagagatcctgcaggagcccagcggcaccaacaaggatgagagcctgccctgcaccatcacagatgtgtggatcagcgaggagaaggagaccaaggagacccagagcgctgaccgcatcaccatccaggagaatgaggtgtctgaagatggagtgagcagcacagtggaccagctgagtgacatccacatcgagcccggcaccaatgacagccagcacagcaaatgtgatgtggacaagtctgtgcagcctgagcccttcttccacaaggtggtgcacagcgagcacctgaacctggtgccccaggtgcagagcgtgcagtgcagccctgaggagagctttgccttccgcagccacagccacctgccccccaagaacaagaacaagaacagcctgctgattggcctgagcacaggcctgtttgatgccaacaaccccaagatgctgcggacctgcagcctgcctgacctgagcaagctgttccgcaccctgatggatgtgcccaccgtgggagatgtgcggcaggacaacctggagattgatgaaattgaagatgagaacatcaaggagggccccagcgacagtgaagatattgtgtttgaggagacagacacagacctgcaggagctgcaggcctccatggagcagctgctgcgggagcagcctggagaggagtacagcgaggaggaggagagcgtgctgaagaacagtgatgtggagcccacagccaatggaacagatgtggctgatgaagatgacaaccccagcagcgagagcgccctgaatgaggagtggcacagcgacaacagtgatggagaaattgcctctgaatgtgaatgtgacagcgtcttcaaccacctggaggagctgcggctgcacctggagcaggagatgggctttgagaagttctttgaggtgtatgagaagatcaaggccatccatgaagatgaagatgagaacatcgagatctgcagcaagatcgtgcagaacatcctgggcaatgagcaccagcacctgtatgccaagatcctgcacctggtgatggctgatggagcctaccaggaggacaatgatgaatag

SEQ ID NO: 173200 - DNA, 3777 bp, Artificial Sequence
  derived and/or modified sequence
atggagaagtacgtgcggctgcagaagatcggcgagggcagcttcggcaaagccatcctggtgaagtctaccgaagatgggcgacagtacgtgatcaaggaaataaatatcagcaggatgtcttccaaggagcgcgaagagtccaggagagaggtggcagtgttggcgaacatgaaacacccgaatattgtgcagtatagagagtcctttgaagagaacgggagcctttatattgtgatggattactgtgaaggcggagatttatttaagcggattaatgctcaaaagggggtactgtttcaagaggatcagattctagactggtttgttcaaatttgtctcgctttgaagcatgtgcacgatcgaaaaattctccatcgagatattaaaagccaaaatatcttcctgacaaaagatggtacagtgcaactgggcgacttcggtatagctcgggtactgaattcgacggttgaactggctcggacttgtatcggcactccttattatctgtcgcctgagatatgtgagaataaaccctacaacaacaaatcagacatttgggctctcgggtgtgtcctctacgagctctgtactctcaagcatgcatttgaggcagggtccatgaaaaatctggtgctcaaaataataagcgggagctttcccccggtgagtctgcactactcatacgacctgaggtcactggtaagtcagctctttaaacgcaatcccagagaccgcccatctgtgaacagtatattagaaaagggatttattgcaaaaaggatcgagaagtttttatccccccaattaattgcagaggagttctgtctcaagactttttcgaagtttggctcacaacctataccagccaaaagacccgcatcgggtcagaactcgatctctgtaatgccagcacagaagattaccaaacccgcagccaaatacgggattccactggcgtataagaaatacggggacaagaagctgcacgagaagaagcctcttcagaaacataaacaagctcaccagactccggaaaaacgcgtgaacaccggcgaagaacgccgcaagatcagtgaagaggccgctcgcaaaagaagacttgagtttattgagaaggagaaaaaacaaaaagatcaaataatatccctgatgaaagctgaacagatgaagcggcaggaaaaggagagactggaaaggatcaatagagccagagagcaaggctggagaaatgtcttgagtgccggcgggagcggagaggtgaaagcaccctttctcggttctggagggacaattgccccttcttcctttagctcacgcgggcagtatgaacattatcatgcaatcttcgaccaaatgcagcagcagagagcagaagacaatgaggccaaatggaaacgggaaatttacgggcggggactgcccgagcgcgggattctgcctggtgtgcgacctggatttccatacggagcggcaggacaccatcactttcccgatgctgatgatatacggaaaactttgaaacgcctgaaggctgtctccaagcaggctaacgctaataggcagaaggggcaactcgccgtggagcgggccaagcaggtagaggagttcttgcaacggaagagggaagccatgcagaacaaggctcgagcagagggacatatggtgtatctcgcgcgactgagacagatccgtctgcagaattttaacgaacgacaacagattaaggctaagctgcgcggagagaagaaagaagccaatcactccgaaggtcaggagggcagtgaggaggccgacatgcggagaaagaagatcgaaagcctgaaagcgcacgccaacgctcgtgccgccgtgctgaaagagcagctggaacgcaaaaggaaagaagcctatgagcgggagaaaaaagtctgggaagaacacctggtcgctaaaggggtgaaaagttctgatgttagccctccactgggtcaacacgaaacaggtggctctccaagcaagcagcagatgcgctctgtgatctctgttactagtgcgctgaaggaagtcggagtggactccagcctcactgacacccgcgaaacatccgaagagatgcagaagactaacaatgccatcagttcgaagcgggagatcctcagacggctcaacgagaatttgaaagcccaagaggacgagaaaggaaagcagaacctgagcgataccttcgaaattaatgtacacgaggatgctaaagaacacgagaaggagaagtcagtgagctctgaccgcaagaagtgggaggccggaggccagctcgtgattccgctcgacgaacttacgttagatacgtcattttccactactgagcgccataccgtcggggaggtgataaagttagggccgaacggcagcccacgacgagcatggggcaaatctcccaccgattctgtcctaaagattttaggggaagcagagcttcagcttcaaaccgagctcctggagaacaccacaattcgatccgaaatcagcccagagggtgaaaagtataagccgctcattactggcgagaagaaggtgcagtgcattagtcacgagattaacccaagcgccatagtagactcacccgtggaaacaaagtctccagaattctctgaagctagccctcaaatgtctctgaagctggaaggtaacctggaagaacctgatgacctggaaacagaaatcctgcaggagcctagtggaaccaacaaggatgaaagcctgccttgcacgattacggacgtatggataagcgaagaaaaggagactaaggaaacacaatccgcagacaggattacaattcaggaaaacgaagtctccgaagacggcgtgtcctcaaccgtggatcagctttctgacatccatatcgaacccggcaccaacgactcacagcacagtaagtgtgacgtggataagagcgtccagcccgagcccttttttcataaagtggtccattctgagcacctgaacctcgtgcctcaggtccagtcagtgcaatgttcacccgaggaaagtttcgcattcaggagtcactctcatctgcctcctaagaacaaaaataaaaactcactcttgatcggactctccaccggcctgttcgacgctaacaaccctaagatgctgcgcacatgctctctgcccgaccttagcaaattgtttaggacccttatggacgtgccaactgtaggcgatgtgcgacaggataatctggaaattgacgagattgaagacgagaacattaaggagggtcccagcgattcggaggacatcgtgtttgaggaaaccgatacagatctgcaggagttgcaggccagcatggagcagctcctgcgcgaacaaccgggcgaagagtattccgaagaggaagaaagtgtccttaagaacagcgatgtcgagccgaccgctaacgggacagatgtggcggacgaagatgataacccatccagcgagagcgcattgaatgaagaatggcactccgataactctgatggcgaaattgcatctgaatgtgaatgcgatagcgttttcaaccatctcgaagagcttcgattgcacctcgaacaagaaatgggcttcgaaaagttctttgaggtttatgagaagataaaggccatccacgaagacgaggatgaaaatattgagatttgctccaagattgtccagaatatattgggaaacgaacaccagcatctctatgctaaaattctgcacctcgtgatggcggatggcgcatatcaagaagataacgatgaatag

SEQ ID NO: 173201 - DNA, 5653 bp, Artificial Sequence
  derived and/or modified sequence
gtgacgcgccggccgctctcccttagtccgcattcgctccagggttttgggaccctaggttgcggagtccttaccctaccctggcctctcgagcagttgtccccataactcggaatctagagccgctgttgcgaggcaggagcacgtggcagtcaagtagcttcccagtcccgaacgccgcccgtccccaccccgccgtggccactagcaacgacctctgtgaagttggagaggcggtaacggaggcactccccctgctgcaccccgccgtttctacggggctcagaaaccagtttgtttgtttcgtcggggtagtgtcgacctgtcttacgggcgtcgcccgagacaggacggagtcaaacccgtggtatcaactgaagacgagtgtcaggtgtggagagtctcagtgccccctttcagtctggactgtgagctgctgctggttagacagtcttggtttctctttcaggatgtcattttcaaaatgcgggatggtacctctgctttattaagccccgtaggaagactgccacacctagactgatgcttattagtcatcaccgttattcctactaacgtcctgtgtcactgagttttttaaatgtctagcatatctgtaaagatgccttagaaaaagaatcatggagaagtatgttagactacagaagattggagaaggttcatttggaaaagccattcttgttaaatctacagaagatggcagacagtatgttatcaaggaaattaacatctcaagaatgtccagtaaagaaagagaagaatcaaggagagaagttgcagtattggcaaacatgaagcatccaaatattgtccagtatagagaatcatttgaagaaaatggctctctctacatagtaatggattactgtgagggaggggatctgtttaagcgaataaatgctcagaaaggcgttttgtttcaagaggatcagattttggactggtttgtacagatatgtttggccctgaaacatgtacatgatagaaaaattcttcatcgagacattaaatctcagaacatatttttaactaaagatggaacagtacaacttggagattttggaattgctagagttcttaatagtactgtagagctggctcgaacttgcatagggaccccatactacttgtcacctgaaatctgtgaaaacaaaccttacaataataaaagtgacatttgggctctggggtgtgtcctttatgagctgtgtacacttaaacatgcttttgaagctggcagtatgaaaaacctggtactgaagataatatctggatcttttccacctgtgtctttgcattattcctatgatctccgcagtttggtgtctcagttatttaaaagaaatcctagggatagaccatcagtcaactccatattggagaaaggttttatagccaaacgcattgaaaagtttctctctcctcagcttattgcagaagaattttgtctaaaaacattttcgaagtttggatcacagcctataccagctaaaagaccagcttcaggacaaaactcgatttctgttatgcctgctcagaaaattacaaagcctgccgctaaatatggaatacctttagcatataagaaatatggagataaaaaattacacgaaaagaaaccactgcaaaaacataaacaggcccatcaaactccagagaagagagtgaatactggagaagaaaggaggaaaatatctgaggaagcagcaagaaagagaaggctggaatttattgaaaaagaaaagaaacaaaaggatcagattattagtttaatgaaggctgaacaaatgaaaaggcaagaaaaggaaaggttggaaagaataaatagggccagggaacaaggatggagaaatgtgctaagtgctggtggaagtggtgaagtaaaggctccttttctgggcagtggagggactatagctccatcatctttttcttctcgaggacagtatgaacattaccatgccatttttgaccaaatgcagcaacaaagagcagaagataatgaagctaaatggaaaagagaaatatatggtcgaggtcttccagaaagaggaattctgcctggagttcgtccaggatttccttatggggctgcaggtcatcaccattttcctgatgctgatgatattagaaaaactttgaaaagattgaaggcggtgtctaaacaagccaatgcaaacaggcaaaaagggcagctagctgtagaaagagctaaacaagtagaagagttcctgcagcgaaaacgggaagctatgcagaataaagctcgagccgaaggacatatggtttatctggcaagactgaggcaaataagactacagaatttcaatgagcgccaacagattaaagccaaacttcgtggtgaaaagaaagaagctaatcattctgaaggacaagaaggaagtgaagaggctgacatgaggcgcaaaaaaatcgaatcactgaaggcccatgcaaatgcacgtgctgctgtactaaaagaacaactagaacgaaagagaaaggaggcttatgagagagaaaaaaaagtgtgggaagagcatttggtggctaaaggagttaagagttctgatgtttctccacctttgggacagcatgaaacaggtggctctccatcaaagcaacagatgagatctgttatttctgtaacttcagctttgaaagaagttggcgtggacagtagtttaactgatacccgggaaacttcagaagagatgcaaaagaccaacaatgctatttcaagtaagcgagaaatacttcgtagattaaatgaaaatcttaaagctcaagaagatgaaaaaggaaagcagaatctctctgatacttttgagataaatgttcatgaagatgccaaagagcatgaaaaagaaaaatcagtttcatctgatcgcaagaagtgggaggcaggaggtcaacttgtgattcctctggatgagttaacactagatacatccttctctacaactgaaagacatacagtgggagaagttattaaattaggtcctaatggatctccaagaagagcctgggggaaaagtccgacagattctgttctaaagatacttggagaagctgaactacaacttcagacagaactattagaaaatacaactattagaagtgagatttctcccgaaggggaaaagtacaaacccttaattactggagaaaaaaaagtacaatgtatttcacatgaaataaacccatcagctattgttgattctcctgttgagacaaaaagtcccgagttcagtgaggcatctccacagatgtcattgaaactggaaggaaatttagaagaacctgatgatttggaaacagaaattctacaagagccaagtggaacaaacaaagatgagagcttgccatgcactattactgatgtgtggattagtgaggaaaaagaaacaaaggaaactcagtcggcagataggatcaccattcaggaaaatgaagtttctgaagatggagtctcgagtactgtggaccaacttagtgacattcatatagagcctggaaccaatgattctcagcactctaaatgtgatgtagataagtctgtgcaaccggaaccatttttccataaggtggttcattctgaacacttgaacttagtccctcaagttcaatcagttcagtgttcaccagaagaatcctttgcatttcgatctcactcgcatttaccaccaaaaaataaaaacaagaattccttgctgattggactttcaactggtctgtttgatgcaaacaacccaaagatgttaaggacatgttcacttccagatctctcaaagctgttcagaacccttatggatgttcccaccgtaggagatgttcgtcaagacaatcttgaaatagatgaaattgaagatgaaaacattaaagaaggaccttctgattctgaagacattgtgtttgaagaaactgacacagatttacaagagctgcaggcctcgatggaacagttacttagggaacaacctggtgaagaatacagtgaagaagaagagtcagtcttgaagaacagtgatgtggagccaactgcaaatgggacagatgtggcagatgaagatgacaatcccagcagtgaaagtgccctgaacgaagaatggcactcagataacagtgatggtgaaattgctagtgaatgtgaatgcgatagtgtctttaaccatttagaggaactgagacttcatctggagcaggaaatgggctttgaaaaattctttgaggtttatgagaaaataaaggctattcatgaagatgaagatgaaaatattgaaatttgttcaaaaatagttcaaaatattttgggaaatgaacatcagcatctttatgccaagattcttcatttagtcatggcagatggagcctaccaagaagataatgatgaataatcctcaaaatgttttttaatcctcaactatatgaaagcatttgaatttggcttatcagaataacaagcttcagtgggaaatacagcaattatttatttaaaaaatcagatttaagatggactttcttattgcatgaaaaagatggagaaacatgccatttttcagtgaagattctaatattttatctattttgttcattgaattccatggttaaatctcataaaatatatactttattaaatcatccaaccaaagcataggaaacattgacccagaacctgacttaatggttttgaagatttactatgcaatagggtaactttgagtttcagcaaatgtctttaggttgaaggaattacctatgtcatgaaggacctgtctgtggtttttcaatggagtctttaagcatgatcttttttctgtctagtacttgttttcattctggccagcagttctacattaaatcaccttgtcaagggctctgtttacatctatacattttgaagatgaaatttttagccttaaagtttatattctcaagtccttttacaatcagtgtgtctcctgaactagcacacaggctgtagaaacagtcttagaaatcattgaaagatttgattatgaaagaatagcaaaattatatttcttgacatataaaaagttggtttaatgcctttatttctctttaaggaccagaaccaggaatactatatcgaaaaattagtctgtggatttaacactgacttagcatatagcttaaagttgctcttttggtttttaacttcctccatacataagcttcaaggacaataagatgttaaaaaggaggaaataattatttttattttgacactgtgacagttttggtaactaggatcctagggagggaaatgtttgcctgttgaacttctttctgttatgagaggatttagttaggtcattaagatgttgatcacacagcttcaatcacaatatgccaagtataacctggtttcgttagaggtgtctacagtccagatgttcttcgtaataaaagcaaagtttttgaacctctgagtccaaagcaggctggttggcataatatgtaatttgaaaaataaaatcttatcttgcagcactatcagtatgttgaatttattatgtatattatttctaatatccgaaactaaatacttgattttttaatatgtgtgtttattttatgatattgctattaaatttttattatctacctg

SEQ ID NO: 173202 - DNA, 3777 bp, Artificial Sequence
  derived and/or modified sequence
atggagaaatacgtcaggctccagaaaatcggggaaggctcattcggtaaagccattctggtgaaaagtacagaagatggtcgtcagtatgtgataaaggaaatcaatatatctcgtatgtcctccaaggagcgcgaggagagccggcgtgaagtcgccgtgctggcgaacatgaagcaccccaacatcgtgcagtaccgcgagtccttcgaggagaacggaagtctttatatcgttatggactattgcgaaggaggagacctgttcaaacggattaatgcgcagaaaggcgtcctctttcaggaagatcaaatcctggactggtttgtacaaatttgtttagcactgaagcatgtccatgacagaaagattctgcacagggacatcaaatctcagaatatctttctgactaaagatggaactgtgcaactgggggactttggcatcgcgagggtgctgaattccacggtagaactggccaggacatgcattggcacgccctactatcttagcccagagatctgcgagaataagccatacaacaacaaaagtgatatttgggcgctcggctgcgtcctctacgagctgtgtactctgaaacatgctttcgaggccggtagcatgaagaatctggtgctcaaaatcatttcaggaagcttccccccagtgtcgttgcattactcatatgatcttcgtagtcttgtgtcacagctgttcaagcgaaacccgagagatcgaccgtccgtgaactcgatacttgaaaaaggtttcatagctaagcgcattgaaaagttccttagccctcagctcattgctgaggagttctgcttaaagacatttagcaagtttggctcccagcctatccctgccaaaaggccagcttccgggcagaactcaatctcagtgatgccagcccaaaagattaccaaaccagctgccaagtacggaattccgcttgcttataaaaaatacggtgacaagaaactccacgaaaaaaaacctttacagaaacacaaacaggcacatcagacacccgaaaagcgggttaacacaggggaagaacgtagaaagatcagtgaggaagcggcaaggaaaagacggctggagtttatcgaaaaagagaaaaaacagaaagatcagatcatctcattaatgaaggcagagcagatgaaacgccaggagaaggagaggttggagagaatcaacagagcccgagaacagggctggagaaatgttttaagtgccggtgggtctggcgaagtgaaggcgcctttccttggctccgggggtaccattgctccgagcagcttttccagccggggtcaatatgagcactatcatgccatcttcgaccagatgcaacagcagagggccgaggacaacgaggccaagtggaaacgggaaatctatggaagagggttgccagagaggggtattctgccgggagtcagaccaggattcccgtacggcgcagcagggcatcaccactttcccgatgctgatgatattcgcaaaacactgaagcgccttaaggcggtctctaagcaggccaatgcaaatagacagaaaggtcagttagccgtcgagcgggctaagcaggtcgaagagtttctgcagaggaaacgcgaagccatgcagaataaagctcgtgccgaaggacatatggtctatctagctcgattgaggcagatacgcctgcagaactttaacgagcggcagcagataaaggcgaaacttcgaggcgagaagaaagaggccaatcactccgaaggccaagaggggtccgaggaggctgacatgagacgcaagaagatagagtctctgaaagcccatgctaatgccagggccgctgtgttgaaggagcagcttgagagaaaaagaaaagaggcttacgaacgtgaaaaaaaagtgtgggaggaacacctggtggccaaaggtgtgaaaagtagcgatgtgtcccctcctctgggacagcatgagactggagggtcaccatctaagcagcagatgcgctccgtcatttctgtgacctcagccctgaaggaggtcggcgtcgatagcagcctgaccgatactcgggagaccagcgaagaaatgcagaaaaccaacaacgcaatcagttccaaacgtgaaatccttcggaggctgaacgagaatctgaaggcacaggaggacgagaaagggaaacagaacctttcggacacatttgagattaatgtgcacgaagatgcaaaagagcacgagaaggagaagagcgtttccagcgatcgcaaaaaatgggaggcaggcggacagcttgtgattcccctggatgagctgacactcgacacatccttcagcacaacagagcgccacaccgtgggagaggtgattaagttgggaccaaatgggtcccccagaagggcatggggcaagtcaccaactgattctgtgctgaagatattgggagaggctgagctacagttgcagaccgagctcctcgaaaatactactatccggagcgagatcagtccagagggtgagaagtacaaaccgctgatcactggggagaaaaaggtgcagtgcattagccatgagattaacccctccgccatcgtggactcgcctgtcgagacaaaaagccccgagttctcagaggcaagtccgcagatgtcgctgaaactggaaggaaaccttgaagaacccgatgatcttgagactgaaattctgcaggaaccatccgggaccaacaaggatgagtcgctcccctgcaccatcactgatgtatggatatctgaggagaaggaaaccaaggagacacaatccgctgacaggatcaccatccaggaaaatgaggtgtccgaggacggtgtaagtagcacagtcgatcagctgtcagacatccatattgagcccggaacaaacgattcacaacattccaaatgcgatgtggacaaaagtgtgcagccagagccctttttccacaaagtcgtacattctgaacacctcaatttagtaccgcaggtccagtccgtgcaatgtagtcctgaagaaagtttcgcgttccgctctcattcgcatttgccgccaaagaataagaacaagaattccttactcatcggactgtccaccggcttgttcgatgctaataaccccaaaatgttgagaacttgcagcctgcccgacctgtctaagctcttccgaactctaatggacgtgccaaccgtgggagatgtgagacaagacaacctggagatagatgaaattgaagacgaaaatatcaaagaagggccaagcgatagtgaggacattgtgttcgaagaaacagatactgatctccaggagttgcaggccagcatggaacagctattgagagaacaacccggtgaggaatacagcgaggaagaggaatcagttctgaagaactctgatgtcgaacccactgccaatgggacagacgtggccgacgaggacgataatccttcctcagagagcgctttaaacgaagagtggcactcagataactcagatggggaaatcgcctccgagtgcgaatgtgacagtgttttcaaccacctggaagagctgaggcttcacctagagcaggaaatggggttcgagaaattttttgaggtgtacgagaaaattaaagcgattcacgaggatgaggatgagaatattgaaatttgtagcaagattgtgcagaacatcctgggaaatgagcaccagcacctttacgccaaaatcctgcacctggtgatggcagatggagcctatcaggaagacaatgatgagtag

SEQ ID NO: 173203 - DNA, 3777 bp, Artificial Sequence
  derived and/or modified sequence
atggagaagtacgtgagactgcagaagatcggcgagggcagcttcggcaaggccatcctggtgaagagcaccgaggacggcagacagtacgtgatcaaggagatcaacatcagcagaatgagcagcaaggagagagaggagagcagaagagaggtggccgtgctggccaacatgaagcaccccaacatcgtgcagtacagagagagcttcgaggagaacggcagcctgtacatcgtgatggactactgcgagggcggcgacctgttcaagagaatcaacgcccagaagggcgtgctgttccaggaggaccagatcctggactggttcgtgcagatctgcctggccctgaagcacgtgcacgacagaaagatcctgcacagagacatcaagagccagaacatcttcctgaccaaggacggcaccgtgcagctgggcgacttcggcatcgccagagtgctgaacagcaccgtggagctggccagaacctgcatcggcaccccctactacctgagccccgagatctgcgagaacaagccctacaacaacaagagcgacatctgggccctgggctgcgtgctgtacgagctgtgcaccctgaagcacgccttcgaggccggcagcatgaagaacctggtgctgaagatcatcagcggcagcttcccccccgtgagcctgcactacagctacgacctgagaagcctggtgagccagctgttcaagagaaaccccagagacagacccagcgtgaacagcatcctggagaagggcttcatcgccaagagaatcgagaagttcctgagcccccagctgatcgccgaggagttctgcctgaagaccttcagcaagttcggcagccagcccatccccgccaagagacccgccagcggccagaacagcatcagcgtgatgcccgcccagaagatcaccaagcccgccgccaagtacggcatccccctggcctacaagaagtacggcgacaagaagctgcacgagaagaagcccctgcagaagcacaagcaggcccaccagacccccgagaagagagtgaacaccggcgaggagagaagaaagatcagcgaggaggccgccagaaagagaagactggagttcatcgagaaggagaagaagcagaaggaccagatcatcagcctgatgaaggccgagcagatgaagagacaggagaaggagagactggagagaatcaacagagccagagagcagggctggagaaacgtgctgagcgccggcggcagcggcgaggtgaaggcccccttcctgggcagcggcggcaccatcgcccccagcagcttcagcagcagaggccagtacgagcactaccacgccatcttcgaccagatgcagcagcagagagccgaggacaacgaggccaagtggaagagagagatctacggcagaggcctgcccgagagaggcatcctgcccggcgtgagacccggcttcccctacggcgccgccggccaccaccacttccccgacgccgacgacatcagaaagaccctgaagagactgaaggccgtgagcaagcaggccaacgccaacagacagaagggccagctggccgtggagagagccaagcaggtggaggagttcctgcagagaaagagagaggccatgcagaacaaggccagagccgagggccacatggtgtacctggccagactgagacagatcagactgcagaacttcaacgagagacagcagatcaaggccaagctgagaggcgagaagaaggaggccaaccacagcgagggccaggagggcagcgaggaggccgacatgagaagaaagaagatcgagagcctgaaggcccacgccaacgccagagccgccgtgctgaaggagcagctggagagaaagagaaaggaggcctacgagagagagaagaaggtgtgggaggagcacctggtggccaagggcgtgaagagcagcgacgtgagcccccccctgggccagcacgagaccggcggcagccccagcaagcagcagatgagaagcgtgatcagcgtgaccagcgccctgaaggaggtgggcgtggacagcagcctgaccgacaccagagagaccagcgaggagatgcagaagaccaacaacgccatcagcagcaagagagagatcctgagaagactgaacgagaacctgaaggcccaggaggacgagaagggcaagcagaacctgagcgacaccttcgagatcaacgtgcacgaggacgccaaggagcacgagaaggagaagagcgtgagcagcgacagaaagaagtgggaggccggcggccagctggtgatccccctggacgagctgaccctggacaccagcttcagcaccaccgagagacacaccgtgggcgaggtgatcaagctgggccccaacggcagccccagaagagcctggggcaagagccccaccgacagcgtgctgaagatcctgggcgaggccgagctgcagctgcagaccgagctgctggagaacaccaccatcagaagcgagatcagccccgagggcgagaagtacaagcccctgatcaccggcgagaagaaggtgcagtgcatcagccacgagatcaaccccagcgccatcgtggacagccccgtggagaccaagagccccgagttcagcgaggccagcccccagatgagcctgaagctggagggcaacctggaggagcccgacgacctggagaccgagatcctgcaggagcccagcggcaccaacaaggacgagagcctgccctgcaccatcaccgacgtgtggatcagcgaggagaaggagaccaaggagacccagagcgccgacagaatcaccatccaggagaacgaggtgagcgaggacggcgtgagcagcaccgtggaccagctgagcgacatccacatcgagcccggcaccaacgacagccagcacagcaagtgcgacgtggacaagagcgtgcagcccgagcccttcttccacaaggtggtgcacagcgagcacctgaacctggtgccccaggtgcagagcgtgcagtgcagccccgaggagagcttcgccttcagaagccacagccacctgccccccaagaacaagaacaagaacagcctgctgatcggcctgagcaccggcctgttcgacgccaacaaccccaagatgctgagaacctgcagcctgcccgacctgagcaagctgttcagaaccctgatggacgtgcccaccgtgggcgacgtgagacaggacaacctggagatcgacgagatcgaggacgagaacatcaaggagggccccagcgacagcgaggacatcgtgttcgaggagaccgacaccgacctgcaggagctgcaggccagcatggagcagctgctgagagagcagcccggcgaggagtacagcgaggaggaggagagcgtgctgaagaacagcgacgtggagcccaccgccaacggcaccgacgtggccgacgaggacgacaaccccagcagcgagagcgccctgaacgaggagtggcacagcgacaacagcgacggcgagatcgccagcgagtgcgagtgcgacagcgtgttcaaccacctggaggagctgagactgcacctggagcaggagatgggcttcgagaagttcttcgaggtgtacgagaagatcaaggccatccacgaggacgaggacgagaacatcgagatctgcagcaagatcgtgcagaacatcctgggcaacgagcaccagcacctgtacgccaagatcctgcacctggtgatggccgacggcgcctaccaggaggacaacgacgagtag

SEQ ID NO: 173204 - protein, 271 aa, Artificial Sequence
  derived and/or modified sequence
MEAAAEPGNLAGVRHIILVLSGKGGVGKSTISTELALALRHAGKKVGILDVDLCGPSIPRMLGAQGRAVHQCDRGWAPVFLDREQSISLMSVGFLLEKPDEAVVWRGPKKNALIKQFVSDVAWGELDYLVVDTPPGTSDEHMATIEALRPYQPLGALVVTTPQAVSVGDVRRELTFCRKTGLRVMGIVENMSGFTCPHCTECTSVFSRGGGEELAQLAGVPFLGSVPLDPALMRTLEEGHDFIQEFPGSPAFAALTSIAQKILDATPACLP

SEQ ID NO: 173205 - protein, 130 aa, Artificial Sequence
  derived and/or modified sequence
MATIEALRPYQPLGALVVTTPQAVSVGDVRRELTFCRKTGLRVMGIVENMSGFTCPHCTECTSVFSRGGGEELAQLAGVPFLGSVPLDPALMRTLEEGHDFIQEFPGSPAFAALTSIAQKILDATPACLP

SEQ ID NO: 173206 - DNA, 816 bp, Artificial Sequence
  derived and/or modified sequence
atggaggccgcagccgagcctgggaacctcgctggagtccggcatataatcttggtgctgtccggtaagggtggagtcggcaagagcactatttctaccgaactggctctggcacttagacatgccggtaaaaaagtgggtatcctagacgttgacctttgcggccctagtatccctcggatgctgggagctcagggccgagcagttcaccagtgtgaccgcggttgggctcctgtattcctcgaccgcgagcagtctatttcactcatgagcgtggggttcctgctggagaagcccgatgaagcggttgtttggcgtggaccaaagaaaaatgcacttatcaagcaattcgtgtctgatgtcgcctggggagaattagactacctggtagtggacacaccccccggaacttccgacgaacatatggccacaattgaagccctgcggccatatcagcccctgggggcattggtggttaccaccccacaggcggtctcagttggagacgtaaggagagaactgactttctgtaggaagacagggctccgcgtgatgggaatagtcgaaaatatgagtgggttcacttgccctcactgtactgagtgtacgtctgtcttctctcgtggtggaggcgaagagctggcccagctggcaggtgtgcctttcctcggaagtgtccccctcgaccctgcacttatgcgaacactggaagaagggcacgatttcatacaggagtttccggggtcacctgccttcgctgcacttacaagcatcgctcagaagatcctcgatgcgacccccgcgtgtcttccttag

SEQ ID NO: 173207 - DNA, 816 bp, Artificial Sequence
  derived and/or modified sequence
atggaggccgctgctgagcccggcaacctggccggcgtgcgccacatcatcctggtgctgtctggaaaaggaggagtgggcaagagcaccatcagcacagagctggccctggccctgcggcatgctgggaagaaggtgggcatcctggatgtggacctgtgtggccccagcatccccaggatgctgggcgcccagggccgggctgtgcaccagtgtgaccggggctgggcccctgtgttcctggaccgggagcagagcatcagcctgatgtctgtgggcttcctgctggagaagccagatgaggccgtggtgtggaggggccccaagaagaatgccctgatcaagcagtttgtgtctgatgtggcctggggcgagctggactacctggtggtggacaccccacctggcaccagtgatgagcacatggccaccatcgaggccctgcggccctaccagcccctgggcgccctggtggtgaccaccccccaggccgtgtctgtgggagatgtgagaagagagctgaccttctgcaggaagacaggcctgcgggtgatgggcatcgtggagaacatgagcggcttcacctgcccccactgcacagaatgtaccagcgtcttcagcagaggaggaggagaggagctggcccagctggccggcgtgcccttcctgggctctgtgcccctggaccctgccctgatgaggaccctggaggagggccatgacttcatccaggagttccctggcagccctgcctttgctgccctgaccagcatcgcccagaagatcctggatgccaccccagcctgcctgccctag

SEQ ID NO: 173208 - DNA, 816 bp, Artificial Sequence
  derived and/or modified sequence
atggaggccgccgccgagcccggcaacctggccggcgtgcggcacataatcttggttcttagcggcaaggggggggtgggtaagtctactatatctaccgaactggccctggcacttagacacgcaggaaaaaaggttggcatcctggatgtcgacctgtgcggcccaagtattccccgaatgttgggggcccaagggcgcgcagtacaccagtgtgacaggggttgggcgcccgtgtttctggaccgtgaacagagtatctcacttatgagcgttggcttcctgctggagaaaccggacgaggctgtggtgtggcgaggtcccaaaaaaaatgccctaataaagcagtttgtatcagacgtggcctggggggagttggattatctggtggtggacacccctcccggcacatctgatgaacatatggcgaccattgaagctctgaggccttatcagcctttaggagcgctggttgttacaaccccacaggcagtctcggtgggagatgtccgtagggaactaactttttgtagaaagactgggctgagagtgatgggaatcgtggagaacatgagcggcttcacctgtccccactgcacagaatgcacgagcgtcttctcccgcggcgggggggaagaactggcccagctggctggtgtcccattcctgggctctgtgcctttggacccagctctgatgcggacccttgaggaggggcatgattttattcaggaattccccggctccccggcgtttgcagcactgaccagcatagctcagaaaattctggatgccacccccgcctgtctgccctag

SEQ ID NO: 173209 - DNA, 1413 bp, Artificial Sequence
  derived and/or modified sequence
aagaagagccacgggcgggcacgcactgcccattggttggaaggcccttcgctctagctgggaggctgacggcccgcgggcgtaagcggactgcagccgcgagctcctggaggcggcgggatggaggcggcggccgagcctggaaacctggccggcgtcaggcacatcatcctggtcctctcaggaaaggggggcgttgggaaaagcaccatctccacggagctggccctggcactgcgccatgcaggcaagaaggtgggaatcctggatgtggacctgtgtggccccagtatcccccgcatgctcggggcgcagggcagggctgtgcaccagtgcgaccgcggctgggcacccgtcttcctggaccgggagcagagcatctcgctcatgtctgtgggcttcctgctggagaagccggacgaggccgtggtgtggagaggccccaagaaaaacgcgctgataaagcagtttgtgtccgacgtggcctggggggagctggactacctggtggtggacacgcccccggggacctccgatgagcacatggccaccatagaagccctgcgtccctaccagcccctgggggccctcgtggtcaccacgccccaggcggtgtccgtgggggacgtgaggcgcgagctgaccttctgtaggaagacgggcttgcgggtgatgggaatcgtggagaatatgagcggcttcacctgcccacactgcacggagtgcaccagcgtcttctccaggggcggcggagaggagctggcccagctcgccggggtgcccttcttaggctccgtgcccctggaccctgcgctcatgaggaccctggaggagggccacgacttcatccaggagttccctgggagccccgccttcgctgcactcacctccatagcccagaagattctggacgcgacgcccgcgtgcctcccctgactaaggccaccttgcagccgctttccagggccaccaagggctctgctccagcctctcagagaaacagaggcctgggctcggttcccgggccctgcaggggcaggcccaggcagcgtcagccggagagcttctccccgaccagcccagccccaggatgtgtcgcaccagcagctctgcctggttggcctgcagtgccgtggtctgcgtgctctgcagctgtgagacgggggcggcctgggctctcttcccatccatgttgcctacctgtgcccctggcagccgcgtgtccacacagttagcggagcgcgggacttctgcagtcctcaggtgaccccgggcctccagcaccctgggtcgctgtcatctgtgtttagctcggggagtgccccctaagggggcgaactgacctcaggcatgttttgtaactgtagaggcgcctgccattaaacgtgtccgctgctgtggcgacagatctga

SEQ ID NO: 173210 - DNA, 816 bp, Artificial Sequence
  derived and/or modified sequence
atggaggctgccgcagagccagggaacctggcaggcgtcaggcatataatcttagtgctgagcgggaaaggcggagttggaaagtccacaatatctacagaactggcactagctctccgccatgccggtaagaaggtgggtattctggatgtcgatctgtgcggtccctcaattcctagaatgttaggcgctcagggtagagccgtgcatcaatgcgatagaggctgggctccagttttcttggatagggagcagagtatctctctcatgagtgtgggatttcttcttgagaagcccgacgaggcagtggtctggcgtggtcccaagaaaaatgcactgattaaacagttcgtatcagatgtggcctggggagaattggactatctggttgtagacactccgcctgggacaagtgatgagcacatggcaaccatcgaggcgctcaggccctatcagcccctgggagcactggtagttacaactccacaggcagtgagtgtgggagacgtgaggagggaattaaccttctgccgtaaaaccgggctgcgggtcatgggaatcgttgagaatatgtccggctttacttgcccgcactgtaccgaatgcacctccgtattttccagagggggaggggaagagctagctcagcttgccggagttccattcctgggatcagtgcctctggacccagccttaatgagaacacttgaggaaggccacgacttcattcaagaatttcctggatcacctgcttttgcagccctgacctcaatcgcccagaagatactggacgcaactcccgcatgcctgccatag

SEQ ID NO: 173211 - DNA, 816 bp, Artificial Sequence
  derived and/or modified sequence
atggaggccgccgccgagcccggcaacctggccggcgtgagacacatcatcctggtgctgagcggcaagggcggcgtgggcaagagcaccatcagcaccgagctggccctggccctgagacacgccggcaagaaggtgggcatcctggacgtggacctgtgcggccccagcatccccagaatgctgggcgcccagggcagagccgtgcaccagtgcgacagaggctgggcccccgtgttcctggacagagagcagagcatcagcctgatgagcgtgggcttcctgctggagaagcccgacgaggccgtggtgtggagaggccccaagaagaacgccctgatcaagcagttcgtgagcgacgtggcctggggcgagctggactacctggtggtggacaccccccccggcaccagcgacgagcacatggccaccatcgaggccctgagaccctaccagcccctgggcgccctggtggtgaccaccccccaggccgtgagcgtgggcgacgtgagaagagagctgaccttctgcagaaagaccggcctgagagtgatgggcatcgtggagaacatgagcggcttcacctgcccccactgcaccgagtgcaccagcgtgttcagcagaggcggcggcgaggagctggcccagctggccggcgtgcccttcctgggcagcgtgcccctggaccccgccctgatgagaaccctggaggagggccacgacttcatccaggagttccccggcagccccgccttcgccgccctgaccagcatcgcccagaagatcctggacgccacccccgcctgcctgccctag

SEQ ID NO: 173212 - protein, 399 aa, Artificial Sequence
  derived and/or modified sequence
MAAAQPKYPAGATARRLARGCWSALWDYETPKVIVVRIHRAEKLPGERDGPRELHHHQGQGDHHVRAQSVGRGGVREAPRGLRTGRCVPYYQGPSKTCEVFGWCPVEDGASVSQFLGTMAPNFTILIKNSIHYPKFHFSKGNIADRTDGYLKRCTFHEASDLYCPIFKLGFIVEKAGESFTELAHKGGVIGVIINWDCDLDLPASECNPKYSFRRLDPKHVPASSGYNFRFAKYYKINGTTTRTLIKAYGIRIDVIVHGQAGKFSLIPTIINLATALTSVGVGSFLCDWILLTFMNKNKVYSHKKFDKVCTPSHPSGSWPVTLARVLGQAPPEPGHRSEDQHPSPPSGQEGQQGAECGPAFPPLRPCPISAPSEQMVDTPASEPAQASTPTDPKGLAQL

SEQ ID NO: 173213 - DNA, 1200 bp, Artificial Sequence
  derived and/or modified sequence
atggccgccgcccagcccaagtaccccgccggcgccaccgccagaagactggccagaggctgctggagcgccctgtgggactacgagacccccaaggtgatcgtggtgagaatccacagagccgagaagctgcccggcgagagagacggccccagagagctgcaccaccaccagggccagggcgaccaccacgtgagagcccagagcgtgggcagaggcggcgtgagagaggcccccagaggcctgagaaccggcagatgcgtgccctactaccagggccccagcaagacctgcgaggtgttcggctggtgccccgtggaggacggcgccagcgtgagccagttcctgggcaccatggcccccaacttcaccatcctgatcaagaacagcatccactaccccaagttccacttcagcaagggcaacatcgccgacagaaccgacggctacctgaagagatgcaccttccacgaggccagcgacctgtactgccccatcttcaagctgggcttcatcgtggagaaggccggcgagagcttcaccgagctggcccacaagggcggcgtgatcggcgtgatcatcaactgggactgcgacctggacctgcccgccagcgagtgcaaccccaagtacagcttcagaagactggaccccaagcacgtgcccgccagcagcggctacaacttcagattcgccaagtactacaagatcaacggcaccaccaccagaaccctgatcaaggcctacggcatcagaatcgacgtgatcgtgcacggccaggccggcaagttcagcctgatccccaccatcatcaacctggccaccgccctgaccagcgtgggcgtgggcagcttcctgtgcgactggatcctgctgaccttcatgaacaagaacaaggtgtacagccacaagaagttcgacaaggtgtgcacccccagccaccccagcggcagctggcccgtgaccctggccagagtgctgggccaggccccccccgagcccggccacagaagcgaggaccagcaccccagcccccccagcggccaggagggccagcagggcgccgagtgcggccccgccttcccccccctgagaccctgccccatcagcgcccccagcgagcagatggtggacacccccgccagcgagcccgcccaggccagcacccccaccgaccccaagggcctggcccagctgtag

SEQ ID NO: 173214 - DNA, 1200 bp, Artificial Sequence
  derived and/or modified sequence
atggcagctgctcaaccgaagtacccggcaggggccactgctaggaggctcgcccgcggctgctggagtgccttgtgggactatgagactcctaaagtgatcgtcgtgcggattcatagggcagagaaacttcctggcgaaagagacgggccgagggaactgcatcaccatcagggccagggtgaccatcatgtgcgagcacagtccgttggcagggggggagtcagagaggcacctcggggcctgagaaccggccgatgtgtcccatattaccagggaccgtccaaaacctgcgaggtattcggctggtgcccggttgaagacggagcaagcgtgagccagtttctagggacaatggcaccaaacttcactatcctaataaagaattccatccattaccctaagtttcacttttctaagggcaacatcgcagatcgcacggatggctacctaaagcgttgcacatttcacgaagcctctgatctctactgccccatctttaagctcggttttatagtcgagaaggcaggagagagtttcacggagctggcccacaaaggcggcgtgattggagtcatcataaattgggactgcgatctagatttgcccgcctcagagtgtaacccgaaatatagctttagacgtttggatccaaaacacgtacccgcaagctccggatataattttcgattcgctaagtattataagattaatgggacaaccacacggaccctcatcaaggcttatgggatccgaatcgatgtaatcgtgcatggacaggccggtaagttttctcttattccgacgatcatcaatcttgcaaccgcccttacttccgtgggggtcgggagctttctgtgcgactggattctcctaacctttatgaataaaaacaaggtttacagccataaaaagtttgacaaagtttgcacacccagccatccctctggctcctggccagtgactctcgctcgggtccttggccaagccccccccgaacccggtcacagaagcgaagaccaacatcccagccctccttccgggcaggaaggtcaacaaggtgctgagtgtgggcccgcctttcccccactgcggccttgtccaatttctgcaccttcagaacagatggtcgatactcctgccagtgaacctgctcaggcttcaaccccaacagacccaaagggactggcgcagctgtag

SEQ ID NO: 173215 - DNA, 1200 bp, Artificial Sequence
  derived and/or modified sequence
atggctgctgcccagcccaagtacccagctggggccacagcccggcggctggcccggggctgctggagcgccctgtgggactatgagacccccaaggtgattgtggtgcgcatccacagagctgagaagctgcctggagagagagatggcccccgggagctgcaccaccaccagggccagggcgaccaccacgtgcgggcccagagcgtgggccggggcggcgtgcgggaggccccccggggcctgaggacaggccgctgtgtgccctactaccagggccccagcaagacctgtgaggtgtttggctggtgccctgtggaggatggagcctctgtgtcccagttcctgggcaccatggcccccaacttcaccatcctgatcaagaacagcatccactaccccaagttccacttcagcaagggcaacattgctgacagaacagatggctacctgaagcgctgcaccttccacgaggccagtgacctgtactgccccatcttcaagctgggcttcatcgtggagaaggccggggagagcttcacagagctggcccacaagggcggcgtcatcggggtcatcatcaactgggactgtgacctggacctgcctgccagcgagtgcaaccccaagtacagcttccggcggctggaccccaagcacgtgcctgccagcagcggctacaacttccgctttgccaagtactacaagatcaatggcaccaccaccaggaccctcatcaaggcctacggcatcagaattgatgtgattgtgcacggccaggccggcaagttcagcctcatccccaccatcatcaacctggccacagccctgacctctgtgggcgtgggcagcttcctgtgtgactggatcctgctgaccttcatgaacaagaacaaggtgtacagccacaagaagtttgacaaggtgtgcacccccagccaccccagcggctcctggcctgtgaccctggcccgggtgctgggccaggcccctcctgagcccggccacagaagtgaggaccagcaccccagccccccatctggccaggagggccagcagggcgcagaatgtggccctgccttcccccccctgcggccctgccccatcagcgcccccagcgagcagatggtggacaccccagccagcgagcccgcccaggccagcacccccacagaccccaagggcctggcccagctgtag

SEQ ID NO: 173216 - DNA, 1200 bp, Artificial Sequence
  derived and/or modified sequence
atggccgccgcccagcccaagtaccccgccggcgccaccgcccggcgattggctcgagggtgttggtctgccctgtgggactacgagactcccaaggtgatcgtggtgcgcatacatcgggctgaaaaactccccggcgagagagacgggccacgagaactccaccaccaccagggtcagggcgaccatcacgtgagggctcaaagcgtcggaagggggggagtgcgcgaggcgccacgtggcttacggaccggacggtgtgtcccgtattaccagggtcctagcaagacctgcgaagtctttgggtggtgtccagtggaggatggggccagcgtgagtcagttccttggcaccatggctccaaacttcacgatcttgattaagaacagcatccactatcccaagttccacttctcgaagggcaacattgccgataggacagatggctacctcaagcggtgcacattccacgaggcttccgatctatattgccccatcttcaaactggggttcatagtggaaaaggctggggagtcctttaccgaactcgctcataaaggaggcgttataggggtcatcattaattgggattgtgacctggatttaccagccagtgaatgtaatcccaaatacagtttccgccgacttgaccctaaacacgtgcctgcatcctcaggctataatttcaggttcgctaagtactacaaaattaacggtactacaacccgcacactcatcaaggcatacggcattagaattgatgtaatcgtgcatggtcaggctggcaagtttagtctcatccctacgatcatcaacctcgcgacggcactgaccagcgtaggtgtggggtcttttctttgcgactggattcttctgaccttcatgaacaaaaataaagtttatagtcacaaaaagtttgacaaggtgtgtactccttcccacccatctggtagctggcccgtgactcttgctagggtgctcggccaggcacccccggagcccggtcaccggtcagaagatcagcatccctcacccccgagtggccaagagggccagcaaggagccgaatgtggccccgcgttccccccattgagaccctgcccaataagtgccccgagcgagcaaatggtggacacgcccgcctcagagccagcccaggcaagcaccccgacagaccctaaaggactagcacaactttag

SEQ ID NO: 173217 - DNA, 1200 bp, Artificial Sequence
  derived and/or modified sequence
atggccgccgcccagcccaagtaccccgccggggcgaccgcccggcgcctggcccggggctgctggtccgccctctgggactacgagacgcccaaggtgatcgtggtacgtattcatcgtgcagaaaagctaccaggagagcgagacgggccccgagagctccatcatcaccaaggtcaaggggatcaccacgtccgagcacaaagtgtgggacgtggaggagtacgtgaagccccccgaggcctgaggactgggcgctgtgtgccctattaccaggggccctccaagacctgcgaggtgttcggctggtgcccggtggaagatggggcctctgtcagccaatttctgggtacgatggccccaaatttcaccatcctcatcaagaacagcatccactaccccaaattccacttctccaagggcaacatcgccgaccgcacagacgggtacctgaagcgctgcacgttccacgaggcctccgacctctactgccccatcttcaagctgggctttatcgtggagaaggctggggagagcttcacagagctcgcacacaagggtggtgtcatcggggtcattatcaactgggactgtgacctggacctgcctgcatcggagtgcaaccccaagtactccttccggaggcttgaccccaagcacgtgcctgcctcgtcaggctacaacttcaggtttgccaaatactacaagatcaatggcaccaccacccgcacgctcatcaaggcctacgggatccgcattgacgtcattgtgcatggacaggccgggaagttcagcctgattcccaccattattaatctggccacagctctgacttccgtcggggtgggctccttcctgtgcgactggatcttgctaacattcatgaacaaaaacaaggtctacagccataagaaatttgacaaggtgtgtacgccgagccacccctcaggtagctggcctgtgacccttgcccgtgtattgggccaggcccctcccgaacccggccaccgctccgaggaccagcaccccagccctccatcaggccaggagggccaacaaggggcagagtgtggcccagccttcccgcccctgcggccttgccccatctctgccccttctgagcagatggtggacactcctgcctccgagcctgcccaagcctccacacccacagaccccaaaggtttggctcaactctga

SEQ ID NO: 173218 - DNA, 1200 bp, Artificial Sequence
  derived and/or modified sequence
atggcagccgcacaaccaaagtatcccgctggcgctacagctcgtcgacttgccagaggttgttggagtgccctatgggattatgaaacgcccaaggtgatcgtggtacggattcacagagccgagaaactgcctggggaacgagatgggccacgagagctgcatcaccaccaaggtcaaggcgatcaccacgtgagggcccagtcagtggggagaggtggagttcgggaagcaccacgtgggctacgcacaggcaggtgcgtcccatattaccaaggcccttccaagacctgcgaagtattcggttggtgccctgtggaggacggcgcatcagtcagtcaattcctcggcaccatggctcccaattttactatcctcatcaagaactctatccactaccctaaattccatttctctaaggggaatattgcagatagaaccgatggttacctcaagcggtgtacatttcacgaggcatccgacctgtattgtcctatctttaagttagggtttattgttgaaaaggctggagaatcattcaccgaactcgcccacaagggaggcgtgattggcgtgataatcaattgggattgcgatctggacctgcctgcctcggaatgtaaccccaaatacagtttcagaaggcttgatcccaagcatgtgcccgcatcatctgggtacaacttcagattcgccaaatactataagatcaatggtacgaccacccgcaccttaatcaaagcctatggcatccgaattgacgtgattgtgcatggccaggccggaaagttctctttgatccccaccatcatcaacctcgccactgctcttacaagtgtgggtgtcggttccttcctttgtgactggatcttactcactttcatgaacaaaaataaggtgtatagtcataaaaagtttgataaggtgtgtacaccgagtcacccctccgggagttggccagtcaccttggctagagttctggggcaggccccacccgaaccagggcatagaagcgaggatcagcatcctagcccgccttcaggccaggagggtcagcagggagccgaatgcggtcctgcttttccacctctgaggccatgccccatcagcgcaccttccgagcagatggtagatacgcctgctagcgaacctgctcaagcttcgacgccgaccgacccaaagggcctggcccaactttag

SEQ ID NO: 173219 - protein, 182 aa, Artificial Sequence
  derived and/or modified sequence
MARLLWLLRGLTLGTAPRRAVRGQAGGGGPGTGPGLGEAGSLATCELPLAKSEWQKKLTPEQFYVTREKGTEPPFSGIYLNNKEAGMYHCVCCDSPLFSSEKKYCSGTGWPSFSEAHGTSGSDESHTGILRRLDTSLGSARTEVVCKQCEAHLGHVFPDGPGPNGQRFCINSVALKFKPRKH

SEQ ID NO: 173220 - DNA, 1811 bp, Artificial Sequence
  derived and/or modified sequence
agggaggccgactagcgcaggcggacgggagagaatgggggaggggtgggatgggagcaggggcagagacgggcagagggcagagggcggagcggcgccggagcgggcgtcatggcgcggctcctctggttgctccggggcctgaccctcggaactgcgcctcggcgggcggtgcggggccaagcgggcggcggcgggcccggcaccgggccgggactgggggaggcagggtctcttgcaacgtgtgagctgcctcttgccaagagtgagtggcaaaagaaactaaccccggagcagttctacgtcacaagagaaaagggaacggaaccgcctttcagtgggatctacctgaataacaaggaagcaggaatgtatcattgcgtgtgctgcgacagtccactcttcagttctgagaaaaagtactgctctggcactgggtggccttcgttttccgaggctcatggtacgtctggctctgatgaaagccacacagggatcctgagacgtctggatacctcgttaggatcagctcgcacagaggttgtctgcaagcagtgtgaagctcatctaggtcacgtgtttcctgatggacctgggcccaatggtcagaggttttgcatcaacagtgtggctttgaagttcaaaccaaggaaacactgaccatcttcaagagtcccgttcccttgccaccccttcacgtgcaccctcaatttccacaattcacttgaatgacttgttttatttgcaataaaactgggctgaatttgctgctgtctccagcgagtcattgcttctcttaatttatttacctggaatcaacttaatcctgtgtgttaggctgttcttgtgttgctataaagaagtacctgatcaggatctgggagaatttgaaaaaaaaagaaaaactagaaaaataaacaaaattaaaaagaaaaaaaaatacctgagactgagtaacttataaagaaaagaggtttaattgactcacagttctgcagggtgtacagaaagcatggtgccagcatttgctcggattctggggagacctgagggagcttttactcatggcagaaggtgaagggggagccggcgtctcacatggcaaagcaggagcaagagagagtggtagggaggtgccacatacttttaaacagccagatctctcaagaactcactcactgtcaccaggacagcaccaagccatgagggatccaccctcatgacccagttacctcccggcagggcccacctccggcactaggaattatacttcaacataagatttggagagggaaaacatccaaaccatatcacccaactcccacttggagtagaacttcacaaaacgacagagggacagctgtttccatcaaacacttccacagcttcacctgagacgagggcatgactctgggaacatcaggaggctgatggactattaagccaaacaattcctacaaaaattccctgcaccttccactgcgtttcagtccttgacagacataagtaagggatcaagtgagaagaggaaggaaaatacaggatccaaggaatcaacaatgctagcactgaagagcaggattacggaggagctgtgctctgggagcatatatggtgatcaatcagatgcatgacttttttttcaaaattttaaatgtcttgagcatgctacttccaaccattctacccacaaataaactgcaataggacttggttagatttcaatgattatgaataaatgttcaccttcataccttctggttacaaagctaaactttaaaatgtccaaataaaatattcactaaaattta

SEQ ID NO: 173221 - DNA, 549 bp, Artificial Sequence
  derived and/or modified sequence
atggctagactcctgtggttgcttcgcgggttgacacttgggacagcacctaggagggccgtgcgaggacaagctgggggtggtggaccaggtaccggcccaggtctcggtgaagctgggtcactggcaacctgtgaactcccactcgccaaatccgaatggcaaaagaagctgacccccgagcagttttacgtgaccagagagaagggcacagaacctccattctctggcatctacctcaacaataaggaagcgggtatgtaccactgcgtctgctgcgactccccattattttcctcagaaaaaaaatactgttcaggcacgggatggccttctttttcagaagcccatgggacatctggcagcgacgagtcacacacgggcattcttaggcgcctagatacaagtcttggctctgctcgaacagaagtcgtgtgcaaacaatgcgaggcacacctggggcatgtctttccagatggaccaggacctaatgggcaaagattctgcattaacagcgtcgccttaaagtttaagcccagaaagcactag

SEQ ID NO: 173222 - DNA, 549 bp, Artificial Sequence
  derived and/or modified sequence
atggcccggctgctgtggctgctgcggggcctgaccctgggcacagccccccggcgggctgtgcggggccaggccggcggcggcggccctggcaccggccctggcctgggggaggccggcagcctggccacctgtgagctgcccctggccaagtctgagtggcagaagaagctgaccccagagcagttctacgtgacccgggagaagggcacagagccccccttcagcggcatctacctgaacaacaaggaggccggcatgtaccactgtgtgtgctgtgacagccccctcttcagcagcgagaagaagtactgcagcggcaccggctggcccagcttcagcgaggcccacggcaccagcggcagtgatgagagccacacaggcatcctgcggcggctggacaccagcctgggcagcgccaggacagaggtggtgtgcaagcagtgtgaggcccacctgggccacgtgtttcctgatggccctggccccaacggccagcgcttctgcatcaacagcgtggccctgaagttcaagcccaggaagcactag

SEQ ID NO: 173223 - DNA, 1803 bp, Artificial Sequence
  derived and/or modified sequence
cgactagcgcaggcggacgggagagaatgggggaggggtgggatgggagcaggggcagagacgggcagagggcagagggcggagcggcgccggagcgggcgtcatggcgcggctcctctggttgctccggggcctgaccctcggaactgcgcctcggcgggcggtgcggggccaagcgggcggcggcgggcccggcaccgggccgggactgggggaggcagggtctcttgcaacgtgtgagctgcctcttgccaagagtgagtggcaaaagaaactaaccccggagcagttctacgtcacaagagaaaagggaacggaaccgcctttcagtgggatctacctgaataacaaggaagcaggaatgtatcattgcgtgtgctgcgacagtccactcttcagttctgagaaaaagtactgctctggcactgggtggccttcgttttccgaggctcatggtacgtctggctctgatgaaagccacacagggatcctgagacgtctggatacctcgttaggatcagctcgcacagaggttgtctgcaagcagtgtgaagctcatctaggtcacgtgtttcctgatggacctgggcccaatggtcagaggttttgcatcaacagtgtggctttgaagttcaaaccaaggaaacactgaccatcttcaagagtcccgttcccttgccaccccttcacgtgcaccctcaatttccacaattcacttgaatgacttgttttatttgcaataaaactgggctgaatttgctgctgtctccagcgagtcattgcttctcttaatttatttacctggaatcaacttaatcctgtgtgttaggctgttcttgtgttgctataaagaagtacctgatcaggatctgggagaatttgaaaaaaaaagaaaaactagaaaaataaacaaaattaaaaagaaaaaaaaatacctgagactgagtaacttataaagaaaagaggtttaattgactcacagttctgcagggtgtacagaaagcatggtgccagcatttgctcggattctggggagacctgagggagcttttactcatggcagaaggtgaagggggagccggcgtctcacatggcaaagcaggagcaagagagagtggtagggaggtgccacatacttttaaacagccagatctctcaagaactcactcactgtcaccaggacagcaccaagccatgagggatccaccctcatgacccagttacctcccggcagggcccacctccggcactaggaattatacttcaacataagatttggagagggaaaacatccaaaccatatcacccaactcccacttggagtagaacttcacaaaacgacagagggacagctgtttccatcaaacacttccacagcttcacctgagacgagggcatgactctgggaacatcaggaggctgatggactattaagccaaacaattcctacaaaaattccctgcaccttccactgcgtttcagtccttgacagacataagtaagggatcaagtgagaagaggaaggaaaatacaggatccaaggaatcaacaatgctagcactgaagagcaggattacggaggagctgtgctctgggagcatatatggtgatcaatcagatgcatgacttttttttcaaaattttaaatgtcttgagcatgctacttccaaccattctacccacaaataaactgcaataggacttggttagatttcaatgattatgaataaatgttcaccttcataccttctggttacaaagctaaactttaaaatgtccaaataaaatattcactaaaattta

SEQ ID NO: 173224 - DNA, 549 bp, Artificial Sequence
  derived and/or modified sequence
atggcccggctgctgtggctgctgcggggcctgaccctgggcaccgctccacggcgggctgtgaggggccaggctggcggcggtggaccaggaactggacccggcctgggagaggcaggcagcctggctacctgtgaactcccactcgcaaagtccgaatggcagaagaaattgacgccagaacagttctacgttacccgagagaaagggactgagcctccattctccggaatttaccttaataacaaggaggcaggtatgtatcactgcgtgtgctgcgattctcctcttttcagctcagagaaaaagtattgttccggcaccgggtggccctcattcagtgaagcccacgggaccagcggatcagacgaaagtcacacaggcatactgcgtcgtctcgacaccagccttgggagtgcacggaccgaagtggtctgcaagcagtgcgaagcacatctggggcatgtgtttccagatgggcctggccccaatggacaacgcttctgtatcaactcggtagcactcaaatttaaaccaagaaaacactag

SEQ ID NO: 173225 - DNA, 549 bp, Artificial Sequence
  derived and/or modified sequence
atggcacgcttgctatggttgctccgcggtctgaccctcggcacagctcccaggcgcgctgtgaggggccaagcaggcggtggcggaccaggaaccggacctggactgggagaggctggcagcctggcaacatgtgaactccctctggccaaatcggaatggcagaagaagctcacccctgagcagttttatgtcacccgggagaaaggtaccgagccgcctttctccggaatctacttgaataacaaggaggcaggaatgtatcactgtgtttgttgcgacagtccactgttctcctctgaaaagaagtactgttctggaaccggctggccttccttcagcgaagcacatggcacttcaggatcggatgagagtcataccggtatcctccggagacttgacacaagtctaggctccgcgagaactgaggtcgtctgtaaacagtgcgaggctcacttgggtcacgtgttccctgacggtcccggtcctaatggacagcgattctgtataaacagcgtggccctcaaatttaaaccaagaaagcactag

SEQ ID NO: 173226 - DNA, 549 bp, Artificial Sequence
  derived and/or modified sequence
atggccagactgctgtggctgctgagaggcctgaccctgggcaccgcccccagaagagccgtgagaggccaggccggcggcggcggccccggcaccggccccggcctgggcgaggccggcagcctggccacctgcgagctgcccctggccaagagcgagtggcagaagaagctgacccccgagcagttctacgtgaccagagagaagggcaccgagccccccttcagcggcatctacctgaacaacaaggaggccggcatgtaccactgcgtgtgctgcgacagccccctgttcagcagcgagaagaagtactgcagcggcaccggctggcccagcttcagcgaggcccacggcaccagcggcagcgacgagagccacaccggcatcctgagaagactggacaccagcctgggcagcgccagaaccgaggtggtgtgcaagcagtgcgaggcccacctgggccacgtgttccccgacggccccggccccaacggccagagattctgcatcaacagcgtggccctgaagttcaagcccagaaagcactag

SEQ ID NO: 173227 - protein, 561 aa, Artificial Sequence
  derived and/or modified sequence
MSTSWSDRLQNAADMPANMDKHALKKYRREAYHRVFVNRSLAMEKIKCFGFDMDYTLAVYKSPEYESLGFELTVERLVSIGYPQELLSFAYDSTFPTRGLVFDTLYGNLLKVDAYGNLLVCAHGFNFIRGPETREQYPNKFIQRDDTERFYILNTLFNLPETYLLACLVDFFTNCPRYTSCETGFKDGDLFMSYRSMFQDVRDAVDWVHYKGSLKEKTVENLEKYVVKDGKLPLLLSRMKEVGKVFLATNSDYKYTDKIMTYLFDFPHGPKPGSSHRPWQSYFDLILVDARKPLFFGEGTVLRQVDTKTGKLKIGTYTGPLQHGIVYSGGSSDTICDLLGAKGKDILYIGDHIFGDILKSKKRQGWRTFLVIPELAQELHVWTDKSSLFEELQSLDIFLAELYKHLDSSSNERPDISSIQRRIKKVTHDMDMCYGMMGSLFRSGSRQTLFASQVMRYADLYAASFINLLYYPFSYLFRAAHVLMPHESTVEHTHVDINEMESPLATRNRTSVDFKDTDYKRHQLTRSISEIKPPNLFPLAPQEITHCHDEDDDEEEEEEEE

SEQ ID NO: 173228 - DNA, 1686 bp, Artificial Sequence
  derived and/or modified sequence
atgtctacttcatggtcggaccgccttcagaatgcagccgatatgcccgccaatatggataagcacgctctgaagaagtaccgccgcgaagcctaccatagagtgtttgtgaaccggagcctggctatggagaagataaaatgtttcggctttgacatggactacacgctggccgtatacaaatccccagagtacgagtcgctagggttcgagctgacagtggaacgcctggtgagtattggttatccccaggagctcctctcttttgcgtacgactcaacgtttccaacaagaggactagtgtttgataccttatacggcaatctgttaaaagtggacgcctatggtaacctgctggtttgcgcccacggcttcaattttataagaggcccagaaaccagagaacaatatcccaacaaattcatacagcgggacgacactgaacgattctacatactgaacactttattcaacttgcctgaaacctacttgctcgcgtgcctcgtggatttcttcactaactgtcccaggtacactagttgtgagaccggctttaaagacggggatctcttcatgagctacaggtccatgttccaggacgtcagagacgccgtggattgggtacactataagggcagcctcaaggagaaaaccgtagagaatctcgaaaaatatgttgtcaaggatggcaaactgcctctcctactctccagaatgaaggaggttgggaaagtctttctcgccaccaattccgactataagtacaccgacaagattatgacctacctattcgattttccccacggaccgaagccaggaagcagtcaccgcccctggcagtcttacttcgacctaatcctggtagatgctcgcaaacctctgttttttggcgaaggaacggtacttagacaggtagacacaaagactggtaaactgaaaattggcacatacaccggcccactgcaacacggaattgtctactccgggggttctagcgatactatttgtgacctcttgggagctaaagggaaagatattctctatatcggcgatcatatttttggggacatactcaagtccaaaaagcgccagggttggcggaccttcttggtgatcccggagctcgcgcaggagctgcacgtgtggaccgataagagctcgctatttgaggagctgcagtcactggatattttccttgctgaactatataagcatttagatagttcatctaacgaaagaccggatatctcttctatccagagacggatcaaaaaggtgacccatgatatggacatgtgctatggcatgatggggtccctgttcagatcagggtctagacagaccttatttgcctcccaggtcatgcgctatgctgacctctacgctgcctcctttatcaatctgctgtattatcccttctcttacctgtttagggctgcccatgttctgatgccacacgaatcgactgtggaacatacacacgttgacatcaacgaaatggaaagccccctggccacccggaaccgtacgtctgtggactttaaagatacggactacaagagacaccagttgaccagaagtatctccgagattaagcctcctaacctcttccccctggctcctcaggaaatcactcactgccacgatgaagacgatgacgaggaggaagaggaagaggaggagtag

SEQ ID NO: 173229 - DNA, 1686 bp, Artificial Sequence
  derived and/or modified sequence
atgagcacctcctggagtgacagattacagaacgcagccgacatgccagccaacatggacaagcacgcactcaaaaagtacagacgggaagcctaccaccgcgtctttgtcaatagatctctggccatggaaaagatcaaatgcttcggtttcgatatggactacacactagccgtttacaaatcgccagagtatgaatctcttgggttcgaactcacagtggagcggctggtgtcgattggctatccgcaggagttgctcagctttgcctacgacagtacattccccactaggggcctggtcttcgacactctgtacgggaacctcctaaaagtcgatgcttacggcaatctccttgtctgcgcccatggattcaatttcataagggggcctgaaacccgtgagcagtaccctaacaagtttatacagagagacgatactgaacgcttttacatcctaaatacactgtttaatctgcccgagacatatctcttagcctgtctggtagatttctttacaaactgtccccgatatacttcctgcgagaccggcttcaaggacggagacctgttcatgtcataccgttcgatgtttcaggatgtgcgagatgctgtcgattgggttcactacaaaggatcattgaaagagaagaccgtagaaaacctggagaaatatgtcgtaaaagacggaaagcttcccctgctgctttcccggatgaaagaggtggggaaggtctttctggctaccaatagtgactataagtatacagataaaattatgacctacctgttcgacttcccacatggtcccaagcccggctcatcacacaggccttggcagtcatactttgacctgatcctggtggacgcacgaaaaccactgtttttcggtgagggcaccgtgttaaggcaggtagacactaagactggtaaactgaagatcggaacgtacacaggtcccctgcagcacggaatcgtatactctggtggatcaagcgacaccatctgtgacctcctgggagctaagggaaaggatatactatatatcggtgaccacatttttggcgacatcctgaagagcaagaagcggcagggctggagaaccttccttgttataccggagctcgcccaggaactgcacgtctggacagataagtcttcactctttgaggaattgcagtccttagatatattcctggctgaactatataaacatctggattcttctagcaacgagcgcccagacatatctagcatccaaaggcggatcaaaaaagttacacatgatatggacatgtgttatggcatgatgggctccctattccggagcggctccaggcagaccttgttcgcttctcaggtgatgaggtatgccgatctttacgcagcgagtttcattaatctgttgtactatcccttctcctatctgtttcgcgcagcccacgtgctgatgccacacgaaagcacggtcgaacacactcatgtagatatcaacgagatggagagtcctctcgccacgcgtaatcgtacgagtgtggactttaaagacacagactacaaacgacaccagctgaccaggtctatcagcgaaattaagccccccaacctctttccacttgcacctcaggagatcacgcattgtcatgacgaagacgatgacgaagaggaggaagaagaggaagaatag

SEQ ID NO: 173230 - DNA, 1686 bp, Artificial Sequence
  derived and/or modified sequence
atgagcacctcctggagcgaccggctgcagaatgctgctgacatgcctgccaacatggacaagcacgccctgaagaagtaccgccgggaggcctaccaccgggtgtttgtgaacagaagcctggccatggagaagatcaagtgctttggatttgacatggactacaccctggccgtgtacaagagcccagaatatgagagcctgggctttgagctgactgtggagcggctggtgtccatcggctacccccaggagctgctgagctttgcctatgacagcaccttccccacccggggcctggtgtttgacaccctgtatggcaacctgctgaaggtggatgcctacggcaacctgctggtgtgtgcccacggcttcaacttcatccggggccctgagacccgggagcagtaccccaacaagttcatccagagagatgacacagagcgcttctacatcctgaacaccctcttcaacctgcctgagacctacctgctggcctgcctggtggacttcttcaccaactgcccccgctacaccagctgtgaaacaggcttcaaggatggagacctcttcatgagctaccgctccatgttccaggatgtgagagatgctgtggactgggtgcactacaagggcagcctgaaggagaagacagtggagaacctggagaagtatgtggtgaaggatggcaagctgcccctgctgctgagcaggatgaaggaggtgggcaaggtgttcctggccaccaacagcgactacaagtacacagacaagatcatgacctacctgtttgacttcccccacggccccaagccaggcagcagccaccggccctggcagagctactttgacctgatcctggtggatgccaggaagcccctcttcttcggggagggcaccgtgctgcggcaggtggacaccaagacaggcaagctgaagattggcacctacacaggccccctgcagcacggcatcgtgtacagcggcggcagcagtgacaccatctgtgacctgctgggcgccaagggcaaggacatcctgtacatcggggaccacatctttggagacatcctgaagagcaagaagaggcagggctggaggaccttcctggtgattcctgagctggcccaggagctgcacgtgtggacagacaagagcagcctgtttgaggagctgcagagcctggacatcttcctggccgagctgtacaagcacctggacagcagcagcaatgaaagaccagacatcagcagcatccagaggcgcatcaagaaggtgacccatgacatggacatgtgctacggcatgatgggcagcctcttccgcagcggcagccggcagaccctgtttgccagccaggtgatgagatatgctgacctgtatgctgccagcttcatcaacctgctgtactaccccttctcctacctgttccgggccgcccacgtgctgatgcctcatgagagcacagtggagcacacccacgtggacatcaatgagatggagagccccctggccaccaggaacagaacatctgtggacttcaaggacacagactacaagaggcaccagctgaccaggagcatcagcgagatcaagccacccaacctcttccccctggccccccaggagatcacccactgccatgatgaagatgatgatgaggaggaggaggaggaggaggagtag

SEQ ID NO: 173231 - DNA, 1686 bp, Artificial Sequence
  derived and/or modified sequence
atgagcaccagctggagcgaccggctgcagaacgccgccgacatgcccgcaaatatggataagcatgcattgaagaagtataggagggaggcctaccacagagtatttgtgaatcgttctctagcaatggagaaaatcaaatgtttcgggttcgacatggactatacattagctgtatacaaatcccctgagtacgagagcctgggatttgaactgacagtcgagagactagtttctattggctatccccaagagcttctttctttcgcctatgactccaccttccccacacgcggactcgttttcgatactctgtacggtaacctgttgaaagtcgatgcgtacggcaacctgttggtttgtgcacatggcttcaacttcattcgtggtccagagactcgcgagcagtatcccaacaagttcatacaaagggatgacaccgagagattttacatcctgaatacgctgttcaacctacccgagacctatttgctggcctgccttgtcgattttttcactaactgccccagatatacaagctgtgagaccggattcaaggatggggatctgttcatgtcttatagaagtatgtttcaggatgtcagggatgcagtggactgggtccactacaaaggcagccttaaggaaaagaccgtggaaaatcttgagaaatatgttgttaaggacgggaagctccccctcctgctgagtcgcatgaaggaggtcgggaaggtctttctggccacaaactcggactataaatataccgataaaatcatgacttacctcttcgactttccgcacgggccgaagcccggctcaagccacaggccttggcagagctacttcgacctgatcttagtggatgctaggaagcctctgttcttcggtgaggggacagtcctgcgccaggtagataccaagaccggaaaattgaagatcggcacctatacaggcccccttcagcatggcatcgtgtactccggaggcagttccgacactatttgcgatctccttggagcaaaaggcaaagatattctgtacataggcgatcatatattcggagatatactgaaatctaagaagcgccaggggtggagaacgttcctggtgatccctgagctcgcgcaggagctgcatgtgtggaccgataagtccagcctttttgaggagcttcagtccctggatatattcctggctgagctctacaagcatctggactcttcatctaacgaacggcctgacatttctagcatccaacgacgaattaagaaggtgacccatgatatggacatgtgctatgggatgatggggtcactgttccgatcagggtcccgccaaacactgtttgcgagccaagttatgcggtatgccgatctgtacgcagcttcctttatcaatctcctttactatccctttagctacctattcagagcggcacacgtccttatgcctcatgagtccaccgtggaacacacccatgtggacatcaatgagatggaatctccgctggctaccagaaataggacgtcagtcgatttcaaagacacagactacaaacggcatcaacttacacgctcgatatcagaaattaaacctcctaacctattcccgctcgctccacaagagatcactcactgtcacgatgaagatgacgatgaggaggaggaggaggaggaggaatag

SEQ ID NO: 173232 - DNA, 1686 bp, Artificial Sequence
  derived and/or modified sequence
atgagcaccagctggagcgaccggctgcagaacgccgccgacatgcctgccaatatggataagcacgcactcaagaagtatcgacgagaagcctatcatagagtctttgtgaacaggagccttgctatggaaaaaattaagtgtttcggtttcgatatggactacacgctggccgtatataaatcaccagagtatgagagcctggggttcgaactgacagtagagcggctcgtcagcatcggttatccacaggaactcctcagtttcgcatatgactcaacgtttccaacacgaggattagtgttcgacacactgtatggcaaccttctaaaggttgacgcgtatgggaatctgttggtctgcgctcacggattcaattttatccggggtcccgagacgagggagcagtaccctaacaagttcatacagagggacgatactgaacggttctatattctcaatacattgtttaacctccccgagacttacttgctcgcatgcttggtagatttcttcaccaactgcccacgctatacatcttgcgagaccggcttcaaggatggtgatctgttcatgtcctatcgtagtatgttccaggatgtcagagatgctgtcgattgggtgcactataaggggtctctgaaggagaaaaccgtggaaaatcttgagaagtatgtggtgaaggacggaaagcttcccttgctcctgtccaggatgaaggaagttgggaaggtgttcctcgcaacaaactccgactacaagtacaccgacaagataatgacatatctgttcgacttccctcacgggcccaagcccggctccagccacaggccctggcagtcctactttgatctgattctggtggatgctagaaagcccctgttttttggagagggtacggtactcaggcaggtggacacgaagaccggtaaactaaagattggaacctatactggaccccttcagcatggaatagtgtactcgggcggaagcagcgataccatttgtgatctccttggcgccaaagggaaggacatcttgtacattggagatcacatttttggggacattctcaaaagcaaaaagcgtcagggttggagaacctttctcgtaattccagagctggcacaagagctgcatgtctggaccgacaagtcaagcctgtttgaagaactacagagtctcgacatctttctggccgagctgtataagcacctcgacagcagttccaatgagagacctgatatatcgtccatccagaggcgtatcaagaaagtcacccacgacatggacatgtgctacggcatgatggggagcctgtttaggagcgggtcccgacagaccctcttcgctagtcaggtgatgcgctacgctgacctatatgctgccagctttataaacctactgtactacccattcagttacctctttcgagctgcacatgtactgatgccccacgagtctacagttgaacacacccatgtcgatattaatgaaatggagtcacccctcgccacaaggaaccgcaccagtgtagacttcaaagatacagattataaacgtcatcaactcacaagatcaatcagtgagattaagcccccaaacttgtttcctctagccccccaggaaattacacattgtcacgacgaggatgacgacgaggaagaggaggaagaggaagagtag

SEQ ID NO: 173233 - DNA, 1686 bp, Artificial Sequence
  derived and/or modified sequence
atgagcactagctggagcgaccggctgcagaacgctgctgatatgccagccaatatggacaagcacgcgcttaagaagtacagaagagaggcctatcatagggtgttcgtgaaccgctctcttgctatggaaaaaataaaatgcttcggcttcgatatggactacaccctggccgtgtacaagagccctgagtacgagtctctcggattcgagttgacagtagagagactcgtgtctataggttatcctcaagagttgctgtcattcgcctacgactccacctttccgactagaggactggtcttcgataccctgtatggaaatctgctcaaggtcgacgcctatggcaacctgctagtgtgcgcccacggatttaatttcatccgcggacctgagacccgtgagcagtacccaaacaagttcattcagcgagacgacacagagcgcttctatattctgaatactctgtttaacctcccagagacatacttattagcctgtttggtggactttttcacaaactgtccgagatacacaagctgtgaaaccgggttcaaggacggagatttgttcatgtcatacaggagcatgttccaggacgtaagggatgccgtagactgggtgcattataagggaagcctgaaagagaagaccgttgagaatctggaaaaatatgtcgtgaaggatggtaaattgcccctgctgctttccaggatgaaggaagtgggcaaagtgtttcttgcaaccaacagtgactacaaatacacagataagatcatgacctatctttttgactttccgcacggtcctaagccaggttcttcgcacagaccatggcagagctacttcgatcttatcctggtcgacgccagaaagcctctcttcttcggagagggaactgtgctaagacaggtggacacaaagacaggtaagctgaaaattggaacgtacaccggcccactgcagcacggcatcgtatattcggggggttcatccgacactatttgcgacctgctcggggctaagggcaaggacatcttgtacattggggatcacatcttcggagacatccttaagtccaaaaagaggcaggggtggagaacttttttagttattcctgaattggctcaagagcttcatgtgtggaccgataagtcctcattattcgaagaattacagtctttggacatattcctggccgaactctataaacatctggattcctctagcaacgagcgcccagatatctcatccatccaacgccgtatcaagaaggtgacgcatgacatggatatgtgttatggaatgatgggcagcctgttccgcagcggatcccggcagactttgtttgccagtcaggtgatgcgatacgcagacctgtatgccgcttcctttatcaacctcctctactaccctttcagttatcttttcagggccgctcatgtgcttatgccacacgagtccaccgtggaacacacacacgtggacatcaatgagatggaatccccactcgctaccagaaaccgcacatcagttgactttaaggatacagattacaagcgccatcagctcactagaagtatctctgagatcaagccccctaatctgttcccactggcaccccaggaaatcacgcactgccacgacgaagacgatgatgaagaagaggaagaggaggaggagtag

SEQ ID NO: 173234 - DNA, 1686 bp, Artificial Sequence
  derived and/or modified sequence
atgagcacatcttggagcgatcgcctgcagaacgcagccgacatgccggcaaatatggacaaacacgcattgaagaaatatcggagggaagcgtatcaccgggtctttgtaaacagaagcctggcaatggagaaaattaaatgtttcggcttcgacatggattatacactggccgtgtacaaaagtccagagtatgaatccctgggcttcgagcttactgtcgagcggttggtgtcaatcggttatcctcaggagctgctgagctttgcatatgattctaccttcccaactcgagggctggtttttgataccttgtacggcaacctgctcaaagtcgacgcctacggaaacttgctggtgtgcgcccacgggttcaattttatacggggacctgaaacgagggagcagtaccctaacaaatttattcagagggacgacacagaaaggttctacattttgaacacactctttaaccttcctgaaacctacctgctcgcctgcctggttgactttttcaccaattgccccagatatacctcatgcgagacgggctttaaggatggggacctgtttatgagctacaggagtatgttccaggacgtgagagacgccgtggactgggtccactacaaggggtcccttaaagagaaaacagtggaaaatctggagaagtatgtcgttaaggatggcaaactgcctctcctgctgtcccggatgaaagaggtggggaaggtctttctggccacgaatagcgactacaagtatacggataagatcatgacctatctcttcgacttcccacatggccctaagcctgggagctctcataggccctggcagagctactttgacctgatcttagtcgacgcgcgaaagccacttttttttggggaggggactgtgctccgacaagtagatactaagactggcaagcttaagataggtacatataccggccctctacaacatggaattgtgtactccggtggctcctccgacaccatctgcgacttgcttggagctaaaggaaaggatatattatatattggcgatcacatttttggtgatatcctaaagagtaaaaagagacaaggctggcggacctttctggtgatccctgagcttgctcaagaactgcatgtgtggaccgacaaatctagcttgttcgaggagcttcagtccctggacatcttcctagctgaactttataaacacctcgatagttcttctaatgaacgcccagatatctcttcaattcagcggaggatcaagaaagtgactcacgacatggacatgtgttacggcatgatgggcagcctgtttcggagtggcagccgacagacgcttttcgcaagccaggtgatgcgatatgccgacctttatgcagcgagcttcatcaatttgctgtactatccattctcatacttgttccgtgcggctcacgtgttgatgcctcacgaatctactgtggagcacacacacgtggacatcaatgaaatggaatcccctctggctacaaggaaccggacctctgtggactttaaggatacggattataagagacatcaactcacacgttccatctctgagatcaagccacctaacttgttcccactggccccacaggagattactcactgccacgatgaagatgatgatgaagaagaggaggaagaagaagagtag

SEQ ID NO: 173235 - DNA, 5263 bp, Artificial Sequence
  derived and/or modified sequence
gagggcgcgcgttgaggcggctgcggcagttgcgcgctgggattgttgcggtgcgctggagccgaatacaaaatacagttaaaataaaatgtcaacctcctggagtgatcggttacagaatgcagcagatatgcctgctaacatggataagcatgccctgaaaaagtatcgtcgagaagcctatcatcgggtgtttgtgaaccgaagtttagcaatggaaaagataaagtgttttggttttgatatggattatacccttgctgtgtacaagtccccagagtatgagtcccttggttttgagcttactgtggagagattagtttctattggctatccccaggagttgctcagctttgcttatgattctacattccctaccaggggacttgtctttgacacactgtatggaaatcttttgaaagtcgatgcctatggaaacctcttggtctgtgcacatggatttaactttataaggggaccagaaactagagaacagtatccaaataaatttatccagcgagatgatactgaaagattttacattctgaacacactattcaacctaccagagacctacctgttggcctgcctagtagatttttttactaattgtcccagatataccagttgtgaaacaggatttaaagatggggacctcttcatgtcctaccggagtatgttccaggatgtaagagatgctgttgactgggttcattacaagggctcccttaaggaaaagacagttgaaaatcttgagaagtatgtagtcaaagatggaaaactgcctttgcttctgagccggatgaaggaagtagggaaagtatttcttgctaccaacagtgactataaatatacagataaaattatgacttacctgtttgacttcccacatggccccaagcctgggagctcccatcgaccatggcagtcctactttgacttgatcttggtggatgcacggaaaccactcttttttggagaaggcacagtactgcgtcaggtggatactaaaactggcaagctgaaaattggtacctacacagggcccctacagcatggtatcgtctactcaggaggttcttctgatacgatctgtgacctgttgggagccaagggaaaagacattttgtatattggagatcacatttttggggacattttaaaatcaaagaaacggcaagggtggcgaacttttttggtgattcctgaactcgcacaggagctacatgtctggactgacaagagttcacttttcgaagaacttcagagcttggatattttcttggctgaactctacaagcatcttgacagcagtagcaatgagcgtccagacatcagttccatccagagacgtattaagaaagtaactcatgacatggacatgtgctatgggatgatgggaagcctgtttcgcagtggctcccggcagaccctttttgccagtcaagtgatgcgttatgctgacctctatgcagcatctttcatcaacctgctgtattaccctttcagctacctcttcagggctgcccatgtcttgatgcctcatgaatcaacggtggagcacacacacgtagatatcaatgagatggagtctcctcttgccacccggaaccgcacatcagtggatttcaaagacactgactacaagcggcaccagctgacacggtcaattagtgagattaaacctcccaacctcttcccactggccccccaggaaattacacactgccatgacgaagatgatgatgaagaggaggaggaggaggaagaataaggaggaaaaccaaaaccccaagcacccattaaacaagtcctggcaggactcacaggaacaaacgaggtccctgttagggttctactcgggggagggagggggctccatgaaaggtacgtctgaaaagtttctgaagattttattatcatagatacttgttttggttttgtgtatctgtactctctgcagatggtccaaaattgtaatggagtctgtattagaagaaaataagggtaaaatcaggctgaactgcatgtatatggctccactgtggcttgtgacacttttaaaatcatccgtatgtcagtgtatctggatacacgaggaaaaggaaagagtctcagagtggaacaaagagtgggaagaggtgatctgtaatgttacaaattgtgctattactccaaggtccaacttttccagtgcattacatggtattgtatatcagtggagaaatgtattatttccatgatcaaatgtagtctctgttaaggtcaagttttcttttataagcctttaattcatcctcagtgactctggcaaggctgcttctctatcactggctttgcacagaagtatgctctacttgcgttgctttagggcaggattctattttgagggaaaagacagtatccttattaccttttgtttgtttaatagcacaaatgcttatttgttatccaaaaacaacctccttcttatctgtgataaatctatagaaagaatttagctgcaagtggacaaaggaacaagcccccagaaaagaaagggaagaactgccttcttatactacagaacatgcattagtgtgggctatatagctgtggctcatgctacccaattccagatttctttgtcctctaagagttgattgctgtatattaaaattgaacatcagaggatgggaagagggctctgtaagccagaaccttactaaagtagagggcacaatcagtgtgaataaattcacttcagaatctcaagtcaaggccaggcacggcggctcacgcctgtaatcccagcactttgggaggccgagacaggcggatcacctgaggtcgggagttcgagaccagccttaccaacatggagaaaccccatctctactaaaaatacaaaattacctgggcgtggtggtgcatgcctgtaatcccatcatctactcaggaggctgaggcaggagaattgcttgaacccaggaggcggaggttgcagtgagccaggattgtgccattgcactccagcctgggcaacaagaacaaaactccatctcaaaaaataaaaatcccaatcccaagtcgaaatcacctcttgttttaaacaagaatgaatcattactgtgtatgttagggtattaaaactgtttcaccagtacagtgaaagttgtttcaacattttaaacaaacagtggttatagactctttctttaaccattgtatattttcttccattcttgtcattggtcaataggggagggtagattagctgctccagaattcaataaagtgtaatatttctaacggtgactttgacctattctgtagtacaactgtaatagctattggtcttcaagtgggtttagatttggtgacatcagtttgatattctcttaaaggaaataaatattcaagaactgattatgttctaacatgattatattcatggtgttacataggcctcaattttttcacagaaagatttttggaacaggactgtgaagtgaggctttttaaaaaattattttataagcagagaacacagcctgataacttagtcaaggatatactgtctgtctcactactttggacttatatggcttcagattaagtcatccaagaaacatacatacattctaaatggtatatattgggaatatatgcccctttaaaagaatcaggtcagaaatgcaataacaattagactagactgttgcccgtgttaggagaatgtgtggtcatcctagttactaattactctcactcaagatggagatgttgtccagtttaacatagtcttaagttttcttaaacccaaataatttatgagtagcttattacatctgcagagctaccttattataatagtacatttacatattgtctcttttagagtaaggaccacatgattgctttgctttaatttaccactttttgtattgcatccatataagagtgtcttactagccagatgattccatggcaaatgattctctgggtccaaagatcggaaagtgaaaagcacacagctggaataagcaacaactccactgctagttacagctctccgtaggaccaccaaaacgtattcaagagctctaggattccataagacccagagcaaaatggtgcctctctgtatattattcttaagagtgtgctgggaagtcaatggtccatgggtaggcagggcagctgtaactgggctttttaaaacaaattatgagttttctctctgttgccagtagttaaggaagctgaacttaaaaggtatacttttttccttaaaaaaaaaaaaaaaaaaaaaaaaaaaaaaaatcctgcggagttttataccgtgagaagaccattctgccacttcttttgagaattttttcccaggcattttgaaaacactataggcattgtagaacaccaggcaaccccttcttggttgctagactgaactcccaaccttacagcatgtactgacaggtcccctagcctccccagcagttggtcagtggtacagcagacccaggccctgctgggtttccttgggcagaggaattgcccagtacattcattcatctctgcaaagatagatagtcagtgaaaactctgatggtgtacttcagaaaagttggtcacagccaagaaagtttagggttctatttagacctaagatttttctcttgccataagcatacctctgctgagacctaaaataataacgcaaacccttcaagctaccctaagatacttttagaagtcgtttttaatagaactacaaatccttaagtcacattagcattgttaagaaaccactttaaaaagccacatgcagttgcatgtcagatttagaagtattttgtccatgtttaggtatttctaaatcagatgtatttatttaagaaatactttgtcaacaactttaaagcccagcaatttttccaaggctgcctggtcattttaaaataaatactctgcttattcaccacgaatagcctgagacaactacatatttaagtctgtattagggtaggaaccttacccacattccatgttatggaaactatttaatctgtctttgatggtgggaaaaatggtaactatgatctagctattgccatacagttaacgctccaattcctcactgggcttagtagtttagggctcaaatacttatgtttctcatgatgatctttagtggtgatcagggaatccagcttttcttaaaagtttttcctcaaatagaacaatttcaaatgatacacaacttttgggaggccctgag

SEQ ID NO: 173236 - DNA, 3365 bp, Artificial Sequence
  derived and/or modified sequence
aatacaaaatacagttaaaataaaatgtcaacctcctggagtgatcggttacagaatgcagcagatatgcctgctaacatggataagcatgccctgaaaaagtatcgtcgagaagcctatcatcgggtgtttgtgaaccgaagtttagcaatggaaaagataaagtgttttggttttgatatggattatacccttgctgtgtacaagtccccagagtatgagtcccttggttttgagcttactgtggagagattagtttctattggctatccccaggagttgctcagctttgcttatgattctacattccctaccaggggacttgtctttgacacactgtatggaaatcttttgaaagtcgatgcctatggaaacctcttggtctgtgcacatggatttaactttataaggggaccagaaactagagaacagtatccaaataaatttatccagcgagatgatactgaaagattttacattctgaacacactattcaacctaccagagacctacctgttggcctgcctagtagatttttttactaattgtcccagatataccagttgtgaaacaggatttaaagatggggacctcttcatgtcctaccggagtatgttccaggatgtaagagatgctgttgactgggttcattacaagggctcccttaaggaaaagacagttgaaaatcttgagaagtatgtagtcaaagatggaaaactgcctttgcttctgagccggatgaaggaagtagggaaagtatttcttgctaccaacagtgactataaatatacagataaaattatgacttacctgtttgacttcccacatggccccaagcctgggagctcccatcgaccatggcagtcctactttgacttgatcttggtggatgcacggaaaccactcttttttggagaaggcacagtactgcgtcaggtggatactaaaactggcaagctgaaaattggtacctacacagggcccctacagcatggtatcgtctactcaggaggttcttctgatacgatctgtgacctgttgggagccaagggaaaagacattttgtatattggagatcacatttttggggacattttaaaatcaaagaaacggcaagggtggcgaacttttttggtgattcctgaactcgcacaggagctacatgtctggactgacaagagttcacttttcgaagaacttcagagcttggatattttcttggctgaactctacaagcatcttgacagcagtagcaatgagcgtccagacatcagttccatccagagacgtattaagaaagtaactcatgacatggacatgtgctatgggatgatgggaagcctgtttcgcagtggctcccggcagaccctttttgccagtcaagtgatgcgttatgctgacctctatgcagcatctttcatcaacctgctgtattaccctttcagctacctcttcagggctgcccatgtcttgatgcctcatgaatcaacggtggagcacacacacgtagatatcaatgagatggagtctcctcttgccacccggaaccgcacatcagtggatttcaaagacactgactacaagcggcaccagctgacacggtcaattagtgagattaaacctcccaacctcttcccactggccccccaggaaattacacactgccatgacgaagatgatgatgaagaggaggaggaggaggaagaataaggaggaaaaccaaaaccccaagcacccattaaacaagtcctggcaggactcacaggaacaaacgaggtccctgttagggttctactcgggggagggagggggctccatgaaaggtacgtctgaaaagtttctgaagattttattatcatagatacttgttttggttttgtgtatctgtactctctgcagatggtccaaaattgtaatggagtctgtattagaagaaaataagggtaaaatcaggctgaactgcatgtatatggctccactgtggcttgtgacacttttaaaatcatccgtatgtcagtgtatctggatacacgaggaaaaggaaagagtctcagagtggaacaaagagtgggaagaggtgatctgtaatgttacaaattgtgctattactccaaggtccaacttttccagtgcattacatggtattgtatatcagtggagaaatgtattatttccatgatcaaatgtagtctctgttaaggtcaagttttcttttataagcctttaattcatcctcagtgactctggcaaggctgcttctctatcactggctttgcacagaagtatgctctacttgcgttgctttagggcaggattctattttgagggaaaagacagtatccttattaccttttgtttgtttaatagcacaaatgcttatttgttatccaaaaacaacctccttcttatctgtgataaatctatagaaagaatttagctgcaagtggacaaaggaacaagcccccagaaaagaaagggaagaactgccttcttatactacagaacatgcattagtgtgggctatatagctgtggctcatgctacccaattccagatttctttgtcctctaagagttgattgctgtatattaaaattgaacatcagaggatgggaagagggctctgtaagccagaaccttactaaagtagagggcacaatcagtgtgaataaattcacttcagaatctcaagtcaaggccaggcacggcggctcacgcctgtaatcccagcactttgggaggccgagacaggcggatcacctgaggtcgggagttcgagaccagccttaccaacatggagaaaccccatctctactaaaaatacaaaattacctgggcgtggtggtgcatgcctgtaatcccatcatctactcaggaggctgaggcaggagaattgcttgaacccaggaggcggaggttgcagtgagccaggattgtgccattgcactccagcctgggcaacaagaacaaaactccatctcaaaaaataaaaatcccaatcccaagtcgaaatcacctcttgttttaaacaagaatgaatcattactgtgtatgttagggtattaaaactgtttcaccagtacagtgaaagttgtttcaacattttaaacaaacagtggttatagactctttctttaaccattgtatattttcttccattcttgtcattggtcaataggggagggtagattagctgctccagaattcaataaagtgtaatatttctaacggtgactttgacctattctgtagtacaactgtaatagctattggtcttcaagtgggtttagatttggtgacatcagtttgatattctcttaaaggaaataaatattcaagaactgattatgttctaacatgattata

SEQ ID NO: 173237 - DNA, 1686 bp, Artificial Sequence
  derived and/or modified sequence
atgagcaccagctggagcgacagactgcagaacgccgccgacatgcccgccaacatggacaagcacgccctgaagaagtacagaagagaggcctaccacagagtgttcgtgaacagaagcctggccatggagaagatcaagtgcttcggcttcgacatggactacaccctggccgtgtacaagagccccgagtacgagagcctgggcttcgagctgaccgtggagagactggtgagcatcggctacccccaggagctgctgagcttcgcctacgacagcaccttccccaccagaggcctggtgttcgacaccctgtacggcaacctgctgaaggtggacgcctacggcaacctgctggtgtgcgcccacggcttcaacttcatcagaggccccgagaccagagagcagtaccccaacaagttcatccagagagacgacaccgagagattctacatcctgaacaccctgttcaacctgcccgagacctacctgctggcctgcctggtggacttcttcaccaactgccccagatacaccagctgcgagaccggcttcaaggacggcgacctgttcatgagctacagaagcatgttccaggacgtgagagacgccgtggactgggtgcactacaagggcagcctgaaggagaagaccgtggagaacctggagaagtacgtggtgaaggacggcaagctgcccctgctgctgagcagaatgaaggaggtgggcaaggtgttcctggccaccaacagcgactacaagtacaccgacaagatcatgacctacctgttcgacttcccccacggccccaagcccggcagcagccacagaccctggcagagctacttcgacctgatcctggtggacgccagaaagcccctgttcttcggcgagggcaccgtgctgagacaggtggacaccaagaccggcaagctgaagatcggcacctacaccggccccctgcagcacggcatcgtgtacagcggcggcagcagcgacaccatctgcgacctgctgggcgccaagggcaaggacatcctgtacatcggcgaccacatcttcggcgacatcctgaagagcaagaagagacagggctggagaaccttcctggtgatccccgagctggcccaggagctgcacgtgtggaccgacaagagcagcctgttcgaggagctgcagagcctggacatcttcctggccgagctgtacaagcacctggacagcagcagcaacgagagacccgacatcagcagcatccagagaagaatcaagaaggtgacccacgacatggacatgtgctacggcatgatgggcagcctgttcagaagcggcagcagacagaccctgttcgccagccaggtgatgagatacgccgacctgtacgccgccagcttcatcaacctgctgtactaccccttcagctacctgttcagagccgcccacgtgctgatgccccacgagagcaccgtggagcacacccacgtggacatcaacgagatggagagccccctggccaccagaaacagaaccagcgtggacttcaaggacaccgactacaagagacaccagctgaccagaagcatcagcgagatcaagccccccaacctgttccccctggccccccaggagatcacccactgccacgacgaggacgacgacgaggaggaggaggaggaggaggagtag

SEQ ID NO: 173238 - protein, 115 aa, Artificial Sequence
  derived and/or modified sequence
MVCSPVTLRIAPPDRRFSRSAIPEQIISSTLSSPSSNAPDPCAKETVLSALKEKKKKRTVEEEDQIFLDGQENKRSCLVDGLTDASSAFKVPRPGPDTLQFTVDVFHFANDSRNM

SEQ ID NO: 173239 - protein, 187 aa, Artificial Sequence
  derived and/or modified sequence
MVCSPVTLRIAPPDRRFSRSAIPEQIISSTLSSPSSNAPDPCAKETVLSALKEKKKKRTVEEEDQIFLDGQENKRSCLVDGLTDASSAFKVPRPGPDTLQFTVDVFHFANDSRNMIYITCHLKVTLAEQDPDELNKACSFSKPSNSWFPVEGLADICQCCNKGDCGTPSHSRRQPRVVSQWSTSASL

SEQ ID NO: 173240 - DNA, 564 bp, Artificial Sequence
  derived and/or modified sequence
atggtttgctcgcccgtcaccctgcgtatagcaccaccagaccggcggttcagtcgcagtgctattccagagcagataatttcaagcacgctctcaagccctagtagcaatgccccagatccatgcgctaaggagacagtgttaagcgcactgaaggagaagaagaaaaagagaacagtagaagaggaggaccaaatttttctagatggccaggaaaacaagagaagctgcctggtcgatggacttaccgacgcgagctccgccttcaaagtcccccgtccaggccctgataccctacagtttaccgtggacgtttttcacttcgccaatgacagccggaacatgatttacattacctgccatctgaaagtcactctagccgagcaggatcctgatgaactgaacaaggcttgtagttttagtaaacctagcaattcctggttccctgtagaaggccttgcagacatttgtcagtgttgtaacaaaggggactgcggcaccccctcacacagccggaggcagcccagggtagtcagtcagtggtcgacttctgccagcctttag

SEQ ID NO: 173241 - DNA, 564 bp, Artificial Sequence
  derived and/or modified sequence
atggtgtgcagccctgtgaccctgcgcatcgcccccccagaccggcgcttcagccgcagcgccatccctgagcagatcatcagcagcaccctgagcagccccagcagcaatgccccagacccctgtgccaaggagaccgtgctgagcgccctgaaggagaagaagaagaagaggacagtggaggaggaggaccagatcttcctggatggccaggagaacaagaggagctgcctggtggatggcctgacagatgccagcagcgccttcaaggtgccccggcccggccctgacaccctgcagttcaccgtggatgtgttccactttgccaatgacagcaggaacatgatctacatcacctgccacctgaaggtgaccctggccgagcaggaccctgatgagctgaacaaggcctgcagcttcagcaagcccagcaacagctggttccctgtggagggcctggccgacatctgccagtgctgcaacaagggggactgtggcacccccagccacagccggcggcagccccgggtggtgtcccagtggagcaccagcgccagcctgtag

SEQ ID NO: 173242 - DNA, 564 bp, Artificial Sequence
  derived and/or modified sequence
atggtgtgcagccccgtgaccctgcggatcgccccccccgaccggaggtttagtagaagtgccattcccgaacagattatctcatctacactctcctccccctccagcaatgctcctgacccttgcgcgaaagagacagtgctgtccgctcttaaagagaaaaagaagaagagaactgtagaggaggaagaccagatttttctggatgggcaagagaataaacgaagctgcttagtcgacggcctgacggacgcctcctcagcttttaaagttcctcgtcccggtcccgataccttgcagttcacagtggatgtgttccatttcgccaacgacagtcgcaacatgatctacatcacttgccatctgaaggtcaccctcgcggaacaggatcctgacgaactgaacaaagcttgctcgtttagtaaaccctctaattcttggtttcctgtcgagggactggctgacatctgccagtgttgtaacaagggcgactgcgggacacccagccacagtcgccgccagcccagggtcgttagccagtggtctactagtgcgagcctatag

SEQ ID NO: 173243 - DNA, 1490 bp, Artificial Sequence
  derived and/or modified sequence
ggctgcggcggctggagcaggcgagcggcggcggccgatagcgagtgtcagggccggccggggcggcgcttctcggcctgtcgctggtcggcctcctactgtacctcgtgcctgctgcggctgcgctggcctggctggccgtggggactaccgcggcctggtggggactgagccgcgagccccgaggttcgcgccccttgtcctccttcgttcagaaggcgcgacatcggcgaacactgttcgcttcgcctccggccaagtcgacagccaacggaaacctcctagagccgcggaccctgctcgaaggacctgaccctgccgaactgctcctcatgggcagttacctgggcaagcccgggccgccgcagcccgcccccgctccggagggccaggacctgcggaataggcctggccgccgcccgcccgcccggcgccgcgctccacaccgccctccccgccgacccatcgcgttcaccacttttacccctctctccccactcctcttctccgaccctccgggaggccttccccacgggatcgtgggactttaccagatcggtttgtaataacacctcgaagacgctatccgatccatcaggcccagtattcctgtccgggggtacttcccacagtgtgctggaatggttatcacaagaaggctgtgctgtcccctcgcaactccaggatggtgtgtagcccagtgactctgaggatcgcccctcctgacagaagattttcgcgttctgcgataccagagcagataatcagctcaacactgtcctcaccatcaagtaatgccccagacccatgtgcaaaggagactgtactgagtgccctcaaagagaagaagaagaaaaggacagtggaggaagaagaccaaatattccttgatggccaggaaaataaaagaagctgtcttgtcgacggtctcactgatgcctcttctgcattcaaagttcctcgacccgggccagatacactccagttcacagtggatgtcttccactttgctaatgactccagaaacatgatatacatcacctgccacctgaaggtcaccctagctgagcaggacccagatgaactcaacaaggcctgttccttcagcaagccttccaacagctggttcccagtggaaggcctggctgacatctgtcaatgctgtaacaaaggtgactgtggcactccaagccattccaggaggcagcctcgtgtcgtgagccagtggtccacgtctgcttccctgtaaccgcaggcatgtgacagaagaagcagatgtcaccgtggggccactgatcttcctggacaggaggggtgaccatgaagtagagcagtgggctttgccttctgacacctcagtggtgctgctgggcgtaggcctggctgtggtggtgtccctgactctgactgctgttatcctggttctcaccaggaggtgtcgcactgcctcccaccctgtgtctgcttccgaataaaagaagaaagcaata

SEQ ID NO: 173244 - DNA, 564 bp, Artificial Sequence
  derived and/or modified sequence
atggtgtgcagccccgtcaccctcaggattgcaccacccgatcgacggttctcccgaagtgccatccctgagcaaataataagctcaacactctcgagcccttccagtaacgcccctgacccatgcgcaaaagagactgtgctgagcgccctcaaggaaaagaaaaaaaagcgcaccgtggaagaggaggatcagatattcctcgatggacaagaaaataaaagatcgtgcttggtggatggacttacggacgcctcctctgcatttaaagtgccgagaccaggaccagatactttgcagtttactgtagacgtgtttcattttgctaacgatagcagaaacatgatctatatcacttgccatctgaaggttaccctggcagagcaggaccctgacgagttgaataaggcgtgctcattctctaagccctccaactcttggtttcccgtagaggggcttgctgacatctgtcagtgctgtaacaaaggtgattgcggtactcctagccactcccgcagacagcccagggtcgtcagccagtggtctacaagcgcatcattgtag

SEQ ID NO: 173245 - DNA, 564 bp, Artificial Sequence
  derived and/or modified sequence
atggtgtgcagccccgtgaccctgagaatcgccccccccgacagaagattcagcagaagcgccatccccgagcagatcatcagcagcaccctgagcagccccagcagcaacgcccccgacccctgcgccaaggagaccgtgctgagcgccctgaaggagaagaagaagaagagaaccgtggaggaggaggaccagatcttcctggacggccaggagaacaagagaagctgcctggtggacggcctgaccgacgccagcagcgccttcaaggtgcccagacccggccccgacaccctgcagttcaccgtggacgtgttccacttcgccaacgacagcagaaacatgatctacatcacctgccacctgaaggtgaccctggccgagcaggaccccgacgagctgaacaaggcctgcagcttcagcaagcccagcaacagctggttccccgtggagggcctggccgacatctgccagtgctgcaacaagggcgactgcggcacccccagccacagcagaagacagcccagagtggtgagccagtggagcaccagcgccagcctgtag

SEQ ID NO: 173246 - protein, 390 aa, Artificial Sequence
  derived and/or modified sequence
MEDPTLYIVERPLPGYPDAEAPEPSSAGAQAAEEPSGAGSEELIKSDQVNGVLVLSLLDKIIGAVDQIQLTQAQLEERQAEMEGAVQSIQGELSKLGKAHATTSNTVSKLLEKVRKVSVNVKTVRGSLERQAGQIKKLEVNEAELLRRRNFKVMIYQDEVKLPAKLSISKSLKESEALPEKEGEELGEGERPEEDAAALELSSDEAVEVEEVIEESRAERIKRSGLRRVDDFKKAFSKEKMEKTKVRTRENLEKTRLKTKENLEKTRHTLEKRMNKLGTRLVPAERREKLKTSRDKLRKSFTPDHVVYARSKTAVYKVPPFTFHVKKIREGQVEVLKATEMVEVGADDDEGGAERGEAGDLRRGSSPDVHALLEITEESDAVLVDKSDSD

SEQ ID NO: 173247 - protein, 345 aa, Artificial Sequence
  derived and/or modified sequence
MEDPTLYIVERPLPGYPDAVDQIQLTQAQLEERQAEMEGAVQSIQGELSKLGKAHATTSNTVSKLLEKVRKVSVNVKTVRGSLERQAGQIKKLEVNEAELLRRRNFKVMIYQDEVKLPAKLSISKSLKESEALPEKEGEELGEGERPEEDAAALELSSDEAVEVEEVIEESRAERIKRSGLRRVDDFKKAFSKEKMEKTKVRTRENLEKTRLKTKENLEKTRHTLEKRMNKLGTRLVPAERREKLKTSRDKLRKSFTPDHVVYARSKTAVYKVPPFTFHVKKIREGQVEVLKATEMVEVGADDDEGGAERGEAGDLRRGSSPDVHALLEITEESDAVLVDKSDSD

SEQ ID NO: 173248 - DNA, 1173 bp, Artificial Sequence
  derived and/or modified sequence
atggaggacccgacgctgtatattgtggagcggccccttcccgggtatccagacgcagaagccccagaaccatctagcgccggggctcaggccgccgaagaaccgtcaggtgcaggatccgaggagctaatcaagtcagaccaggtcaacggagtgctagtcctgagcctgctggataagattatcggagctgtggaccagattcagctgacgcaggcacagttagaagaacgccaggccgagatggagggtgccgttcagtccattcagggagagttgtctaaattaggaaaagcgcatgccacaacatcaaacactgttagtaaactcctcgaaaaagtgcgaaaggtaagcgtcaatgtgaaaacagtgcgagggtctctggagcgccaagccggtcagataaagaagctcgaggtgaacgaagcggagctgctgagaaggcgcaatttcaaagttatgatctatcaggacgaggtgaaactccctgccaagctgtccatttccaagagcctgaaggagtcggaggcgctacccgagaaggagggcgaggaattaggagagggcgaacggcccgaggaggacgcggcagctttagaattgagcagcgacgaagctgtcgaggttgaggaggtcattgaagaatcacgcgccgagcgcatcaaacgcagcgggctgagaagagttgatgatttcaagaaggcctttagtaaagaaaaaatggaaaaaactaaagtccggaccagggagaacctggaaaagaccaggctcaaaaccaaagagaacctggagaaaaccagacataccttagaaaagaggatgaataaactaggcacacgtctggttcccgcagaacgcagagagaagctgaaaacttcaagggataagttacggaagtcctttactcccgatcacgtagtgtacgcgaggagcaagactgcggtgtataaggtccctccattcactttccatgtgaagaagattcgcgagggacaggtcgaagtgctgaaagctacagagatggtggaggtcggagccgatgatgatgagggaggcgcagagaggggagaggccggcgacttgcggcgaggttcatcacctgacgtgcatgccctgctggaaatcacagaagagtcagatgcggtgctggtcgataaatccgattccgattag

SEQ ID NO: 173249 - DNA, 1038 bp, Artificial Sequence
  derived and/or modified sequence
atggaggatcccactttgtacattgtagaacgtcctctgccaggataccctgacgccgttgatcagatccaattgactcaagcacaactggaagagcgtcaggccgaaatggaaggggcagtccagagcatccagggagagctgtccaagctgggtaaagcacatgcaacgaccagcaatacagtctccaaattacttgaaaaagtccggaaagtgtcagtgaatgtgaagacagtaaggggaagtcttgagcgccaggctggacagatcaaaaaactggaggttaatgaagcagagctgttgcggcgtcgaaacttcaaggttatgatttaccaggacgaagtgaaattgccagcaaaactgtcgatatcaaagtcattaaaggaatcagaagccctaccggagaaggaaggtgaggagctgggcgagggagaaagaccagaggaagacgcggccgccttagaacttagctccgatgaggccgtggaggtcgaggaggtgatagaagagtcccgagccgaacggattaaaaggtccggcctacggcgagtcgacgattttaagaaagccttttctaaggagaagatggaaaaaaccaaagtgcggacaagagaaaacctggagaaaacacgcctcaaaacaaaggaaaatctcgagaaaacgaggcacacccttgagaagaggatgaataaactgggcactcggttggtaccggccgagaggagagagaagttgaaaacaagcagagataagctccggaagtcttttaccccggaccacgttgtttatgctcgttccaaaaccgcggtctacaaggtgccaccttttacatttcatgtgaaaaaaatacgcgaagggcaggtggaggttctgaaagccaccgaaatggtggaagtgggcgcagatgacgatgagggaggagccgagaggggcgaggccggagaccttagacggggtagctcacctgacgtgcacgcattgctcgagataaccgaagagtctgatgctgtcttagttgataaatctgactcggactag

SEQ ID NO: 173250 - DNA, 1173 bp, Artificial Sequence
  derived and/or modified sequence
atggaggaccccaccctgtacatcgtggagcggcccctgcccggctacccagatgctgaggcccctgagcccagcagcgctggggcccaggccgctgaggagcccagcggggccggcagcgaggagctgatcaagagtgaccaggtgaatggagtgctggtgctgagcctgctggacaagatcatcggggctgtggaccagatccagctgacccaggcccagctggaggagcggcaggccgagatggagggcgctgtgcagagcatccagggcgagctgagcaagctgggcaaggcccacgccaccaccagcaacacagtgtccaagctgctggagaaggtgaggaaggtgtctgtgaatgtgaagacagtgcggggcagcctggagcggcaggccggccagatcaagaagctggaggtgaatgaagctgagctgctgcggcggaggaacttcaaggtgatgatctaccaggatgaggtgaagctgcctgccaagctgagcatcagcaagagcctgaaggagagcgaggccctgcctgagaaggagggggaggagctgggggagggggagaggcctgaggaggatgctgctgccctggagctgagcagtgatgaggccgtggaggtggaggaggtgattgaggagagcagagctgagcgcatcaagaggagcggcctgcggcgggtggatgacttcaagaaggccttcagcaaggagaagatggagaagaccaaggtgaggacccgggagaacctggagaagacccggctgaagaccaaggagaacctggagaagaccaggcacaccctggagaagaggatgaacaagctgggcacccggctggtgcctgctgagcggcgggagaagctgaagaccagccgggacaagctgaggaagagcttcaccccagaccacgtggtgtatgcccggagcaagacagctgtgtacaaggtgccccccttcaccttccacgtgaagaagatccgggagggccaggtggaggtgctgaaggccacagagatggtggaggtgggcgcagatgatgatgaaggaggagctgagcggggggaggccggggacctgcggcggggcagcagcccagatgtgcacgccctgctggagatcacagaggagagtgatgctgtgctggtggacaagagtgacagcgactag

SEQ ID NO: 173251 - DNA, 1038 bp, Artificial Sequence
  derived and/or modified sequence
atggaggaccccaccctgtacatcgtggagcggcccctgcccggctacccagatgctgtggaccagatccagctgacccaggcccagctggaggagcggcaggccgagatggagggcgctgtgcagagcatccagggcgagctgagcaagctgggcaaggcccacgccaccaccagcaacacagtgtccaagctgctggagaaggtgaggaaggtgtctgtgaatgtgaagacagtgcggggcagcctggagcggcaggccggccagatcaagaagctggaggtgaatgaggccgagctgctgcggcggaggaacttcaaggtgatgatctaccaggatgaggtgaagctgcctgccaagctgagcatcagcaagagcctgaaggagagcgaggccctgcctgagaaggagggggaggagctgggggagggggagaggccagaagaagatgctgctgccctggagctgagcagtgatgaagctgtggaggtggaggaggtgattgaggagagcagagctgagcgcatcaagaggagcggcctgcggcgggtggatgacttcaagaaggccttcagcaaggagaagatggagaagaccaaggtgaggacccgggagaacctggagaagacccggctgaagaccaaggagaacctggagaagaccaggcacaccctggagaagaggatgaacaagctgggcacccggctggtgcctgctgagcggcgggagaagctgaagaccagccgggacaagctgaggaagagcttcaccccagaccacgtggtgtatgcccggagcaagacagctgtgtacaaggtgccccccttcaccttccacgtgaagaagatccgggagggccaggtggaggtgctgaaggccacagagatggtggaggtgggcgcagatgatgatgagggcggcgctgagcggggggaggccggggacctgcggcggggcagcagcccagatgtgcacgccctgctggagatcacagaggagagtgatgctgtgctggtggacaagagtgacagcgactag

SEQ ID NO: 173252 - DNA, 1173 bp, Artificial Sequence
  derived and/or modified sequence
atggaggaccccaccctgtacatcgtggagcggcccctgcccggctatccagatgccgaggccccagaaccatcctctgccggggcacaggccgcggaggaacccagtggcgctgggtctgaagagttgataaaaagcgaccaggtaaatggcgtgctggtcctgtctctcctcgacaagatcatcggagcagtggaccaaatccaactgacacaggctcaactggaagaaaggcaggcagagatggaaggagcagttcagtccatacaaggcgagctgagcaagttaggaaaggcacacgcaacgactagcaacactgtgagcaaattgctggagaaggttcgcaaggtaagcgtgaacgtgaagactgtacgtgggagcttagagcggcaagcgggacaaatcaaaaaattggaagtcaatgaagcagaattgctacggcgacggaactttaaggtgatgatataccaggatgaagttaagctgcctgcgaaattatctattagtaagagtctgaaagagtcggaagcgcttcctgaaaaagaaggtgaagaactcggcgagggggagcgtccagaggaggatgccgcagctttggaactctcatcagacgaagcggtagaagtagaggaggtgattgaggagtctagggctgaaaggataaagcgaagcggactgcgacgcgtcgatgatttcaagaaggcttttagcaaagaaaagatggaaaagacaaaagtgcgcaccagggagaatctggagaagacacgactcaagacaaaggagaacctggaaaagactcggcataccctggaaaagagaatgaacaagttgggcacgagactggtacccgccgagaggagggagaagctaaaaaccagtagagataagcttaggaagagtttcacacctgaccatgtggtgtacgcccgttccaagactgctgtgtataaagtgcctcccttcactttccatgtcaaaaagattagagaaggccaagtcgaggtcctcaaagccaccgagatggtggaagtgggcgccgacgacgatgagggtggcgctgaacggggagaagcaggcgacctgagacgggggagctctcccgatgtacatgctctgctggaaatcactgaggagagcgatgcagtattagtcgacaaaagtgactccgactag

SEQ ID NO: 173253 - DNA, 1038 bp, Artificial Sequence
  derived and/or modified sequence
atggaggaccccaccctgtacatcgtggagcggcccctgcccggctaccccgatgctgtggatcagatacaactgacacaagcccaactagaggaacgacaggctgaaatggaaggagctgtgcagtccattcagggcgagctctccaagctgggaaaggcgcacgccacaacctctaacactgtgagcaagctcctggagaaagtgaggaaagtcagcgtgaacgtgaaaacagttcggggcagcctggagagacaggccggccaaataaagaagctagaagttaatgaggccgaactgctccggcgtcgaaattttaaagttatgatttatcaggatgaggtaaaactccccgccaagttgtccatcagcaagtccctcaaggaaagcgaagccttacccgagaaggagggggaggaactaggagaaggggaacggccagaggaggatgcagctgccctggagctctccagtgatgaagcagtcgaggtggaggaggtcatcgaagagtcacgtgccgagcggatcaagcgcagtggcctgcgtcgtgtcgatgacttcaagaaggctttttctaaagagaagatggaaaagactaaggtgaggaccagggagaatctcgaaaaaactaggctcaagactaaagagaacttagaaaagaccagacatacactagaaaagaggatgaataagctgggaacccgactggtgcccgccgaaagacgggagaaacttaagacctccagagataagctgagaaaaagtttcactccggaccatgtggtgtacgcgaggagcaaaactgccgtttacaaagttccaccatttactttccacgttaaaaagattagagagggccaggtcgaagtgctgaaggccactgagatggtggaggtgggagcagacgacgacgaggggggggctgaacggggggaagccggcgatctgcggaggggctcaagccccgacgtccacgccttgttggagatcactgaagaaagcgacgctgtgctagtggataaatctgacagtgactag

SEQ ID NO: 173254 - DNA, 3633 bp, Artificial Sequence
  derived and/or modified sequence
aatcagcgatcagactccggagtttggcccgggagctggggagctcaccgatcccccgcccagcagttctggccgctgtcccggtgcgcacggacgtggctcgagtttcctctgctctccgctctcgcccgctagctctcctcccttccgctcctgcttctctccgggtctcccgctccagctccagccccacccggccggtcccgcacggctccgggtagccatggaggaccccacgctctatattgtcgagcggccgcttcccgggtaccccgacgccgaggccccggagccttcctccgctggggctcaggcagcggaggagccgtcgggggccggctcagaagagctgatcaagtcggaccaggtgaacggcgtgctggtgctgagcctcctggacaaaatcatcggggccgtagaccagatccagctgactcaagcacagctggaggagcggcaggcggagatggagggcgcagtgcagagcatccagggcgagctgagcaagctgggcaaggcgcacgccaccacgagcaatacggtgagcaagctgctggagaaggtgcgcaaggtcagcgtcaacgtgaagaccgtgcgcggcagcctggagcgccaggcggggcagatcaagaagctggaggtcaacgaggccgagctgctgcggcgccgcaactttaaagtcatgatctaccaggatgaagtgaagctgccggccaaactgagcatcagcaaatcgctgaaagagtcggaggcgctgccagagaaggagggcgaggagctgggcgagggcgagcggcccgaggaggacgcagcggcgctggagctttcgtcggacgaggcggtggaggttgaggaggttattgaggagtcccgcgcagagcgtatcaagcgcagcggcctgcggcgcgtggacgacttcaagaaggccttctccaaggagaagatggagaagaccaaggtgcgtacccgcgagaacctggagaagacgcgcctcaagaccaaggaaaacctggagaagacgcggcacaccctggagaagcgcatgaacaagctgggcacgcgcctggtgcccgccgagcggcgcgagaaactgaagacgtcgcgggacaagttgcgcaaatccttcacgcccgaccacgtggtgtacgcgcgctccaagaccgcggtctacaaggtgccacccttcaccttccacgtcaagaagatccgcgagggccaggtggaagtgctcaaggccaccgagatggtggaggtgggcgccgacgacgacgagggcggcgcggagcgcggggaggccggcgacctgcggcgcgggagcagccccgacgtgcacgcgctgctggagatcaccgaggagtcggacgccgtgctggtggacaagagcgacagcgactgagccgcccccgctgccacccaccccattcctcgctccttccgaacttcctctttcgcattctctctcggctcgagctggctgagatttttctaaattgaaaacacgcccccctccccacacctccaggaactccactcccagtcttagagctgttaggacccgatggggaggcagcccccgcagtggacaacccccgcttggacacagtccgagtggaatgggaagggaatggtcaatccctgtcctggttgtccaagtcgggatctcagaggaaattgcagtgattccacggttaggcccccctgggggggctgccttcccctcagcctctccccacaccacccacccagctgctgtcattccgctcactgagctcttcttcattctcaccctgatccctgggggactcaaagccaaaactgcccaaagaggaaagattgaatcctaaaggggatccctgcccccatgggaggccccctactagaaggacgtgaaagcagcttttgggggaaactgaggcagtggggaagacagagcagaatgagccctcaccctggctgggggtccagcacaggctgtatctgcagagggtcccagaggaacgctggagccaagagaagccctgggaaggaggggtggggaacgacatgcatgtgagggatggcacactgatgtgtttatgcacctgtacacaggagcgcatggccatggctttggaaaggagaatggaaaaatagaagaaggtcggccgggcttggtggcttatgcctgtaaccccagcactttgggaggccgaggtgggcggatcacctgaagtcaggagttcgggaccagcctggcaaacaccccatctctactaagcgaaaacccatctctactaaaattacaaaaattagctgggcatggttgcgcatgcctgtaatcccagctactttggaggctgaggtggggagaattgcttgaacctgggaggtggaggttgcagtgagccaaggtcgcgacactgcactccagcctgggtgacagagtgagactccatctcaacagaaggaaaaaaaaggaaaataggagaaggtggaaatgggtgaagagagaagtcccctcactagctgcatgagaaatctatcttactgtggttctccatgggcagcaggaccatttttcagaatcaagagggaggacagtgtgagaaggcgatgatccaaagaagacagagaggtcagccccacccgatccctcaaatgggctcttggaggcacccccaggggcagcccatttctcaaagtccagaaaattagggtcccagaagggggcagcagcaggctgggagttaggagggagagcagggtgccggccctgccaccaagttgagagctggaggggaggtggggagagaacatcacagagcagccagccctggttcactcctggcagtttcttctcaagctccttccctaggagcatggtggcacgtgcctgtggtctcagctacttgggaggctgaggcgggaggatcgccagagcccaggagtttgaggctgcagtgagctatgagggtgcctctgtgctccatcctaggcaacagagtgatacgctgtttaaaaaggaaaaaatccttccctagagctagtatcctaaagctgcagagctagcccagacctcattggtttccttgtccttggggtgcttttcctgaatctttgcgggtgaagggagtgttgctcccagtccagaggcctgattctgtttggactgggttctcaagacacgaccaggttctcaagacacgagtccccttgttcctccccattaaagggggtttgtcagaagcaagaacagcccctctccccagtcacagcctgaagggaggccccgagagcttcctccttccccccacctgctccttaccttctctgccctgctttttagaactgcagttcattgttttaagggattgggggagggagcctggggacacaaaccttttatacaatacaaagctttgctttttttttttttttcttccttttccctttctcggttctcttctctcctctgaatggctgaagacccctctgccgagggaggttggggattgtgggacaaggtcccttggtgctgatggcctgaaggggcctgagctgtgggcagatgcagttttctgtgggcttggggaacctctcacgttgctgtgtcctggtgagcagcccgaccaataaacctgcttttctaaaagg

SEQ ID NO: 173255 - DNA, 1927 bp, Artificial Sequence
  derived and/or modified sequence
atggaggaccccacgctctatattgtcgagcggccgcttcccgggtaccccgacgccgtagaccagatccagctgactcaagcacagctggaggagcggcaggcggagatggagggcgcagtgcagagcatccagggcgagctgagcaagctgggcaaggcgcacgccaccacgagcaatacggtgagcaagctgctggagaaggtgcgcaaggtcagcgtcaacgtgaagaccgtgcgcggcagcctggagcgccaggcggggcagatcaagaagctggaggtcaacgaggccgagctgctgcggcgccgcaactttaaagtcatgatctaccaggatgaagtgaagctgccggccaaactgagcatcagcaaatcgctgaaagagtcggaggcgctgccagagaaggagggcgaggagctgggcgagggcgagcggcccgaggaggacgcagcggcgctggagctttcgtcggacgaggcggtggaggttgaggaggttattgaggagtcccgcgcagagcgtatcaagcgcagcggcctgcggcgcgtggacgacttcaagaaggccttctccaaggagaagatggagaagaccaaggtgcgtacccgcgagaacctggagaagacgcgcctcaagaccaaggaaaacctggagaagacgcggcacaccctggagaagcgcatgaacaagctgggcacgcgcctggtgcccgccgagcggcgcgagaaactgaagacgtcgcgggacaagttgcgcaaatccttcacgcccgaccacgtggtgtacgcgcgctccaagaccgcggtctacaaggtgccacccttcaccttccacgtcaagaagatccgcgagggccaggtggaagtgctcaaggccaccgagatggtggaggtgggcgccgacgacgacgagggcggcgcggagcgcggggaggccggcgacctgcggcgcgggagcagccccgacgtgcacgcgctgctggagatcaccgaggagtcggacgccgtgctggtggacaagagcgacagcgactgagccgcccccgctgccacccaccccattcctcgctccttccgaacttcctctttcgcattctctctcggctcgagctggctgagatttttctaaattgaaaacacgcccccctccccacacctccaggaactccactcccagtcttagagctgccttcccctcagcctctccccacaccacccacccagctgctgtcattccgctcactgagctcttcttcattctcaccctgatccctgggggactcaaagccaaaactgcccaaagaggaaagattgaatcctaaaggggatccctgcccccatgggaggccccctactagaaggacgtgaaagcagcttttgggggaaactgaggcagtggggaagacagagcagaatgagccctcaccctggctgggggtccagcacaggctgtatctgcagagggtcccagaggaacgctggagccaagagaagccctgggaaggaggggtggggaacgacatgcatgtgagggatggcacactgatgtgtttatgcacctgtacacaggagcgcatggccatggctttggaaaggagaatggaaaaatagaagaaggtcggccgggcttggtggcttatgcctgtaaccccagcactttgggaggccgaggtgggcggatcacctgaagtcaggagttcgggaccagcctggcaaacaccccatctctactaagcgaaaacccatctctactaaaattacaaaaattagctgggcatggttgcgcatgcctgtaatcccagctactttggaggctgaggtggggagaattgcttgaacctgggaggtggaggttgcagtgagccaaggtcgcgacactgcactccagcctgggtgacagagtgagactccatctcaacagaagg

SEQ ID NO: 173256 - DNA, 1173 bp, Artificial Sequence
  derived and/or modified sequence
atggaggacccaacactttacattgtcgagcggcctcttccaggctatcccgatgcggaggcccctgagccctcctcagcaggcgctcaagccgctgaggagccttccggcgcaggatccgaagagcttattaagagtgatcaggtcaacggcgtgctagtactttctctgctggataaaattattggcgcagtggaccagattcaactcacacaggcacagcttgaagagagacaagcagagatggagggagccgttcagagtatccagggcgaattgagtaagttaggcaaggctcatgccactaccagcaataccgtatccaaactcctcgagaaggtgagaaaggttagtgtgaatgtaaagaccgtcagaggctctttggagagacaggctggccagatcaagaagctggaggtcaatgaagcagaactcctgcggagaagaaactttaaagtcatgatatatcaggatgaggtaaagttaccagcaaaacttagcattagcaaatctctcaaagagtccgaggcactcccagagaaggagggcgaggagctcggagagggagaaagaccggaagaagatgccgctgccttggagctgtcttcagacgaggccgttgaagtagaggaagttatagaggaaagtagggctgaaagaatcaagagatcgggccttcgaagagtggacgactttaagaaggccttcagcaaagagaaaatggaaaagacgaaagtaagaaccagggaaaatctcgaaaaaactcgactgaagactaaagagaatctcgaaaagacgaggcacacactggagaagcgcatgaacaagttaggaacaagattagtccctgctgaaaggagagagaaattgaaaacatctcgagacaagctgcggaagagttttacccctgaccatgtggtttatgcccgttccaaaaccgccgtgtataaagtgcccccattcactttccatgttaagaagattagggaggggcaagtggaagtgctcaaggccaccgagatggtggaggtgggggctgacgatgatgaaggtggcgctgaaagaggagaagcaggcgatctgaggagaggatcttcccctgatgtgcacgctttgttggaaatcaccgaagaatcggacgccgtcctggttgataagagtgatagtgattag

SEQ ID NO: 173257 - DNA, 1038 bp, Artificial Sequence
  derived and/or modified sequence
atggaagaccctactttatacattgtggagagacctttaccaggctaccccgacgccgtggaccagatccagttgacccaagcccagcttgaggagagacaggctgaaatggagggcgctgtgcagtcaatacagggtgagctttcaaagctaggtaaagcccatgccacaacaagcaacacagtctctaagttactggaaaaagtaagaaaggtctcggttaatgtcaagaccgttaggggcagcctggagcgtcaggccggtcagatcaaaaagttagaggtgaatgaagccgagttgctcaggaggcgcaattttaaagtgatgatttaccaggacgaggtcaagcttccagccaaactgagcattagcaagagtctaaaggaatccgaagctttgcccgaaaaagagggagaagaattgggcgagggggagaggcccgaggaagatgccgcagcgctcgaactttctagcgatgaagcagtggaggtggaggaggtaattgaagagtcacgtgctgagagaatcaagagaagcgggctgcgccgtgtggacgactttaagaaggcgtttagcaaggagaagatggagaagactaaagtaaggacccgggaaaacctagaaaagactcgcctcaaaacaaaggagaacctggagaagacgagacataccctggagaaaaggatgaataaactgggaactcggctggttccggctgaacgaagagagaagcttaagactagccgcgataagcttcgcaagtcattcaccccggaccacgttgtgtatgcccgatcgaaaaccgcagtctataaggtgccgccatttacatttcatgtcaagaagatcagagaaggtcaggtcgaggtattgaaggctacagagatggttgaagtgggcgcagacgacgatgagggcggagccgagcgaggagaggctggggatctgagacggggttcttctcccgatgtgcacgccctgctggaaattaccgaagaaagcgacgctgtactcgtagacaaaagtgactcagattag

SEQ ID NO: 173258 - DNA, 1173 bp, Artificial Sequence
  derived and/or modified sequence
atggaggaccccaccctgtacatcgtggagagacccctgcccggctaccccgacgccgaggcccccgagcccagcagcgccggcgcccaggccgccgaggagcccagcggcgccggcagcgaggagctgatcaagagcgaccaggtgaacggcgtgctggtgctgagcctgctggacaagatcatcggcgccgtggaccagatccagctgacccaggcccagctggaggagagacaggccgagatggagggcgccgtgcagagcatccagggcgagctgagcaagctgggcaaggcccacgccaccaccagcaacaccgtgagcaagctgctggagaaggtgagaaaggtgagcgtgaacgtgaagaccgtgagaggcagcctggagagacaggccggccagatcaagaagctggaggtgaacgaggccgagctgctgagaagaagaaacttcaaggtgatgatctaccaggacgaggtgaagctgcccgccaagctgagcatcagcaagagcctgaaggagagcgaggccctgcccgagaaggagggcgaggagctgggcgagggcgagagacccgaggaggacgccgccgccctggagctgagcagcgacgaggccgtggaggtggaggaggtgatcgaggagagcagagccgagagaatcaagagaagcggcctgagaagagtggacgacttcaagaaggccttcagcaaggagaagatggagaagaccaaggtgagaaccagagagaacctggagaagaccagactgaagaccaaggagaacctggagaagaccagacacaccctggagaagagaatgaacaagctgggcaccagactggtgcccgccgagagaagagagaagctgaagaccagcagagacaagctgagaaagagcttcacccccgaccacgtggtgtacgccagaagcaagaccgccgtgtacaaggtgccccccttcaccttccacgtgaagaagatcagagagggccaggtggaggtgctgaaggccaccgagatggtggaggtgggcgccgacgacgacgagggcggcgccgagagaggcgaggccggcgacctgagaagaggcagcagccccgacgtgcacgccctgctggagatcaccgaggagagcgacgccgtgctggtggacaagagcgacagcgactag

SEQ ID NO: 173259 - DNA, 1038 bp, Artificial Sequence
  derived and/or modified sequence
atggaggaccccaccctgtacatcgtggagagacccctgcccggctaccccgacgccgtggaccagatccagctgacccaggcccagctggaggagagacaggccgagatggagggcgccgtgcagagcatccagggcgagctgagcaagctgggcaaggcccacgccaccaccagcaacaccgtgagcaagctgctggagaaggtgagaaaggtgagcgtgaacgtgaagaccgtgagaggcagcctggagagacaggccggccagatcaagaagctggaggtgaacgaggccgagctgctgagaagaagaaacttcaaggtgatgatctaccaggacgaggtgaagctgcccgccaagctgagcatcagcaagagcctgaaggagagcgaggccctgcccgagaaggagggcgaggagctgggcgagggcgagagacccgaggaggacgccgccgccctggagctgagcagcgacgaggccgtggaggtggaggaggtgatcgaggagagcagagccgagagaatcaagagaagcggcctgagaagagtggacgacttcaagaaggccttcagcaaggagaagatggagaagaccaaggtgagaaccagagagaacctggagaagaccagactgaagaccaaggagaacctggagaagaccagacacaccctggagaagagaatgaacaagctgggcaccagactggtgcccgccgagagaagagagaagctgaagaccagcagagacaagctgagaaagagcttcacccccgaccacgtggtgtacgccagaagcaagaccgccgtgtacaaggtgccccccttcaccttccacgtgaagaagatcagagagggccaggtggaggtgctgaaggccaccgagatggtggaggtgggcgccgacgacgacgagggcggcgccgagagaggcgaggccggcgacctgagaagaggcagcagccccgacgtgcacgccctgctggagatcaccgaggagagcgacgccgtgctggtggacaagagcgacagcgactag

SEQ ID NO: 173260 - protein, 981 aa, Artificial Sequence
  derived and/or modified sequence
MAADSEPESEVFEITDFTTASEWERFISKVEEVLNDWKLIGNSLGKPLEKGIFTSGTWEEKSDEISFADFKFSVTHHYLVQESTDKEGKDELLEDVVPQSMQDLLGMNNDFPPRAHCLVRWYGLREFVVIAPAAHSDAVLSESKCNLLLSSVSIALGNTGCQVPLFVQIHHKWRRMYVGECQGPGVRTDFEMVHLRKVPNQYTHLSGLLDIFKSKIGCPLTPLPPVSIAIRFTYVLQDWQQYFWPQQPPDIDALVGGEVGGLEFGKLPFGACEDPISELHLATTWPHLTEGIIVDNDVYSDLDPIQAPHWSVRVRKAENPQCLLGDFVTEFFKICRRKESTDEILGRSAFEEEGKETADITHALSKLTEPASVPIHKLSVSNMVHTAKKKIRKHRGVEESPLNNDVLNTILLFLFPDAVSEKPLDGTTSTDNNNPPSESEDYNLYNQFKSAPSDSLTYKLALCLCMINFYHGGLKGVAHLWQEFVLEMRFRWENNFLIPGLASGPPDLRCCLLHQKLQMLNCCIERKKARDEGKKTSASDVTNIYPGDAGKAGDQLVPDNLKETDKEKGEVGKSWDSWSDSEEEFFECLSDTEELKGNGQESGKKGGPKEMANLRPEGRLYQHGKLTLLHNGEPLYIPVTQEPAPMTEDLLEEQSEVLAKLGTSAEGAHLRARMQSACLLSDMESFKAANPGCSLEDFVRWYSPRDYIEEEVIDEKGNVVLKGELSARMKIPSNMWVEAWETAKPIPARRQRRLFDDTREAEKVLHYLAIQKPADLARHLLPCVIHAAVLKVKEEESLENISSVKKIIKQIISHSSKVLHFPNPEDKKLEEIIHQITNVEALIARARSLKAKFGTEKCEQEEEKEDLERFVSCLLEQPEVLVTGAGRGHAGRIIHKLFVNAQRAAAMTPPEEELKRMGSPEERRQNSVSDFPPPAGREFILRTTVPRPAPYSKALPQRMYSVLTKEDFRLAGAFSSDTSFF

SEQ ID NO: 173261 - DNA, 2946 bp, Artificial Sequence
  derived and/or modified sequence
atggccgccgacagcgagccagagtcggaggtctttgagattactgattttaccactgctagcgaatgggagcgctttatctccaaggtcgaggaggtcctcaatgactggaagttgattggcaattcactgggcaaacctttagaaaagggaattttcactagcgggacatgggaagagaagtcagacgaaatttcattcgcggacttcaaattttctgttacccaccactacctggtccaagaaagcacagacaaggagggcaaagacgaactgctcgaagacgtagtaccacaatcaatgcaagacctgctgggtatgaacaacgattttcctccgcgtgcgcattgcctggtgaggtggtacggcttaagagaatttgttgttatcgctcccgccgcacattcagacgccgttctctcagagtccaaatgtaacctcctgctgagcagcgtcagcatcgctctgggaaataccgggtgccaagtgccactgtttgtgcagattcatcataaatggcggaggatgtatgtcggagaatgccagggaccaggagtacggaccgactttgaaatggtacacctgagaaaagtgcctaatcagtatactcatctgtctgggctgctggacatcttcaagagtaagattggttgccccctgactcctctcccccccgtgtcaatcgcaatccggtttacttatgtgctgcaggattggcaacaatacttttggcctcaacagccaccagatatcgatgcactggttggcggagaggtgggagggctggaattcgggaaacttccgttcggcgcttgtgaggatcccatttcagagctgcatcttgccactacatggccacacttgactgagggtatcattgtggataacgacgtctacagtgatcttgatccaatccaagctccccattggtcagtgcgggtgcggaaagccgagaatccccaatgcttgctaggcgatttcgtgaccgaattctttaagatatgtaggagaaaggaatccaccgacgagatcctgggaaggtcggccttcgaggaagagggcaaggagaccgcagacatcacccacgccctgtccaaactcacggagccagcctccgtgcctatacataaattgtcggtcagcaacatggtgcacaccgccaagaaaaagattcgaaaacatcggggtgtcgaagaaagccctctgaataatgatgttcttaacaccattctcctatttctctttccagacgccgtatcggagaaaccgttagatggcactaccagcaccgataataacaacccacccagtgaatctgaagactacaacctgtacaaccagtttaagtcggcaccatccgactccctcacatacaagttagctctgtgtctgtgcatgatcaatttttatcatggaggcctaaaaggtgtcgcccatttgtggcaagaattcgtcctggaaatgagatttcgctgggagaataatttcctgatccctggacttgcgtctggccctccggacctccgctgctgcctcctccaccagaagctgcaaatgctgaattgctgcatcgagaggaaaaaggctcgggacgagggcaaaaagacatccgcttctgacgtgaccaatatctatcctggcgacgctgggaaggccggggatcaactggtcccagataacctgaaagaaacagataaggaaaagggagaggtggggaaatcttgggactcatggtctgatagtgaagaggaattcttcgagtgcctgagcgacactgaggagctgaaaggtaacggacaggagtccgggaaaaaaggaggcccaaaggagatggcaaaccttcgaccggagggccggctttatcaacatggaaaactgactctgttgcataacggggagcccctgtatattcctgtcacacaggaacccgctccaatgaccgaagacctgctcgaggagcagtcagaagtcctcgcgaaactgggaaccagtgcagaaggcgcacacctgagagccaggatgcagtcggcatgcctcctgtctgacatggagagctttaaagccgcaaaccccggatgctccctggaagattttgtacgatggtacagcccgagagattacatcgaggaagaggtaatcgatgagaagggaaatgtggttctcaaaggggaattgtcagccagaatgaagattccttccaacatgtgggtcgaagcctgggagactgccaagcctattccagcccgcagacagagaagactattcgacgatacccgggaggccgagaaggtgttgcactacctggccatccagaaacccgctgatctggcaagacacctcctgccgtgcgtgatccacgcagctgtgctcaaggtcaaggaagaggagagtttggaaaacatatcctctgtaaagaaaattattaagcagattatctctcattctagcaaggtactgcacttccctaatcctgaagacaaaaagctggaggaaatcatccaccagatcaccaacgtcgaagctctcatcgcccgagccaggagtctaaaggcaaagttcggtacagagaaatgcgaacaagaggaggagaaagaagacctggaacgcttcgtgtcttgtctgctggagcagccggaggttttagtcacaggggcaggccgtggacacgccggccggattattcacaagttgtttgtcaatgcccagagggcagccgctatgactccccctgaggaggagctaaaacgaatgggatccccggaagagaggcgacagaacagcgtgtccgactttcctcccccagcggggcgcgagttcattctgaggaccactgtgcctaggccagcaccttatagtaaggccctgcctcagaggatgtactccgtcctgactaaggaggacttcagactcgccggagcattctccagtgacacatcttttttctag

SEQ ID NO: 173262 - DNA, 2946 bp, Artificial Sequence
  derived and/or modified sequence
atggctgctgacagcgagcctgagagcgaggtgtttgagatcacagacttcaccacagccagcgagtgggagcgcttcatcagcaaggtggaggaggtgctgaatgactggaagctgattggcaacagcctgggcaagcccctggagaagggcatcttcaccagcggcacctgggaggagaagagtgatgagatcagctttgctgacttcaagttctctgtgacccaccactacctggtgcaggagagcacagacaaggagggcaaggatgagctgctggaggatgtggtgccccagagcatgcaggacctgctgggcatgaacaatgacttccccccccgggcccactgcctggtgcgctggtacggcctgcgggagtttgtggtgattgccccagctgcccacagtgatgctgtgctgtctgagagcaagtgcaacctgctgctgagctctgtgtccatcgccctgggcaacacaggctgccaggtgcccctgtttgtgcagatccaccacaagtggaggaggatgtatgtgggggagtgccagggccctggggtgaggacagactttgagatggtgcacctgaggaaggtgcccaaccagtacacccacctgagcggcctgctggacatcttcaagagcaagattggctgccccctgacccccctgccccctgtgtccatcgccatccgcttcacctacgtgctgcaggactggcagcagtacttctggccccagcagcccccagacattgatgccctggtgggcggggaggtgggcggcctggagtttgggaagctgccctttggagcctgtgaggaccccatcagcgagctgcacctggccaccacctggccccacctgacagagggcatcatcgtggacaatgatgtgtacagcgacctggaccccatccaggccccccactggagcgtgcgggtgaggaaggccgagaacccccagtgcctgctgggggactttgtgacagagttcttcaagatctgcaggaggaaggagagcacagatgagatcctgggccgcagcgcctttgaggaggagggcaaggagacagctgacatcacccacgccctgagcaagctgacagagcccgcctctgtgcccatccacaagctgtctgtgagcaacatggtgcacacagccaagaagaagatcaggaagcaccggggcgtggaggagagccccctgaacaatgatgtgctgaacaccatcctgctcttcctgttcccagatgctgtgtctgagaagcccctggatggcaccaccagcacagacaacaacaaccccccatctgagagcgaggactacaacctgtacaaccagttcaagagcgcccccagcgacagcctgacctacaagctggccctgtgcctgtgcatgatcaacttctaccatggaggcctgaagggcgtggcccacctgtggcaggagtttgtgctggagatgaggttccgctgggagaacaacttcctgatccctggcctggccagcggccccccagacctgcgctgctgcctgctgcaccagaagctgcagatgctgaactgctgcatcgagaggaagaaggccagagatgagggcaagaagaccagcgccagtgatgtgaccaacatctacccaggagatgctgggaaggccggggaccagctggtgcctgacaacctgaaggagacagacaaggagaagggggaggtgggcaagtcctgggacagctggagcgacagcgaggaggagttctttgaatgtctgagtgacacagaggagctgaagggaaatggccaggagagcggcaagaagggcggccccaaggagatggccaacctgcggcctgagggccgcctgtaccagcacggcaagctgaccctgctgcacaatggagagcccctgtacatccctgtgacccaggagcccgcccccatgacagaggacctgctggaggagcagagcgaggtgctggccaagctgggcaccagcgctgagggcgcccacctgcgggccaggatgcagagcgcctgcctgctgagtgacatggagagcttcaaggccgccaaccctggctgcagcctggaggactttgtgcgctggtacagcccccgggactacatcgaggaggaggtgattgatgagaagggaaatgtggtgctgaagggggagctgagcgccaggatgaagatccccagcaacatgtgggtggaggcctgggagacagccaagcccatcccagcccggcggcagaggcggctgtttgatgacacccgggaggccgagaaggtgctgcactacctggccatccagaagccagctgacctggcccggcacctgctgccctgtgtgattcatgctgctgtgctgaaggtgaaggaggaggagagcctggagaacatcagctctgtgaagaagatcatcaagcagatcatcagccacagcagcaaggtgctgcacttccccaaccctgaggacaagaagctggaggagatcatccaccagatcaccaacgtggaggccctgattgcccgggcccggagcctgaaggccaagtttggaacagagaagtgtgagcaggaggaggagaaggaggacctggagagatttgtgtcctgcctgctggagcagcctgaggtgctggtgactggagctggccggggccacgccggccgcatcatccacaagctgtttgtgaatgcccagagagctgctgccatgaccccacctgaggaggagctgaagaggatgggcagccctgaggagcggcggcagaacagcgtgtctgacttccccccacctgctggccgggagttcatcctgcggaccaccgtgcccaggcctgccccctacagcaaggccctgccccagaggatgtacagcgtgctgaccaaggaggacttccggctggccggggccttcagcagtgacaccagcttcttctag

SEQ ID NO: 173263 - DNA, 2946 bp, Artificial Sequence
  derived and/or modified sequence
atggccgccgacagcgagcccgagagcgaggtgttcgagatcaccgatttcacaacagcctccgagtgggagaggttcatatctaaagtggaggaagtactcaacgattggaagctgatcgggaattccttagggaaacccctcgaaaagggcatttttacctctggaacttgggaggagaagtcagacgaaatatcgtttgccgactttaagttctccgtcacacaccactacttggtccaagaaagcactgataaggagggcaaggacgaactgcttgaagatgtagtgccccaaagcatgcaagacttactgggaatgaacaatgacttccccccccgggcccactgccttgtccggtggtatggcctgcgagagttcgtcgtgattgcacctgctgctcattctgacgccgtgctgtcggaatctaagtgcaatttgctcctgagctccgtatctatagctctgggaaataccggctgtcaggtgcctctgttcgtccagatacaccataagtggcggaggatgtacgttggcgaatgtcagggacctggggtgcgtactgatttcgaaatggtgcacctgcgaaaggttcctaaccagtatacccacttgtctggcctgctggatatattcaagtccaagattgggtgcccattaaccccactgccacctgtgagcatcgcaatccgcttcacatatgtgttacaggattggcagcagtacttctggcctcagcagccgccagacatcgacgcacttgtgggcggagaggttggaggcctggaattcgggaagctcccattcggggcctgtgaggatcctattagcgaactgcacttagcaactacctggccgcacctgactgagggaattattgtggacaacgacgtgtactcagaccttgacccaatccaggcacctcactggagtgtcagagtgcgcaaagctgaaaaccctcagtgtcttctgggagactttgtcaccgaattctttaaaatttgccgtcgtaaagagagcacagatgagattctgggtcgtagcgcctttgaggaggaagggaaggagaccgcggacatcacgcatgccttgtctaagctgaccgagccagccagcgtcccaatccacaaactctcagtctccaacatggtacacacagccaaaaagaagatccggaagcatcgcggggtcgaggaaagtcccctgaataatgatgtgctgaatactattcttctgtttctgttcccagatgcggtgagcgagaagccccttgacggtaccaccagtactgacaataacaacccaccatcagagagtgaggattacaatctgtataaccagttcaagtccgccccaagcgatagtctaacatacaagctagctctgtgcctgtgcatgatcaacttctatcacggcggcctcaagggcgtcgcccacttatggcaggaattcgttctggaaatgcggttccggtgggaaaataattttttgattccgggtctggcaagcggtccgcctgatctcaggtgctgtctcttgcaccagaagctgcagatgctcaattgttgtatcgagcggaaaaaggctagggatgagggaaagaagacctcagcctctgatgtgacgaatatctaccctggggatgccggaaaggctggggaccagctcgtcccagataatctcaaagagactgacaaagaaaagggggaggtaggaaaaagctgggattcgtggtcagactctgaggaggagttctttgagtgtctctccgatactgaggagctaaagggaaatggacaagagtcgggaaaaaagggggggccaaaggagatggcgaatctgcgcccagagggtcggttgtatcagcacggaaagttgacactgctgcacaatggcgagcccctttacattccagttactcaggaaccggcaccaatgacggaggacctgttggaagaacaatccgaggtgctggcaaagctggggacctccgccgagggggctcatttgagggcccggatgcagtctgcttgcctattatccgacatggagagttttaaagccgccaatccgggttgctcgctggaggactttgtacgttggtatagcccacgtgattatatcgaagaggaagttatcgacgagaaaggcaacgtcgtgctcaaaggggagctgtcggccaggatgaaaatcccctcaaacatgtgggtcgaagcctgggagacggccaaacccattcccgcccgcaggcagcgcagactctttgacgacacgcgagaggccgagaaggtccttcactatctggcaattcaaaaacccgccgacttggcccggcacctcctgccctgcgtgatacacgccgcagtgctcaaagtgaaagaagaggaaagcctggagaacatctcatcagttaaaaagatcatcaaacagatcatttcccatagcagtaaagtcctacactttccaaaccctgaagataaaaaattagaagaaatcattcaccagatcaccaatgttgaagctctgatcgcgcgggcacgcagtctaaaggctaaattcggaaccgagaagtgtgagcaggaagaggagaaggaagaccttgaacggttcgtcagttgcctgctggaacagcccgaggttctcgtgacgggtgctggtcgggggcatgcaggtagaatcatccataaattattcgtgaacgctcagagggcggcagctatgacgcctccggaggaggagctaaagcgaatggggtcccctgaggaacgtaggcagaactctgtctctgacttcccaccgcctgccggacgcgagtttatcctgaggactactgtgcccaggcccgccccctactccaaagcactgcctcagcggatgtactcggtcctgaccaaagaagacttcagactcgccggagcattttcatcagatacttcattcttttag

SEQ ID NO: 173264 - DNA, 2946 bp, Artificial Sequence
  derived and/or modified sequence
atggccgctgacagtgagcccgaaagtgaggtgttcgagatcaccgatttcacaacggccagcgagtgggaaaggtttattagcaaagtcgaggaggttctgaatgactggaaacttatcgggaacagtttgggaaagcccctggagaaaggaattttcacaagcggaacctgggaggagaagtctgatgagatctcctttgcggattttaagttttccgttactcatcactaccttgtgcaggaatccactgataaagaagggaaagacgagctgctggaagacgtggtgccacagtctatgcaggatctcctcggtatgaataacgacttcccccctcgagctcattgtcttgttcgctggtacggtctgcgggagtttgtggtgatcgcgccagccgctcactcagacgctgtgctcagcgaaagtaaatgtaatctcctcctgtcctccgtttcaatcgccctggggaacacaggctgccaggtccccctctttgttcaaattcatcacaaatggagacggatgtacgtcggagagtgtcagggccctggcgtccgcaccgacttcgagatggtgcatcttcgtaaagtgccaaaccagtacacccacctcagcgggctgctggacattttcaagtcaaagattggttgtcccctgacacctctacctcccgtctctatcgcaattaggtttacttacgtgctgcaggattggcaacagtacttttggccacagcagccaccagatattgacgccctggtgggcggtgaggtgggcggactggagtttgggaaactaccattcggcgcatgcgaagatccaattagtgagcttcatctggccacaacctggcctcaccttaccgagggcatcattgtcgataatgatgtgtatagtgatttggatcctatacaggccccacattggtctgtaagggtccgcaaggcagagaaccctcagtgcctgctgggggattttgttactgagttctttaaaatctgccggagaaaagaatccaccgacgaaatcctcgggcgatctgccttcgaagaggagggcaaggaaacagcagacataactcacgcgctgtcgaagctcaccgagccggcttccgtccctatccacaagctctcagtgagcaatatggtccataccgcaaagaagaaaattcgcaagcacaggggtgtcgaagagtcccctctaaataacgacgtgctgaacactatcctcctgtttctattcccagacgccgtgagtgaaaagccactggacggaaccacctctaccgacaataacaacccgccatctgagtcagaggactacaatctctataatcagtttaaaagcgctccgagcgattctctgacttacaagttggcgctctgcctatgtatgattaacttctaccatggaggactcaagggtgtagcacacttatggcaggagtttgtcctggagatgcgtttcaggtgggagaacaactttctcataccgggactggccagtggtccacccgaccttcgttgctgtttactgcaccagaagcttcagatgcttaattgttgtatcgagagaaagaaagctagagatgaagggaagaaaactagcgccagtgacgtgactaacatctatccaggggacgcgggaaaagctggagatcagctcgtgcctgataacctgaaggaaaccgacaaagagaagggtgaagtaggaaaatcttgggactcatggagcgattctgaggaagaatttttcgagtgcctgtctgacactgaggaattaaaaggaaacggacaagaatctggaaagaagggagggcctaaggaaatggctaacctcaggcctgaaggtcgcctctaccagcatggcaagctcaccctgctccacaacggtgaacctctctatatccccgtgactcaggaaccagccccaatgacagaggatctgctcgaagagcagtcagaagtgctggccaaattgggcacttccgccgagggggctcacttgcgggctagaatgcagtcagcatgcctgctctccgacatggaatctttcaaggcggcaaacccaggatgttcattggaggatttcgttcggtggtactcccccagagattatattgaggaggaagtcatcgatgagaaaggaaatgtagtcttgaaaggtgaactgtcagctagaatgaagatccctagcaatatgtgggttgaggcctgggaaaccgctaagcccatccccgcaagaagacagagacggctatttgatgatacacgggaggcagaaaaagttcttcattacctggcaattcagaagccagctgatctagcaaggcacctcctgccttgtgtcatccacgccgctgttctaaaagtaaaggaggaggagtcactggaaaatattagctcagtcaaaaaaattattaaacagatcatctcccattcgtcaaaggtcctgcactttccaaatcccgaggacaagaagctggaagagatcattcatcagattacaaacgtggaggccttgatagctagagctcgctctttaaaggcaaagtttgggacagagaagtgcgaacaggaggaggaaaaggaagacctcgaaagatttgtgagttgcttacttgagcagccagaggtcctcgtgacaggggctgggcgtggccacgctggtagaatcatccacaagctttttgtaaatgcgcagcgtgctgccgctatgactcccccagaagaagagctgaagcggatggggtcgccagaggagcgacggcagaacagcgtgagcgatttccccccacctgctggcagggagttcattctgcggacgacagtgcctcggccagctccatactccaaggccctgccacaaagaatgtactcagtgctgaccaaggaagactttagactcgcgggtgctttctcatctgatactagcttcttttag

SEQ ID NO: 173265 - DNA, 4197 bp, Artificial Sequence
  derived and/or modified sequence
cttcttcccggcagccttagcgccaggcccggcgctcctcaagatggctgccgacagtgagcccgaatccgaggtatttgagatcacggacttcaccactgcctcggaatgggaaaggtttatttccaaagttgaagaagtcttgaatgactggaaactgattggaaactctttgggaaagccactcgaaaagggtatatttacttctggcacatgggaagagaaatcagatgaaatttcctttgctgacttcaagttctcagtcactcatcattatcttgtacaagagtccactgataaagaaggaaaggatgagttattagaggatgttgttccacaatctatgcaagatttgctgggtatgaataatgactttcctccaagagcacattgcctggtaagatggtatgggctacgtgagttcgtggtgattgcccctgctgcacacagtgacgctgttctcagcgaatctaagtgcaaccttcttctgagttctgtttctattgccttgggaaacactggctgtcaggtgccactctttgtgcaaattcaccacaaatggcgaagaatgtatgtaggagaatgtcaaggtcctggtgtacgaactgatttcgaaatggttcatcttagaaaagtgccaaatcagtacactcacttatcaggtctgctggatatcttcaaatcaaagattggatgtcctttaactccattgcctccagttagtattgctattcgatttacctatgtacttcaagattggcagcagtatttttggcctcagcaacctccagacatagatgcccttgtaggaggagaagttggaggcttggagtttggcaagttaccatttggtgcctgcgaagatcctattagtgaactccatttagctactacatggcctcatctgaccgaagggatcattgtggataatgatgtttattctgatttggatcctattcaagctccacattggtctgttagagttcgaaaagctgagaatcctcagtgtttgctaggtgattttgtcactgaattttttaaaatttgccgtcgaaaggagtcaactgatgagattcttggacgatctgcatttgaggaagaaggcaaagaaactgctgatataactcatgctttgtcaaaattgacagagccggcatcagttccaattcataaattatcagtttcaaatatggtacacactgcaaagaagaaaatccgaaaacacagaggtgtagaggagtcaccgctaaataatgatgttcttaatactattctcctgttcttattccctgatgctgtttctgagaaaccattagatggaactacttcaacagataataataatcctccatcagagagtgaagactataatctctacaatcagttcaagtctgcaccatctgacagtttaacatacaaactggctttgtgtctctgtatgatcaatttttaccatggagggttgaaaggagtggcacacctctggcaggaatttgttcttgaaatgcgtttccgatgggaaaacaactttctgattccaggattagcaagtggacccccagatctgaggtgttgtttactgcatcagaaactacagatgttaaattgttgtattgaaagaaagaaggcacgtgatgaggggaaaaagacaagtgcttcagatgtcactaatatatatccaggggatgctggaaaagcaggagaccagttggtgccagataatctaaaagaaacagataaggaaaagggagaggtaggaaaatcttgggattcctggagtgacagcgaagaagaattttttgaatgcctaagtgatactgaagaacttaaaggaaatggacaagagagtggcaagaaaggaggacctaaggagatggcaaatttaaggccggaaggacggctctatcagcatgggaaacttacactgctgcataatggagaacctctctacattccagtaacccaggaaccagcacctatgacagaagatctgctagaagagcagtctgaagttttagctaaattaggtacatcggcagagggggctcaccttcgagcacgcatgcagagtgcctgtctgctctcagatatggagtcttttaaggcagctaatccaggttgctccctggaagattttgtgaggtggtattcaccccgggattatattgaagaggaggtgattgatgaaaagggcaatgtggtgctgaaaggagaactgagtgcccggatgaagattccaagcaatatgtgggtagaagcctgggaaacagctaagccaattcctgctagaaggcaaaggagactctttgatgatacacgggaagcagaaaaggtgctgcactatctggcaatccagaaacctgcagaccttgctcggcacctgttaccttgtgtgattcatgcagctgtactcaaggtaaaggaagaagaaagtctcgaaaacatttcttcagttaagaagatcataaagcagataatatcccattccagtaaagttttgcacttccccaatccagaagacaagaaattggaagaaatcattcaccagattactaatgtggaagctctcattgccagagctcggtcactaaaagccaagtttggaactgagaaatgtgaacaggaggaggaaaaggaagatcttgaaaggtttgtgagttgcctgctggagcagcctgaagtgttagtcaccggtgcaggaagaggacatgctggcaggatcattcacaagctgtttgtgaatgcccagagggctgcagctatgactccaccagaggaggaattgaagagaatgggctccccagaggaaagaaggcagaactccgtgtcagacttcccaccccctgctggccgggaattcattttgcgcaccactgtgccgcgccctgctccctactccaaagctctgcctcagcggatgtacagtgttctcaccaaagaggactttagacttgcaggtgccttttcatcagatacttccttcttctgattcttctagcattactcgttggtggcttcagagacagtgctgcctcctcctgagggagggaaggtaccagggagaacctgggaggtcctggagagggccctgtccagttgggtgatcaggaatcaaaccagcatcggaaagacttcccagcaccaagcttgagctgtgtcgtttcgtggagggggcagcgaggatgggcttgagctgttgagagatttctgccctagagatggcctttgtatatgggggggtggtggggggacacaaacacatcagacactccgtcctcacactggcaggacggtgttcatcgcattctcttctgtgaccagcctctaggctagcggctgcattcgtggtctgtgcaaacacttcgtggttctatatatcagcagcaagtgtgcaaaataaaggacctgttaactcagatttctggatattttggtggtagcttctagtcccagaatctgtgtttttaaaatactacatgacattctgtctattcaatcacctggtggtcatctttcttgtactaattaactgttgatgagcattttggatattctaggagaaagcctataatttcacatagtttctctttttcatgtaactgtaacctaaatgtattacttctgataaaactatatatcaaatgtcactgcaaattagttttatatctgtcatgtgagatttgtcttacttatttttcttttggttgccatggaagttatggccctgaaaatcgtctccctccccttctcttgctgtacagcatgcgttctctttttgtggttgctggctgggtactgtatttaatgaagtagagaatagcacttgcaaaaatacagtcttggtacctagagactgtcatgcagatagtataatttggtatatgtgctaatgcattgagtagaggattattttaacacactattttgcttttgtattttagttaaaataatcgatggggatgtgtagcccccccgtgtgaggatgacatcaccacatttctagtttcatggagctcaagatgtcttgtgtctgtgtggctagatggcctctgcttggtaatcttatttttaggcctaaaattcccacttaaatccaaagtaaaaatggttatactgaagcataaaccttgcctgtgtaattttaaaaaattaatagagctgtgcaaaccctgttatttttgtaaaaaaaaaaaaaaa

SEQ ID NO: 173266 - DNA, 2946 bp, Artificial Sequence
  derived and/or modified sequence
atggccgccgacagcgagcccgagagcgaggtgttcgagatcaccgacttcaccaccgccagcgagtgggagagattcatcagcaaggtggaggaggtgctgaacgactggaagctgatcggcaacagcctgggcaagcccctggagaagggcatcttcaccagcggcacctgggaggagaagagcgacgagatcagcttcgccgacttcaagttcagcgtgacccaccactacctggtgcaggagagcaccgacaaggagggcaaggacgagctgctggaggacgtggtgccccagagcatgcaggacctgctgggcatgaacaacgacttcccccccagagcccactgcctggtgagatggtacggcctgagagagttcgtggtgatcgcccccgccgcccacagcgacgccgtgctgagcgagagcaagtgcaacctgctgctgagcagcgtgagcatcgccctgggcaacaccggctgccaggtgcccctgttcgtgcagatccaccacaagtggagaagaatgtacgtgggcgagtgccagggccccggcgtgagaaccgacttcgagatggtgcacctgagaaaggtgcccaaccagtacacccacctgagcggcctgctggacatcttcaagagcaagatcggctgccccctgacccccctgccccccgtgagcatcgccatcagattcacctacgtgctgcaggactggcagcagtacttctggccccagcagccccccgacatcgacgccctggtgggcggcgaggtgggcggcctggagttcggcaagctgcccttcggcgcctgcgaggaccccatcagcgagctgcacctggccaccacctggccccacctgaccgagggcatcatcgtggacaacgacgtgtacagcgacctggaccccatccaggccccccactggagcgtgagagtgagaaaggccgagaacccccagtgcctgctgggcgacttcgtgaccgagttcttcaagatctgcagaagaaaggagagcaccgacgagatcctgggcagaagcgccttcgaggaggagggcaaggagaccgccgacatcacccacgccctgagcaagctgaccgagcccgccagcgtgcccatccacaagctgagcgtgagcaacatggtgcacaccgccaagaagaagatcagaaagcacagaggcgtggaggagagccccctgaacaacgacgtgctgaacaccatcctgctgttcctgttccccgacgccgtgagcgagaagcccctggacggcaccaccagcaccgacaacaacaacccccccagcgagagcgaggactacaacctgtacaaccagttcaagagcgcccccagcgacagcctgacctacaagctggccctgtgcctgtgcatgatcaacttctaccacggcggcctgaagggcgtggcccacctgtggcaggagttcgtgctggagatgagattcagatgggagaacaacttcctgatccccggcctggccagcggcccccccgacctgagatgctgcctgctgcaccagaagctgcagatgctgaactgctgcatcgagagaaagaaggccagagacgagggcaagaagaccagcgccagcgacgtgaccaacatctaccccggcgacgccggcaaggccggcgaccagctggtgcccgacaacctgaaggagaccgacaaggagaagggcgaggtgggcaagagctgggacagctggagcgacagcgaggaggagttcttcgagtgcctgagcgacaccgaggagctgaagggcaacggccaggagagcggcaagaagggcggccccaaggagatggccaacctgagacccgagggcagactgtaccagcacggcaagctgaccctgctgcacaacggcgagcccctgtacatccccgtgacccaggagcccgcccccatgaccgaggacctgctggaggagcagagcgaggtgctggccaagctgggcaccagcgccgagggcgcccacctgagagccagaatgcagagcgcctgcctgctgagcgacatggagagcttcaaggccgccaaccccggctgcagcctggaggacttcgtgagatggtacagccccagagactacatcgaggaggaggtgatcgacgagaagggcaacgtggtgctgaagggcgagctgagcgccagaatgaagatccccagcaacatgtgggtggaggcctgggagaccgccaagcccatccccgccagaagacagagaagactgttcgacgacaccagagaggccgagaaggtgctgcactacctggccatccagaagcccgccgacctggccagacacctgctgccctgcgtgatccacgccgccgtgctgaaggtgaaggaggaggagagcctggagaacatcagcagcgtgaagaagatcatcaagcagatcatcagccacagcagcaaggtgctgcacttccccaaccccgaggacaagaagctggaggagatcatccaccagatcaccaacgtggaggccctgatcgccagagccagaagcctgaaggccaagttcggcaccgagaagtgcgagcaggaggaggagaaggaggacctggagagattcgtgagctgcctgctggagcagcccgaggtgctggtgaccggcgccggcagaggccacgccggcagaatcatccacaagctgttcgtgaacgcccagagagccgccgccatgaccccccccgaggaggagctgaagagaatgggcagccccgaggagagaagacagaacagcgtgagcgacttccccccccccgccggcagagagttcatcctgagaaccaccgtgcccagacccgccccctacagcaaggccctgccccagagaatgtacagcgtgctgaccaaggaggacttcagactggccggcgccttcagcagcgacaccagcttcttctag

SEQ ID NO: 173267 - protein, 317 aa, Artificial Sequence
  derived and/or modified sequence
  misc_feature (1)..(1): Xaa can be any naturally occurring amino acid
XLPAPAAALPGAPPPPPGVRGYPARARGLQGASGGARFPSSLSLPVPGKGGWVVSRAKFPALDSCEITTAHPRLCFAVSPPFSCSLPLPSLFPHSPLLGRPKRQAKPAADEGFWDCSVCTFRNSAEAFKCSICDVRKGTSTRKPRINSQLVAQQVAQQYATPPPPKKEKKEKVEKQDKEKPEKDKEISPSVTKKNTNKKTKPKSDILKDPPSEANSIQSANATTKTSETNHTSRPRLKNVDRSTAQQLAVTVGNVTVIITDFKEKTRSSSTSSSTVTSSAGSEQQNQSSSGSESTDKGSSRSSTPKGDMSAVNDESF

SEQ ID NO: 173268 - DNA, 4562 bp, Artificial Sequence
  derived and/or modified sequence
gggccggtccgcgacgactccccggacggcgtttctcctccgagcggcgccggtttcggcttggggggggcggggtacagcccatccatgaccatgggcgacaagaagagcccgaccaggccaaaaagacaagcgaaacctgccgcagacgaagggttttgggattgtagcgtctgcaccttcagaaacagtgctgaagcctttaaatgcagcatctgcgatgtgaggaaaggcacctccaccagaaaacctcggatcaattctcagctggtggcacaacaagtggcacaacagtatgccaccccaccaccccctaaaaaggagaagaaggagaaagttgaaaagcaggacaaagagaaacctgagaaagacaaggaaattagtcctagtgttaccaagaaaaataccaacaagaaaaccaaaccaaagtctgacattctgaaagatcctcctagtgaagcaaacagcatacagtctgcaaatgctacaacaaagaccagcgaaacaaatcacacctcaaggccccggctgaaaaacgtggacaggagcactgcacagcagttggcagtaactgtgggcaacgtcaccgtcattatcacagactttaaggaaaagactcgctcctcatcgacatcctcatccacagtgacctccagtgcagggtcagaacagcagaaccagagcagctcggggtcagagagcacagacaagggctcctcccgttcctccacgccaaagggcgacatgtcagcagtcaatgatgaatctttctgaaattgcacatggaattgtgaaaactatgaatcagggtatgaaattcaaaacctccacctgcccatgctgcttgcatccctggagaatcttctgtggacatcgacctcttagtgatgctgccaggataatttctgcttgccatgggcatctggccaccaaggaatttcgcaccctgacgattactcttgacacttttatgtattccattgttttatatgattttcctaacaatcatttataattggatgtgctcctgaatctactttttataaaaaaaaaaaaatctgctgtgcacaattttccatgtacattacaactggttttttgtttttgttttgttgccggtggggagggctgggagggggagggaacttttatttattgtgttcacaaactccatcctttcagcatatccttttaagtttagttctttcttccagttatactatgtactatcagttttgatataactatatatatataaatataaaattatatataaagggttatttgaaaccaatccatggcaacgctggtgcttgatacactgtgaagtgaatacaacattgaacagttacagatctgggacagtcccttctatgaaagtgctgaaatttaattaaaatcagtcttatatgaagtatgttccaatccatgtgggaacttgactctctcatctgtctaaagagtactggacgatataaaaatatatattttttaaacaatgtgatctcaaatttaaagactgctccagatagcctgcatttgcaatggaataactgacaaatcacaagtggtttagttgggcagggctttgatcattcaaaagtaactaaagtagctccagaatgccaagtattcgtgtaaattacggttacatgttatcatttgctgttcttacataagcactcatgaaaatatggtattctgtaacttgaattccatccattttccagacctctactcatgtctgaggtaaatctagaaattgtcttagttttaggattgaaacagtctataaactgtatttttggtccatccaggaagctagtcccttgtttctcctttctacatgacattgcagtggtggtttctgtaattaaaatttgtttgcctcatgtccctttgtctgataaaccttcactctaccgattcagttgtgagcattctttttttccttctcaaaacctactatgatttgttttactgaacaaaggttatcaaccacacatccagtcctgacatggagcttttcagtgtttggagacatttctcaatcccctgctgtggtaggaactccagtggtgaacggcttgcgcgcctgcagccagagttgcagggaaagctcgtacttactgcgagcagcatgtaatcttttttcttcctggacataaagatagcttgagtaaactgttctatttcattctcttcactctttttactgtcttgcaaaaaaaaaaaaaaaaaaaataatcaaagaccactaataagattccacctctccttattaaaataattttttaaaattttgttttgcttttgtttggatgtggggtctctcttctatttgacttttacatttagatacagagtttgtagtacttcagagacatttcaagcatgagaatttgaggttacctctctttatttgacctttagggactcacgggagggcagcctgatttgtaatgaagcaccacattttggtgttaaaaacctggtttgcttaataatagcagtaatttctgtctgtggaggcaacaaataaaaaaattaacagcttgaattgagtagccaacaggaaaggttcctttcacatttacattaaaactattctgtagtcactaatgtaccataatttaaattcttttctcaaaggtatagattataaagcagtgccatttgttgctgtggtcctattctcaaatgcatggacaatgttcccccctttttaaaataatgcttgtgtctgggatgcaagctttgcttatctttttaaatacatttttaaagtatttattaatgaaccaaaggaaatcagatgctttctataagcatcagaatatataatacatagtgatttgactatgaattttaaatccacattttaatattggtgggatattgcaaagacattccttctaaagttttaatattccttttattaagggtctcagggagggtaaattagtcagccatatttattttccagaggtttaagaaattgctgtttttaactttttgaaaaaacttaaatgccaccaaactcatgtaggttgcactgcttattgaaccaataactgttggtatgcactttgttcagacacactgtgtactttttcaaaaactagtttcatgtaaagtgattggaccccatagattagtggaaaaagctgattaaccagctactcataggctgctaattcattcatgccaatgttttggtttttcagttttgcctccgtgataaattaaagaatggggaggggtgaaggaaggggaagaagattgctttagaacaagtggcatgaaattaccatctttgtagaaaccgcagctaacagtgggagttatctaagcaatcagatgttacagggccagccctttagctgctgtggtgtattctgttgggtagtgaggtagtaggtactttatagacttttaattttggaaattgatgacatccctcaggcatgtattctggaaatggaattcctgtaacttcctgtgtctgcagtatgccctacaattagtaggcagcgtgtaaaaacactagtgtagattataaagatatacattaaaagaggaccagaaatacttggtattcagtggcacagaaagcaggttaaacaaacaaaaagcacagtgttacgcttgcaagtttccatttgttttaataccacgcaatctttcacactcgtgcgtgtgcgcgcacacagagcttacctgacttgctctgcttgagtcatgcagttacaaaaaaaaagacatcttgacacccacacaatattctaatcaaaacctttcagtttcaatctggatatttaaaaacattggcagaagcttctgtgagtttagttccactaagatgtttcacctgccttatcaagaccattctcagtctacttttttaagctaccgtatcttaaattattgaaaatttattaattgctgaatatataataacctttgcttgtatgtaaccgaaaatggtttaagagccaacatttagagtatgacaatggagctgaacagtttttaatgcgcaagcagttctgttcttgtgtatgacttgtaaccttaatttactgtgtaaagatggttacattatttccttagctttgtttgttggagacaaatagagaatgcttgttaagtatgtcaaaacaatcttatcttgtgaatttttgttaatgtattatacgagctatatttttcatttgcccagaaagacagcttgtataacgcttttggaagtttctgctctgtaatgtctttagagctgacagtctgttaggtttgtttttttcttcatgctaaagtgtcagttggtggttttgtgaactggtcaaaaattcacaggtcttaaatgttttgggggaaatttatattggacactgctctttgtctagcaaataaaagatgttaatatattcctgttactggcatgtgcacgactatgttattagaagccactttatcattttcctgctttaaatagaaatgtctatttatgaattctgcttgtagttttttcacaaataaaatagtaaaatttacattggaaa

SEQ ID NO: 173269 - DNA, 954 bp, Artificial Sequence
  derived and/or modified sequence
tgactgcccgccccggccgcagctctacccggcgcgcccccgccaccccctggcgtgagaggttaccctgcgagagcgcgcgggctccagggagctagcggtggtgcacggttccctagtagccttagcctgcctgtccccggaaaaggaggctgggtggtctcaagggcgaagttccccgcgcttgatagctgcgagattactacagcccacccaaggttgtgctttgcagtgtctccccccttttcctgcagcctcccgctcccatcgcttttcccccacagccccctgcttggacggcccaaacgacaggccaagcccgcggccgacgagggattttgggactgcagtgtctgcacattccgcaattcagccgaggccttcaaatgcagtatctgcgacgtccgtaaagggacctccacgcggaagccaaggatcaactcccagctcgtggctcaacaagttgcccagcagtatgcaacccctcccccccccaagaaggagaaaaaagagaaggtggaaaaacaggacaaggaaaaaccagagaaggacaaagaaatctctccaagtgtaaccaagaaaaataccaacaagaagaccaagcccaaaagtgacatcctgaaagatccgccctctgaggcaaacagcattcagtcagctaatgcaactaccaagacatccgagaccaaccacacaagcagaccacgcttgaagaacgttgaccgctcaacggcccagcaactggcagttacagtgggcaacgtgaccgtgatcattaccgatttcaaggagaaaactagatcctcctcgaccagtagtagtaccgtgacaagtagcgcgggaagtgagcagcaaaaccagagctctagtggaagcgagtcaacagacaaaggctcgtctcggagctcgactccgaagggcgatatgtccgccgtgaacgatgaaagcttttag

SEQ ID NO: 173270 - DNA, 954 bp, Artificial Sequence
  derived and/or modified sequence
tgactgcctgccccagctgctgccctgcccggggcccctcctcctcctcctggggtgcggggctacccagcccgggcccggggcctgcagggcgccagcggcggggcccgcttccccagcagcctgagcctgcctgtgcctggaaaaggaggctgggtggtgtcccgggccaagtttcctgccctggacagctgtgagatcaccacagcccacccccggctgtgctttgctgtgagcccccccttcagctgcagcctgcccctgcccagcctcttcccccacagccccctgctgggccggcccaagaggcaggccaagccagctgctgatgagggcttctgggactgcagcgtgtgcaccttcaggaacagcgctgaggccttcaagtgcagcatctgtgatgtgaggaagggcaccagcaccaggaagccccgcatcaacagccagctggtggcccagcaggtggcccagcagtatgccaccccacctccacccaagaaggagaagaaggagaaggtggagaagcaggacaaggagaagccagagaaggacaaggagatcagccccagcgtgaccaagaagaacaccaacaagaagaccaagcccaagagtgacatcctgaaggacccccccagcgaggccaacagcatccagagcgccaatgccaccaccaagaccagcgagaccaaccacaccagccggccccggctgaagaatgtggacaggagcacagcccagcagctggccgtgacagtgggcaatgtgaccgtcatcatcacagacttcaaggagaagaccaggagcagcagcaccagcagcagcacagtgaccagcagcgctggcagcgagcagcagaaccagagcagcagcggcagcgagagcacagacaagggcagcagccgcagcagcacccccaagggggacatgtctgctgtgaatgatgagagcttctag

SEQ ID NO: 173271 - DNA, 954 bp, Artificial Sequence
  derived and/or modified sequence
tgactgcccgcccccgccgccgccctgcccggcgccccccccccccctcccggcgtgcgcggataccccgcgcgagcccgcggcttgcagggggcatctggcggtgctagattcccgtcttccttgtcactcccagtcccaggtaaaggaggctgggtggtgtcccgtgccaagtttcccgcactggactcatgtgagatcacaaccgctcacccccgtttgtgttttgcagtaagtcctcccttttcctgctcacttcctctgccctcgctctttcctcatagtccactcctaggaagacccaagcgacaggctaaacccgctgcggatgaaggtttctgggattgttcggtttgcactttccgcaacagcgccgaggcattcaaatgttcaatttgcgatgtccgcaaaggtacaagcacaaggaagcctcgcatcaactcccaactcgtcgcccagcaggtggcccagcagtacgccacaccgcccccacccaagaaagaaaaaaaggagaaagtggagaagcaggataaagagaaacctgaaaaggacaaagagatttcaccttcagtgacaaaaaagaacacaaataagaaaaccaaacctaagtctgatatcttgaaggatcccccaagcgaagcaaactctatccagtctgcaaatgcgacgaccaagacctctgagacaaatcacacctcacgacccagactgaagaatgtggataggtccaccgctcagcagctggcggtgactgtagggaatgtgaccgtaatcataactgactttaaagagaagacccggtccagtagtacctctagttccaccgttactagttctgcaggctcggagcagcagaatcagagctcctcagggtcggagtcaacggacaaaggatcatctaggagctcaacgcccaagggcgacatgtccgctgttaacgatgagagtttttag

SEQ ID NO: 173272 - DNA, 954 bp, Artificial Sequence
  derived and/or modified sequence
tgactgcccgcaccggctgctgccttgcccggagctcctcctccgcctccaggcgttcggggttacccagccagggcgcgaggcttgcagggagccagtggtggagctcgctttccttctagcctgtctctcccggtaccgggaaagggcggatgggtggtgtcgcgcgctaagtttcccgctctcgacagttgtgagatcacgaccgcccaccctagactgtgttttgctgtgtcccccccattcagctgctcattgcccttgccctcactctttcctcattccccgctcctaggcagacctaagcgacaggccaaacccgcagccgatgaggggttttgggactgttcagtgtgcacattccggaactccgctgaggccttcaaatgttccatatgcgatgttaggaaggggactagcactcggaagcccagaatcaactcacagcttgttgctcaacaggtggcccaacagtatgctacccctcccccacccaagaaagagaagaaagaaaaagtcgagaaacaggacaaggagaaacctgagaaggataaggagatctcaccctccgtgacaaaaaaaaacacgaataagaagacaaagccgaaatccgacattttaaaggacccacctagtgaagcaaattccatccagtcagcaaatgcgacaaccaaaacttctgaaaccaaccacacctcaagacctaggctcaaaaacgtcgaccggtcaacagcacagcaattggccgtgaccgtgggcaatgtaaccgtcattatcacggactttaaagagaagacgagatctagttctacttcaagctccaccgtgacttctagcgcaggctccgagcagcagaaccagagctcatccggttcggagtcaacggacaaggggagctccagatcatccacccccaagggagacatgtctgccgtcaatgacgaatcattctag

SEQ ID NO: 173273 - DNA, 4744 bp, Artificial Sequence
  derived and/or modified sequence
gcttcctgcgcccgccgcggcccttcccggggcgccgccgccaccgcctggtgtgcgaggctatccggcccgggcccggggcttgcagggtgccagtgggggcgcccggttcccttcctcgctctctcttccagtccccggaaagggtgggtgggtggtctcccgagcgaagtttccagcactggattcctgcgaaattacgacggctcacccgcgtctgtgttttgctgtctctcccccgttttcctgctccctgcctcttccctcccttttcccccactctccactcctcggaaggccaaaaagacaagcgaaacctgccgcagacgaagggttttgggattgtagcgtctgcaccttcagaaacagtgctgaagcctttaaatgcagcatctgcgatgtgaggaaaggcacctccaccagaaaacctcggatcaattctcagctggtggcacaacaagtggcacaacagtatgccaccccaccaccccctaaaaaggagaagaaggagaaagttgaaaagcaggacaaagagaaacctgagaaagacaaggaaattagtcctagtgttaccaagaaaaataccaacaagaaaaccaaaccaaagtctgacattctgaaagatcctcctagtgaagcaaacagcatacagtctgcaaatgctacaacaaagaccagcgaaacaaatcacacctcaaggccccggctgaaaaacgtggacaggagcactgcacagcagttggcagtaactgtgggcaacgtcaccgtcattatcacagactttaaggaaaagactcgctcctcatcgacatcctcatccacagtgacctccagtgcagggtcagaacagcagaaccagagcagctcggggtcagagagcacagacaagggctcctcccgttcctccacgccaaagggcgacatgtcagcagtcaatgatgaatctttctgaaattgcacatggaattgtgaaaactatgaatcagggtatgaaattcaaaacctccacctgcccatgctgcttgcatccctggagaatcttctgtggacatcgacctcttagtgatgctgccaggataatttctgcttgccatgggcatctggccaccaaggaatttcgcaccctgacgattactcttgacacttttatgtattccattgttttatatgattttcctaacaatcatttataattggatgtgctcctgaatctactttttataaaaaaaaaaaaatctgctgtgcacaattttccatgtacattacaactggttttttgtttttgttttgttgccggtggggagggctgggagggggagggaacttttatttattgtgttcacaaactccatcctttcagcatatccttttaagtttagttctttcttccagttatactatgtactatcagttttgatataactatatatatataaatataaaattatatataaagggttatttgaaaccaatccatggcaacgctggtgcttgatacactgtgaagtgaatacaacattgaacagttacagatctgggacagtcccttctatgaaagtgctgaaatttaattaaaatcagtcttatatgaagtatgttccaatccatgtgggaacttgactctctcatctgtctaaagagtactggacgatataaaaatatatattttttaaacaatgtgatctcaaatttaaagactgctccagatagcctgcatttgcaatggaataactgacaaatcacaagtggtttagttgggcagggctttgatcattcaaaagtaactaaagtagctccagaatgccaagtattcgtgtaaattacggttacatgttatcatttgctgttcttacataagcactcatgaaaatatggtattctgtaacttgaattccatccattttccagacctctactcatgtctgaggtaaatctagaaattgtcttagttttaggattgaaacagtctataaactgtatttttggtccatccaggaagctagtcccttgtttctcctttctacatgacattgcagtggtggtttctgtaattaaaatttgtttgcctcatgtccctttgtctgataaaccttcactctaccgattcagttgtgagcattctttttttccttctcaaaacctactatgatttgttttactgaacaaaggttatcaaccacacatccagtcctgacatggagcttttcagtgtttggagacatttctcaatcccctgctgtggtaggaactccagtggtgaacggcttgcgcgcctgcagccagagttgcagggaaagctcgtacttactgcgagcagcatgtaatcttttttcttcctggacataaagatagcttgagtaaactgttctatttcattctcttcactctttttactgtcttgcaaaaaaaaaaaaaaaaaaaataatcaaagaccactaataagattccacctctccttattaaaataattttttaaaattttgttttgcttttgtttggatgtggggtctctcttctatttgacttttacatttagatacagagtttgtagtacttcagagacatttcaagcatgagaatttgaggttacctctctttatttgacctttagggactcacgggagggcagcctgatttgtaatgaagcaccacattttggtgttaaaaacctggtttgcttaataatagcagtaatttctgtctgtggaggcaacaaataaaaaaattaacagcttgaattgagtagccaacaggaaaggttcctttcacatttacattaaaactattctgtagtcactaatgtaccataatttaaattcttttctcaaaggtatagattataaagcagtgccatttgttgctgtggtcctattctcaaatgcatggacaatgttcccccctttttaaaataatgcttgtgtctgggatgcaagctttgcttatctttttaaatacatttttaaagtatttattaatgaaccaaaggaaatcagatgctttctataagcatcagaatatataatacatagtgatttgactatgaattttaaatccacattttaatattggtgggatattgcaaagacattccttctaaagttttaatattccttttattaagggtctcagggagggtaaattagtcagccatatttattttccagaggtttaagaaattgctgtttttaactttttgaaaaaacttaaatgccaccaaactcatgtaggttgcactgcttattgaaccaataactgttggtatgcactttgttcagacacactgtgtactttttcaaaaactagtttcatgtaaagtgattggaccccatagattagtggaaaaagctgattaaccagctactcataggctgctaattcattcatgccaatgttttggtttttcagttttgcctccgtgataaattaaagaatggggaggggtgaaggaaggggaagaagattgctttagaacaagtggcatgaaattaccatctttgtagaaaccgcagctaacagtgggagttatctaagcaatcagatgttacagggccagccctttagctgctgtggtgtattctgttgggtagtgaggtagtaggtactttatagacttttaattttggaaattgatgacatccctcaggcatgtattctggaaatggaattcctgtaacttcctgtgtctgcagtatgccctacaattagtaggcagcgtgtaaaaacactagtgtagattataaagatatacattaaaagaggaccagaaatacttggtattcagtggcacagaaagcaggttaaacaaacaaaaagcacagtgttacgcttgcaagtttccatttgttttaataccacgcaatctttcacactcgtgcgtgtgcgcgcacacagagcttacctgacttgctctgcttgagtcatgcagttacaaaaaaaaagacatcttgacacccacacaatattctaatcaaaacctttcagtttcaatctggatatttaaaaacattggcagaagcttctgtgagtttagttccactaagatgtttcacctgccttatcaagaccattctcagtctacttttttaagctaccgtatcttaaattattgaaaatttattaattgctgaatatataataacctttgcttgtatgtaaccgaaaatggtttaagagccaacatttagagtatgacaatggagctgaacagtttttaatgcgcaagcagttctgttcttgtgtatgacttgtaaccttaatttactgtgtaaagatggttacattatttccttagctttgtttgttggagacaaatagagaatgcttgttaagtatgtcaaaacaatcttatcttgtgaatttttgttaatgtattatacgagctatatttttcatttgcccagaaagacagcttgtataacgcttttggaagtttctgctctgtaatgtctttagagctgacagtctgttaggtttgtttttttcttcatgctaaagtgtcagttggtggttttgtgaactggtcaaaaattcacaggtcttaaatgttttgggggaaatttatattggacactgctctttgtctagcaaataaaagatgttaatatattcctgttactggcatgtgcacgactatgttattagaagccactttatcattttcctgctttaaatagaaatgtctatttatgaattctgcttgtagttttttcacaaataaaatagtaaaatttacattggaaatctt

SEQ ID NO: 173274 - DNA, 954 bp, Artificial Sequence
  derived and/or modified sequence
tgactgcccgcccccgccgccgccctgcccggcgcccccccccccccccccggcgtgagaggctaccccgccagagccagaggcctgcagggcgccagcggcggcgccagattccccagcagcctgagcctgcccgtgcccggcaagggcggctgggtggtgagcagagccaagttccccgccctggacagctgcgagatcaccaccgcccaccccagactgtgcttcgccgtgagcccccccttcagctgcagcctgcccctgcccagcctgttcccccacagccccctgctgggcagacccaagagacaggccaagcccgccgccgacgagggcttctgggactgcagcgtgtgcaccttcagaaacagcgccgaggccttcaagtgcagcatctgcgacgtgagaaagggcaccagcaccagaaagcccagaatcaacagccagctggtggcccagcaggtggcccagcagtacgccaccccccccccccccaagaaggagaagaaggagaaggtggagaagcaggacaaggagaagcccgagaaggacaaggagatcagccccagcgtgaccaagaagaacaccaacaagaagaccaagcccaagagcgacatcctgaaggacccccccagcgaggccaacagcatccagagcgccaacgccaccaccaagaccagcgagaccaaccacaccagcagacccagactgaagaacgtggacagaagcaccgcccagcagctggccgtgaccgtgggcaacgtgaccgtgatcatcaccgacttcaaggagaagaccagaagcagcagcaccagcagcagcaccgtgaccagcagcgccggcagcgagcagcagaaccagagcagcagcggcagcgagagcaccgacaagggcagcagcagaagcagcacccccaagggcgacatgagcgccgtgaacgacgagagcttctag

SEQ ID NO: 173275 - protein, 1279 aa, Artificial Sequence
  derived and/or modified sequence
MTLTERLREKISRAFYNHGLLCASYPIPIILFTGFCILACCYPLLKLPLPGTGPVEFTTPVKDYSPPPVDSDRKQGEPTEQPEWYVGAPVAYVQQIFVKSSVFPWHKNLLAVDVFRSPLSRAFQLVEEIRNHVLRDSSGIRSLEELCLQVTDLLPGLRKLRNLLPEHGCLLLSPGNFWQNDWERFHADPDIIGTIHQHEPKTLQTSATLKDLLFGVPGKYSGVSLYTRKRMVSYTITLVFQHYHAKFLGSLRARLMLLHPSPNCSLRAESLVHVHFKEEIGVAELIPLVTTYIILFAYIYFSTRKIDMVKSKWGLALAAVVTVLSSLLMSVGLCTLFGLTPTLNGGEIFPYLVVVIGLENVLVLTKSVVSTPVDLEVKLRIAQGLSSESWSIMKNMATELGIILIGYFTLVPAIQEFCLFAVVGLVSDFFLQMLFFTTVLSIDIRRMELADLNKRLPPEACLPSAKPVGQPTRYERQLAVRPSTPHTITLQPSSFRNLRLPKRLRVVYFLARTRLAQRLIMAGTVVWIGILVYTDPAGLRNYLAAQVTEQSPLGEGALAPMPVPSGMLPPSHPDPAFSIFPPDAPKLPENQTSPGESPERGGPAEVVHDSPVPEVTWGPEDEELWRKLSFRHWPTLFSYYNITLAKRYISLLPVIPVTLRLNPREALEGRHPQDGRSAWPPPGPIPAGHWEAGPKGPGGVQAHGDVTLYKVAALGLATGIVLVLLLLCLYRVLCPRNYGQLGGGPGRRRRGELPCDDYGYAPPETEIVPLVLRGHLMDIECLASDGMLLVSCCLAGHVCVWDAQTGDCLTRIPRPGRQRRDSGVGSGLEAQESWERLSDGGKAGPEEPGDSPPLRHRPRGPPPPSLFGDQPDLTCLIDTNFSAQPRSSQPTQPEPRHRAVCGRSRDSPGYDFSCLVQRVYQEEGLAAVCTPALRPPSPGPVLSQAPEDEGGSPEKGSPSLAWAPSAEGSIWSLELQGNLIVVGRSSGRLEVWDAIEGVLCCSSEEVSSGITALVFLDKRIVAARLNGSLDFFSLETHTALSPLQFRGTPGRGSSPASPVYSSSDTVACHLTHTVPCAHQKPITALKAAAGRLVTGSQDHTLRVFRLEDSCCLFTLQGHSGAITTVYIDQTMVLASGGQDGAICLWDVLTGSRVSHVFAHRGDVTSLTCTTSCVISSGLDDLISIWDRSTGIKFYSIQQDLGCGASLGVISDNLLVTGGQGCVSFWDLNYGDLLQTVYLGKNSEAQPARQILVLDNAAIVCNFGSELSLVYVPSVLEKLD

SEQ ID NO: 173276 - protein, 771 aa, Artificial Sequence
  derived and/or modified sequence
MTLTERLREKISRAFYNHGLLCASYPIPIILFTGFCILACCYPLLKLPLPGTGPVEFTTPVKDYSPPPVDSDRKQGEPTEQPEWYVGAPVAYVQQIFVKSSVFPWHKNLLAVDVFRSPLSRAFQLVEEIRNHVLRDSSGIRSLEELCLQVTDLLPGLRKLRNLLPEHGCLLLSPGNFWQNDWERFHADPDIIGTIHQHEPKTLQTSATLKDLLFGVPGKYSGVSLYTRKRMVSYTITLVFQHYHAKFLGSLRARLMLLHPSPNCSLRAESLVHVHFKEEIGVAELIPLVTTYIILFAYIYFSTRKIDMVKSKWGLALAAVVTVLSSLLMSVGLCTLFGLTPTLNGGEIFPYLVVVIGLENVLVLTKSVVSTPVDLEVKLRIAQGLSSESWSIMKNMATELGIILIGYFTLVPAIQEFCLFAVVGLVSDFFLQMLFFTTVLSIDIRRMELADLNKRLPPEACLPSAKPVGQPTRYERSSGRLEVWDAIEGVLCCSSEEVSSGITALVFLDKRIVAARLNGSLDFFSLETHTALSPLQFRGTPGRGSSPASPVYSSSDTVACHLTHTVPCAHQKPITALKAAAGRLVTGSQDHTLRVFRLEDSCCLFTLQGHSGAITTVYIDQTMVLASGGQDGAICLWDVLTGSRVSHVFAHRGDVTSLTCTTSCVISSGLDDLISIWDRSTGIKFYSIQQDLGCGASLGVISDNLLVTGGQGCVSFWDLNYGDLLQTVYLGKNSEAQPARQILVLDNAAIVCNFGSELSLVYVPSVLEKLD

SEQ ID NO: 173277 - protein, 136 aa, Artificial Sequence
  derived and/or modified sequence
MTLTERLREKISRAFYNHGLLCASYPIPIILFTGFCILACCYPLLKLPLPGTGPVEFTTPVKDYSPPPVDSDRKQGEPTEQPEWYVGAPVAYVQQIFVKSSVFPWHKNLLAVDVFRSPLSRAFQLVEEIRNHVLRD

SEQ ID NO: 173278 - protein, 132 aa, Artificial Sequence
  derived and/or modified sequence
MTLTERLREKISRAFYNHGLLCASYPIPIILFTGFCILACCYPLLKLPLPGTGPVEFTTPVKDYSPPPVDSDRKQGEPTEQPEWYVGAPVAYVQQIFVKSSVFPWHKNLLAVDVFRSPLSRAFQLVEEIRNH

SEQ ID NO: 173279 - DNA, 3840 bp, Artificial Sequence
  derived and/or modified sequence
atgaccctgaccgagagactgagagagaagatcagcagagccttctacaaccacggcctgctgtgcgccagctaccccatccccatcatcctgttcaccggcttctgcatcctggcctgctgctaccccctgctgaagctgcccctgcccggcaccggccccgtggagttcaccacccccgtgaaggactacagccccccccccgtggacagcgacagaaagcagggcgagcccaccgagcagcccgagtggtacgtgggcgcccccgtggcctacgtgcagcagatcttcgtgaagagcagcgtgttcccctggcacaagaacctgctggccgtggacgtgttcagaagccccctgagcagagccttccagctggtggaggagatcagaaaccacgtgctgagagacagcagcggcatcagaagcctggaggagctgtgcctgcaggtgaccgacctgctgcccggcctgagaaagctgagaaacctgctgcccgagcacggctgcctgctgctgagccccggcaacttctggcagaacgactgggagagattccacgccgaccccgacatcatcggcaccatccaccagcacgagcccaagaccctgcagaccagcgccaccctgaaggacctgctgttcggcgtgcccggcaagtacagcggcgtgagcctgtacaccagaaagagaatggtgagctacaccatcaccctggtgttccagcactaccacgccaagttcctgggcagcctgagagccagactgatgctgctgcaccccagccccaactgcagcctgagagccgagagcctggtgcacgtgcacttcaaggaggagatcggcgtggccgagctgatccccctggtgaccacctacatcatcctgttcgcctacatctacttcagcaccagaaagatcgacatggtgaagagcaagtggggcctggccctggccgccgtggtgaccgtgctgagcagcctgctgatgagcgtgggcctgtgcaccctgttcggcctgacccccaccctgaacggcggcgagatcttcccctacctggtggtggtgatcggcctggagaacgtgctggtgctgaccaagagcgtggtgagcacccccgtggacctggaggtgaagctgagaatcgcccagggcctgagcagcgagagctggagcatcatgaagaacatggccaccgagctgggcatcatcctgatcggctacttcaccctggtgcccgccatccaggagttctgcctgttcgccgtggtgggcctggtgagcgacttcttcctgcagatgctgttcttcaccaccgtgctgagcatcgacatcagaagaatggagctggccgacctgaacaagagactgccccccgaggcctgcctgcccagcgccaagcccgtgggccagcccaccagatacgagagacagctggccgtgagacccagcaccccccacaccatcaccctgcagcccagcagcttcagaaacctgagactgcccaagagactgagagtggtgtacttcctggccagaaccagactggcccagagactgatcatggccggcaccgtggtgtggatcggcatcctggtgtacaccgaccccgccggcctgagaaactacctggccgcccaggtgaccgagcagagccccctgggcgagggcgccctggcccccatgcccgtgcccagcggcatgctgccccccagccaccccgaccccgccttcagcatcttcccccccgacgcccccaagctgcccgagaaccagaccagccccggcgagagccccgagagaggcggccccgccgaggtggtgcacgacagccccgtgcccgaggtgacctggggccccgaggacgaggagctgtggagaaagctgagcttcagacactggcccaccctgttcagctactacaacatcaccctggccaagagatacatcagcctgctgcccgtgatccccgtgaccctgagactgaaccccagagaggccctggagggcagacacccccaggacggcagaagcgcctggcccccccccggccccatccccgccggccactgggaggccggccccaagggccccggcggcgtgcaggcccacggcgacgtgaccctgtacaaggtggccgccctgggcctggccaccggcatcgtgctggtgctgctgctgctgtgcctgtacagagtgctgtgccccagaaactacggccagctgggcggcggccccggcagaagaagaagaggcgagctgccctgcgacgactacggctacgccccccccgagaccgagatcgtgcccctggtgctgagaggccacctgatggacatcgagtgcctggccagcgacggcatgctgctggtgagctgctgcctggccggccacgtgtgcgtgtgggacgcccagaccggcgactgcctgaccagaatccccagacccggcagacagagaagagacagcggcgtgggcagcggcctggaggcccaggagagctgggagagactgagcgacggcggcaaggccggccccgaggagcccggcgacagcccccccctgagacacagacccagaggcccccccccccccagcctgttcggcgaccagcccgacctgacctgcctgatcgacaccaacttcagcgcccagcccagaagcagccagcccacccagcccgagcccagacacagagccgtgtgcggcagaagcagagacagccccggctacgacttcagctgcctggtgcagagagtgtaccaggaggagggcctggccgccgtgtgcacccccgccctgagaccccccagccccggccccgtgctgagccaggcccccgaggacgagggcggcagccccgagaagggcagccccagcctggcctgggcccccagcgccgagggcagcatctggagcctggagctgcagggcaacctgatcgtggtgggcagaagcagcggcagactggaggtgtgggacgccatcgagggcgtgctgtgctgcagcagcgaggaggtgagcagcggcatcaccgccctggtgttcctggacaagagaatcgtggccgccagactgaacggcagcctggacttcttcagcctggagacccacaccgccctgagccccctgcagttcagaggcacccccggcagaggcagcagccccgccagccccgtgtacagcagcagcgacaccgtggcctgccacctgacccacaccgtgccctgcgcccaccagaagcccatcaccgccctgaaggccgccgccggcagactggtgaccggcagccaggaccacaccctgagagtgttcagactggaggacagctgctgcctgttcaccctgcagggccacagcggcgccatcaccaccgtgtacatcgaccagaccatggtgctggccagcggcggccaggacggcgccatctgcctgtgggacgtgctgaccggcagcagagtgagccacgtgttcgcccacagaggcgacgtgaccagcctgacctgcaccaccagctgcgtgatcagcagcggcctggacgacctgatcagcatctgggacagaagcaccggcatcaagttctacagcatccagcaggacctgggctgcggcgccagcctgggcgtgatcagcgacaacctgctggtgaccggcggccagggctgcgtgagcttctgggacctgaactacggcgacctgctgcagaccgtgtacctgggcaagaacagcgaggcccagcccgccagacagatcctggtgctggacaacgccgccatcgtgtgcaacttcggcagcgagctgagcctggtgtacgtgcccagcgtgctggagaagctggactag

SEQ ID NO: 173280 - DNA, 3840 bp, Artificial Sequence
  derived and/or modified sequence
atgaccctcaccgaacggctgagagaaaagatcagccgcgccttctacaaccacggactgttgtgcgcaagctaccccattcccataatcctgtttacgggtttctgtatcctggcttgctgttatccgttgctcaagctcccactccccgggactgggcctgtggaattcacaacaccggttaaggactacagcccgcctccagtagacagcgaccgcaagcaaggtgaacccacagaacagcctgagtggtacgttggtgccccggtagcatatgtccaacagatattcgtgaaatcttctgtattcccctggcataagaatctactagctgtggacgtcttcaggtctcctttaagcagggctttccaattagtggaggagattcgcaaccacgtgcttcgagattctagtgggattcgttctttagaggagctctgccttcaggtcaccgatttgctgcctggcctacgcaaactcaggaacctgctccccgaacacgggtgcctgcttctctcacctggtaacttttggcaaaatgactgggaacgcttccatgccgaccctgacatcatcggcacgattcatcagcatgaacctaaaaccttacagaccagcgcaacccttaaagacctgttatttggagtcccgggtaaatatagcggggtgtctttgtacacccggaaacggatggttagctacacaatcacattggtttttcagcactatcacgcgaagtttctgggttctctgcgagcccgactgatgctgctgcacccttcccctaattgctctctgcgggctgaatcactggtgcatgtgcacttcaaagaggaaatcggcgtggcagagctaattccacttgtaacaacatacataattcttttcgcatacatttatttctcaactaggaaaattgacatggtgaagagtaagtggggcctggcccttgctgcggtggtaaccgttctgtcctctctgttgatgtctgtgggactttgcacactctttggcctgacccctacactgaatggaggtgagatctttccctatctagtggttgtcatcggactggaaaacgtcctggtgctgactaaaagcgtggtgtccacgcctgtcgaccttgaagtcaagctgcgtatcgcccaggggctcagctctgaatcttggtccatcatgaagaacatggccacggagcttgggatcatcctcatcggatattttaccctggtgccagccatccaggagttttgcctattcgcagtggtggggcttgtttcagacttttttctgcaaatgctgttcttcaccactgtgctctcaatcgacatcaggagaatggaactcgcggacctcaataaacggctgcctcctgaggcctgcctcccgtcagccaaaccagtagggcagcctacccgatacgagcgtcagctggccgtcaggcctagtactcctcacaccatcaccctacagccttccagttttcgcaatttgcgcttacccaaaagattacgtgtggtgtattttctcgctcgaaccaggttggcccagagacttatcatggcagggactgttgtctggatcggcattttagtttatacagacccagccgggttgcgcaattaccttgccgcacaggtgaccgagcagtcacctctgggcgaaggagcgttggcaccaatgccagtgccttcaggaatgctaccaccctcacatccagatcctgccttctccatattcccacccgatgccccaaaactccctgaaaatcagacatctccaggcgagtccccagagcgggggggaccagcagaggttgtacatgacagccccgtgccagaagtgacttggggccccgaggatgaggagctttggcggaagctgagctttcgacactggccaacccttttttcctattacaacatcaccctagctaaacgatacatcagccttctccccgtcatacccgttacgctgagactgaaccccagagaggcgctggagggcagacatcctcaggacgggcgttcggcctggcccccaccaggtcctatcccagccggtcactgggaggccggacccaagggacccggcggcgtgcaggcacatggtgacgttaccttatataaggttgccgcgctcggcctggcgacgggtattgtgcttgtcctgttattgctgtgcctttacagggtattgtgcccgcgtaactacggccagctgggaggcggacccgggagaagaagacgcggggagctgccatgcgatgactacggatatgctccacccgagactgaaattgtacctttggtactgcgggggcacctaatggacatcgaatgcctggcctctgacgggatgctgctcgtttcctgttgtttagccggtcatgtgtgtgtgtgggatgcccagacaggcgattgtttgaccagaattcccagaccaggcaggcagagacgagatagtggagtaggcagtgggctcgaagctcaggagtcgtgggagcgcctctctgatgggggcaaagctggtcccgaggagcccggcgactccccgccgttacggcaccgaccgcgcggtccccctccaccatctctgttcggcgatcaacctgacctgacctgcttaatcgacaccaacttctcagctcagcccagaagcagccagcccacgcagccggagcctcgccaccgcgctgtctgtggtagaagtagggatagcccaggctacgatttctcctgtctggttcaaagagtgtaccaggaagaaggcttggctgcagtgtgcacccccgcccttagacccccatctccaggacccgtgctgagtcaggcgccagaggatgaagggggaagcccggagaaagggtctcccagtctcgcctgggccccatccgccgagggatcgatctggtcccttgaacttcagggtaatcttatagtcgtgggccggtcctccggaagactggaagtctgggatgcgatcgagggagtgctgtgctgcagctctgaagaggtatcttctggcatcaccgctctggtattcctggacaaaaggatcgtggctgcacggctgaacgggtccctggacttcttctctctggaaactcatactgccctctccccactgcagtttaggggaacaccaggaaggggcagctccccggcgagccctgtctattcttcaagcgacacagtcgcttgtcacctgacccacactgtgccttgcgcgcatcagaaacctatcactgcccttaaagcggccgccggacgtcttgttactggcagccaggatcatacactgagagttttcaggttggaggattcttgctgcttgtttaccctgcagggacacagtggggccataactaccgtgtacattgatcagactatggtgctggcctcaggcggccaagatggcgctatttgtctgtgggacgtcttgacagggagccgtgtttcccacgtttttgcccacagaggagacgttacaagcctgacctgtacaacatcttgtgtcatatctagtggcctcgacgacctgatcagtatctgggaccggagcaccgggattaaattttacagcatacagcaagatcttgggtgcggagcctccttgggtgtgatctcagataatctgctggtcacgggcgggcaggggtgcgtatcattctgggacttgaactacggagatctcctgcagaccgtgtatctcgggaagaacagcgaggcccagcctgccagacagatcctggtactggacaatgcggcgattgtctgcaactttggaagtgagctctctctggtgtatgttccatccgtcttagagaaattggactag

SEQ ID NO: 173281 - DNA, 3840 bp, Artificial Sequence
  derived and/or modified sequence
atgaccctgacagagcggctgcgggagaagatcagccgggccttctacaaccacggcctgctgtgtgccagctaccccatccccatcatcctcttcaccggcttctgcatcctggcctgctgctaccccctgctgaagctgcccctgcccggcaccggccctgtggagttcaccacccctgtgaaggactacagccccccacctgtggacagcgacaggaagcagggcgagcccacagagcagcctgagtggtacgtgggcgcccctgtggcctacgtgcagcagatctttgtgaagagctctgtgttcccctggcacaagaacctgctggccgtggatgtgttccgcagccccctgagccgggccttccagctggtggaggagatccggaaccacgtgctgcgggacagcagcggcatccgcagcctggaggagctgtgcctgcaggtgacagacctgctgcccggcctgaggaagctgaggaacctgctgcctgagcacggctgcctgctgctgagccctggcaacttctggcagaatgactgggagcgcttccacgccgaccctgacatcatcggcaccatccaccagcacgagcccaagaccctgcagaccagcgccaccctgaaggacctgctgtttggagtgcctgggaagtacagcggcgtgtccctgtacaccaggaagaggatggtgtcctacaccatcaccctggtgttccagcactaccacgccaagttcctgggcagcctgcgggcccggctgatgctgctgcaccccagccccaactgcagcctgcgggcagagagcctggtgcacgtgcacttcaaggaggagattggagtggccgagctgatccccctggtgaccacctacatcatcctgtttgcctacatctacttcagcaccaggaagattgacatggtgaagagcaagtggggcctggccctggccgctgtggtgacagtgctgagcagcctgctgatgtctgtgggcctgtgcaccctgtttggcctgacccccaccctgaatggaggagagatcttcccctacctggtggtggtgattggcctggagaatgtgctggtgctgaccaagtctgtggtgtccacccctgtggacctggaggtgaagctgagaattgcccagggcctgagcagcgagagctggagcatcatgaagaacatggccacagagctgggcatcatcctgattggctacttcaccctggtgcctgccatccaggagttctgcctgtttgctgtggtgggcctggtgtctgacttcttcctgcagatgctgttcttcaccaccgtgctgagcattgacatccggaggatggagctggccgacctgaacaagaggctgcccccagaggcctgcctgcccagcgccaagcctgtgggccagcccaccaggtatgaaaggcagctggccgtgcggcccagcaccccccacaccatcaccctgcagcccagcagcttcaggaacctgcggctgcccaagaggctgcgggtggtgtacttcctggcccggacccggctggcccagaggctcatcatggccggcaccgtggtgtggattggcatcctggtgtacacagatcctgctggcctgaggaactacctggccgcccaggtgacagagcagagccccctgggggagggcgccctggcccccatgcctgtgcccagcggcatgctgccccccagccacccagaccctgccttcagcatcttccccccagatgcccccaagctgcctgagaaccagaccagccctggagagagccctgagcggggcggccctgctgaggtggtgcatgacagccctgtgcctgaggtgacctggggcccagaagatgaggagctgtggaggaagctgtccttccgccactggcccaccctcttctcctactacaacatcaccctggccaagcgctacatcagcctgctgcctgtgattcctgtgaccctgcggctgaacccccgggaggccctggagggccgccacccccaggacggccgcagcgcctggcccccacctggccccatcccagctggccactgggaggccggccccaagggccctggaggagtgcaggcccatggagatgtgaccctgtacaaggtggccgccctgggcctggccaccggcatcgtgctggtgctgctgctgctgtgcctgtacagagtgctgtgccccaggaactacggccagctgggcggcggccctggaagaagaagaagaggagagctgccctgtgatgattatggctacgcccctcctgagacagaaattgtgcccctggtgctgcggggccacctgatggacatcgagtgcctggccagtgatggcatgctgctggtgtcctgctgcctggccggccacgtgtgtgtgtgggatgcccagacaggagactgcctgacccgcatccccaggcctggccggcagaggcgggacagcggcgtgggcagcggcctggaggcccaggagagctgggagcggctgagtgatggcggcaaggccggccctgaggagcccggggacagcccccccctgcggcaccggccccggggccccccaccacccagcctgtttggagaccagcctgacctgacctgcctgattgacaccaacttcagcgcccagcccaggagcagccagcccacccagcctgagcccaggcacagagctgtgtgtggccgcagccgggacagccctggctatgacttcagctgcctggtgcagagggtgtaccaggaggagggcctggccgctgtgtgcaccccagccctgcggccccccagccctggccctgtgctgagccaggccccagaagatgagggcggcagccctgagaagggcagccccagcctggcctgggcccccagcgctgagggcagcatctggagcctggagctgcagggcaacctgattgtggtgggccgcagcagcggccgcctggaggtgtgggatgccattgaaggagtgctgtgctgcagcagcgaggaggtgagcagcggcatcacagccctggtgttcctggacaagagaattgtggccgcccggctgaatggcagcctggacttcttcagcctggagacccacacagccctgagccccctgcagttccggggcaccccaggccggggcagcagccctgccagccctgtgtacagcagcagtgacacagtggcctgccacctgacccacacagtgccctgtgcccaccagaagcccatcacagccctgaaggctgctgctggccgcctggtgacaggcagccaggaccacaccctgcgggtcttccggctggaggacagctgctgcctcttcaccctgcagggccacagcggggccatcaccaccgtgtacatcgaccagaccatggtgctggccagcggcggccaggatggagccatctgcctgtgggatgtgctgaccggcagccgggtgagccacgtgtttgcccacagaggagatgtgaccagcctgacctgcaccaccagctgtgtgatcagcagcggcctggatgacctgatcagcatctgggacaggagcacaggcatcaagttctacagcatccagcaggacctgggctgtggggccagcctgggcgtcatcagtgacaacctgctggtgactggaggccagggctgtgtgtccttctgggacctgaactatggagacctgctgcagacagtgtacctgggcaagaacagcgaggcccagcctgcccggcagatcctggtgctggacaatgctgccatcgtgtgcaactttggcagcgagctgagcctggtgtatgtgcccagcgtgctggagaagctggactag

SEQ ID NO: 173282 - DNA, 3840 bp, Artificial Sequence
  derived and/or modified sequence
atgaccctgaccgagcggctgcgggagaagatcagccgggccttctacaaccacgggctgctatgcgcatcttacccaattcccatcattctgttcacagggttttgcatcctagcatgctgctatcccctcttaaaactccccctgcccggtactggacccgttgagtttacaacacccgttaaagactacagtccacctccagtggattctgatagaaagcagggggagcctacagaacagccagagtggtatgtcggggcgccggtggcatatgtgcagcagatttttgtcaagtccagtgtgtttccctggcataaaaatctgttagccgttgacgtcttcaggagccctttgtcgcgagccttccagctggtcgaggagatcagaaaccacgtgctgagggacagtagcgggattagatccctggaagagttgtgtctgcaggtgaccgacctcctgccagggttacgaaaactgcgaaatcttctcccagagcatggctgcctcttacttagtcccggtaatttctggcaaaatgattgggagagattccacgccgacccagacattatcggcacaattcaccagcatgaacctaaaacattgcagaccagcgcaaccctcaaggatttgttgttcggggtcccaggaaaatactctggagtatctctctatactagaaagagaatggtcagctatacgatcaccctcgtgtttcaacattatcatgcaaagttcctagggagcttgcgcgcccgccttatgctgttgcacccttcacctaattgttcattaagggccgagtccctcgtgcatgtacatttcaaggaggaaataggcgtcgctgaactaattcccctcgtgactacctatatcattctgtttgcatacatctactttagtacacgcaagatcgatatggtcaaatctaaatggggcctcgcgctggcggctgtcgttacagtcctgtcatccctcctgatgagcgtcggcttgtgtacactttttgggctgaccccaaccttgaatggcggagagatcttcccgtatctggtggtggtgattggcttggagaatgtgctggtcctgactaaatcagttgtgtcgacccccgtggatttggaagtgaaattacggatcgcgcaaggcctgtcttcggaaagctggtctatcatgaaaaatatggctactgagctgggtatcattctcatcgggtatttcactttagtcccggcaattcaggaattctgcctgtttgctgtggtaggattggtgtctgacttctttctgcagatgctcttcttcaccaccgttctttccatagacatccgccgcatggagctagccgacctgaataaacggctgcccccagaggcgtgtctgcctagcgcgaaaccagttggtcagcccacaaggtatgagagacagctagccgtaaggccgagcacccctcatacaataactttacagcctagctcctttcggaacttacgactaccaaaacgcctaagagtcgtgtatttcctggctcggactcgcctggctcaaaggctcatcatggcggggacagtggtgtggatcggcatcctggtctataccgacccggcgggactgagaaattatttagccgcccaagtcacagagcaatcaccgctgggggaaggcgcgctcgcaccaatgccggtcccctcaggcatgctcccccctagccaccccgaccctgcctttagtatttttcccccagacgcgcctaaattgcccgaaaaccagacgtcaccaggtgaaagccccgagcgaggcggcccggcggaggtggtacatgattcgcccgtcccagaggtgacttggggaccggaagatgaggagctttggaggaagttgtcgtttagacactggccaacgctgttctcttactataatatcaccctggctaagagatacatttctttactcccagtgattccggtgactctgcggttgaatccaagggaggcattagagggtagacatccgcaggatggccgcagtgcttggccgcctccaggcccgataccagctggtcactgggaagcaggcccaaaaggaccaggtggagtgcaggcccacggcgatgtaaccttatacaaagttgcagctctggggctcgcaacgggcattgtcctcgtgctgctcctgctgtgcctttatcgcgtgctatgcccccggaactatggccaactcgggggcggccctgggaggcggaggagaggcgaactgccatgcgatgactacgggtacgctcctcctgagactgagatagttcctttggtgctgaggggacacctgatggatatcgaatgcctagcgtcagacggcatgttattagtcagttgttgccttgcaggacacgtgtgtgtctgggacgcacagacgggggattgtctcactaggataccacgcccaggacggcaacgtagggattcaggcgtgggcagcggactcgaggcccaggaaagctgggagaggctgagcgacggtggcaaagccggacccgaggaaccaggggactcccccccacttcgtcaccgcccccgaggccctcccccaccctcccttttcggcgaccaacccgatctgacctgtctcatagacacgaatttttctgcccagccccgtagctcacagcctactcagcccgaaccccgacaccgagcagtgtgtgggcgctctcgagacagtcccggctacgatttttcatgtctcgtgcagcgcgtgtaccaggaggaaggccttgccgctgtctgtacgcctgccttgcgaccaccttcaccaggtccagtattgtcacaagctcccgaagatgaggggggtagcccagagaaaggctccccttccttagcctgggcaccgtctgccgaaggtagcatttggtcccttgagctccagggaaatttaatcgttgtgggccgaagtagcggaagacttgaggtgtgggacgccatagagggcgtactgtgttgctcaagcgaggaagtctcctctggaattaccgccctggtgtttcttgataaaaggattgttgcggcccgtctgaatggatcactcgattttttttccctggagacccacacggccctgagccccctgcagttcagaggaacacctggcaggggtagttccccggcgagcccggtgtacagttctagtgacacagtggcttgccatctcacccatactgtaccctgtgcacaccagaaaccgattactgctttaaaagcagcagctggcaggctagtaaccggctcacaggaccataccctgcgcgtattcagactggaagacagctgctgcctgtttacattacagggtcacagtggggccatcaccactgtatacatcgaccaaacaatggtcctggctagcggaggccaggacggcgcaatctgcttgtgggatgtgttgacggggtctcgcgtcagtcatgtctttgctcacaggggcgacgtgacaagcttaacctgtactacctcctgtgtgatttcttcaggcctagacgacctgatcagtatttgggatcggtctaccggcattaagttttactccattcagcaggatctgggatgtggcgcctctttgggagtcattagcgataatttactcgtgacgggcggacagggctgcgtgagcttctgggatcttaactatggtgatctgctgcagaccgtgtatttggggaaaaattccgaggcccagcctgcgagacagatcctggtcctggataatgctgctatcgtttgcaatttcggcagtgaactgagcctggtttacgttccgtccgtgttggagaaattagattag

SEQ ID NO: 173283 - DNA, 3840 bp, Artificial Sequence
  derived and/or modified sequence
atgacattgaccgagagactgagagaaaagatcagccgggcattctataaccacggcctgctctgcgcaagctaccccatccccattattctcttcactggattttgtatcctggcctgctgttaccctttactgaagctgccattacctggaaccgggccagtcgaatttaccacacccgtcaaggattattcaccaccccctgtggactcggaccggaaacagggcgagcccactgagcaacctgagtggtatgtcggggcaccagtagcatatgtgcaacagatattcgtcaaaagctcggtgttcccatggcataagaacctgctggctgttgacgtgtttagatcaccactttctcgcgcattccagttggtggaggaaattcgcaaccacgtactgcgcgactctagtggaattcggagcctggaggaattatgcctccaggtgaccgatctcctgccgggtttgcgaaaattgcgcaacctgcttccggagcacggctgtctgctgcttagcccaggtaacttttggcagaacgactgggagaggtttcacgctgatcccgacatcattggaaccatccatcaacatgaacccaagaccttgcagactagtgccactctcaaggacttattatttggggttccaggcaagtactcaggagtaagcttgtatacccgaaaacgcatggtgtcctatacaattacactggtattccagcattatcacgcaaagtttctggggtctttaagggccagactgatgcttctccatccaagtcctaactgctccttgcgcgcagagtccctggtccatgtccacttcaaagaagagatcggcgttgccgagcttattccactcgtcactacttacattatcctgttcgcatacatctacttcagcactcgcaagattgatatggtaaaatccaagtgggggctggccctggctgccgtcgtgacagtgctgagcagcctcctcatgtcagtgggcctctgcactctatttggcctgactcctacactcaacgggggtgagatttttccgtatctagtcgtcgtcattggcctggaaaatgtcctggtgctgactaaatccgtcgttagcactccagtggatctggaagtcaaactacggatcgctcaaggtctgtcctccgagagctggtccattatgaaaaacatggctaccgagctggggatcatcctgattggatacttcactctcgtgccagccatccaagaattctgcctgttcgcggtggtaggtctcgtgtctgacttcttccttcaaatgctgttctttacgaccgtccttagtattgacatccgacgcatggagctagctgacctgaataaacgccttcctccagaggcctgcttgcccagcgccaaacccgtgggtcagccaacaagatacgagcgccaactggcagtgcgtccttcaacccctcacaccataacattgcaaccgtcttcgtttcgcaacctgcgactgcccaaacggctacgcgtggtgtacttcctggccaggactcggttggcccagcggttgattatggcaggcacagtggtctggatcggtatccttgtttacacggatcccgctggcctccggaattatttggctgcccaggttaccgaacagtcaccgcttggggaaggagcacttgcaccaatgccagtccctagcggcatgcttcctccctcccatcccgaccccgcattcagtatatttcctccagatgctcctaagctacccgagaaccagactagtccgggtgaaagccccgagagaggaggccctgcagaggtcgttcatgatagtcccgtccctgaggtgacatggggacccgaggacgaggaactgtggaggaaattgagtttcaggcactggccaaccctcttctcttactataatataacattagcaaaacgttacatttctttgctgcccgttatcccggtaactttgcggctgaacccccgtgaggcccttgagggacgtcatccacaggatgggcgaagcgcgtggcctccacctggaccaattcccgcaggccattgggaggccggtccgaaagggccaggaggagtccaggcccatggagatgtcacgttatacaaagtcgccgctctcggactggcgaccgggattgtcctggtgctgctgttgctgtgtctgtatcgggtgctgtgtccacgtaattacgggcaattgggtggcggaccaggcagacgcaggcgaggagagcttccgtgcgacgactacggctacgcccctccagaaacagagatcgtccctctggtgctacgcggtcatctcatggacatagagtgcttggccagcgatgggatgctcttagtaagctgttgtctagcaggacatgtgtgtgtatgggacgcacagaccggggactgcctaactcggatcccacgtcccggacgtcaacgacgggattctggagtgggcagcgggctcgaagcacaggagtcgtgggaacgcctgagcgatggaggcaaggctggacccgaagagcccggtgactctccacctctcaggcacagaccccgaggacccccaccaccttctctgtttggtgatcagccagaccttacttgtttaattgatactaactttagcgcccagcctcgatccagccagccgacccagcccgagcctcggcatagggccgtctgtggcagatcaagggactctccagggtacgattttagctgcctggtccaaagagtgtatcaggaagagggattggctgccgtgtgcacgcccgcattaaggccaccttcacccggacctgtcctgtcacaagcccctgaggatgagggaggctcccccgaaaaaggaagcccaagcctcgcgtgggcgccttctgccgagggatctatctggagcctggagttacagggtaaccttattgtggtgggccgatctagcgggaggctcgaagtttgggatgccatcgaaggagttctttgttgctcgtcggaggaggtgtcatctggcataaccgccctggtcttcctcgataaacggattgttgccgctcgcctgaatggcagcctggatttcttctcactcgagacccacaccgctttatctccactccaatttagggggacacccggtcggggttcaagtcccgcatccccggtctattcttcaagcgacacggtggcctgtcacctcacgcacaccgtgccctgtgcacaccaaaagcccattaccgccctgaaagccgcagcgggacggttggtgactggaagccaagaccataccttgcgcgtgttcagacttgaagactcttgctgtctcttcactctccaggggcacagcggcgcaattaccaccgtctacatcgaccagactatggtgctggcctcgggcggacaggatggagcaatctgtctgtgggacgtgctcacaggatcccgagtgagccacgtgtttgcccatcgaggcgatgtgacatctctcacctgtacaacctcatgtgttattagcagtggcctggacgatcttatctccatctgggatcgctcgaccggaattaaattctatagtatccaacaggacctaggctgtggagctagccttggagtgatctcagataatttactcgttactggcggacaaggctgtgtgagcttctgggatctgaactatggagaccttcttcagactgtgtatctgggcaagaacagtgaagcacagcccgcaaggcagatcctggtcctggataacgcagctatcgtgtgcaactttggctcagagctcagcttggtgtacgttccttcagtgttagaaaagctggactag

SEQ ID NO: 173284 - DNA, 4394 bp, Artificial Sequence
  derived and/or modified sequence
acgctccgcccggcccggcccggcccggccgtccatacttccctccggtgtccaccagagggcgaacgggagacgcgaatgtggttcgactacgcatgcgcacgccgctgggcgcacgtgcggagggcggcggggcgggagggtaaaggtaggaggtgagaggtgaaggggcgggcacccggcggccaggagagagagggagggcgccacgcaccggactgcgggccgagagcgcgcacgccgcgctccgcccctgctgccgcccccgtcgccgccgccgccgccgccgcagcttgggaggtgctgccaccacaggtacctgcacatgttgttctttgtcagtgctgtcaagtgtgtgccagggtgatccatggtcactttccgggatggcagcaaggtgacttcggctgaggatgaccctgactgaaaggctgcgtgagaagatatctcgggccttctacaaccatgggctcctctgtgcatcctatcccatccccatcatcctcttcacagggttctgcatcttagcctgctgctacccactgctgaaactccccttgccaggaacaggacctgtggaattcaccacccctgtgaaggattactcgcccccacctgtggactctgaccgcaaacaaggagagcctactgagcagcctgagtggtatgtgggtgccccggtggcttatgtccagcagatatttgtgaagtcctcagtgtttccctggcacaagaacctcctggcagtagatgtatttcgttcacctttgtcccgggcattccaactggtggaggagatccggaaccacgtgctgagagacagctctgggatcaggagcttggaggagttgtgtctgcaagtgaccgacctgctgccaggccttaggaagctcaggaacctactccctgagcatggatgcctgctgctgtcccctgggaacttctggcagaatgactgggaacgcttccatgctgatcctgacatcattgggaccatccaccagcacgagcctaaaaccctgcagacttcagccacactcaaagacttgttatttggtgttcctgggaagtacagcggggtgagcctctacaccaggaagaggatggtctcctacaccatcaccctggtcttccagcactaccatgccaagttcctgggcagcctgcgtgcccgcctgatgcttctgcaccccagccccaactgcagccttcgggcggagagcctggtccacgtgcacttcaaggaggagattggtgtcgctgagctcatcccccttgtgaccacctacatcatcttgtttgcctacatctacttctccacgcggaagatcgacatggtcaagtccaagtgggggctggccctggctgccgtggtcacagtgctcagctcgctgctcatgtctgtgggactctgcacactcttcggcctgacgcccaccctcaatggcggcgagattttcccctaccttgtggtggttattgggttagagaatgtgttggtgctcaccaagtctgtggtctcaaccccggtagacctggaggtgaagctgcggatcgcccaaggcctaagcagcgagagctggtccatcatgaagaacatggccacggagctgggcatcatcctcatcggctacttcaccctagtgcccgccatccaggagttctgtctctttgctgtcgtggggctggtgtctgacttcttccttcagatgctgtttttcaccactgtcctgtccattgacattcgccggatggagctagcagacctgaacaagcgactgccccctgaggcctgcctgccctcagccaagccagtgggacagccaacgcgctacgagcggcagctggctgtgaggccgtccacaccccacaccatcacgttgcagccgtcttccttccgaaacctgcggctccccaagaggctgcgtgttgtctacttcctggcccgcacccgcctggcacagcgcctcatcatggctggcaccgttgtctggattggcatcctggtatacacagacccagcagggctgcgcaactacctcgctgcccaggtgacggaacagagcccattgggtgagggagccctggctcccatgcccgtgcctagtggcatgctgccccccagccacccggaccctgccttctccatcttcccacctgatgcccctaagctacctgagaaccagacgtcgccaggcgagtcacctgagcgtggaggtccagcagaggttgtccatgacagcccagtcccagaggtaacctgggggcctgaggatgaggaactttggaggaaattgtccttccgccactggccgacgctcttcagctattacaacatcacactggccaagaggtacatcagcctgctgcccgtcatcccagtcacgctccgcctgaacccgagggaggctctggagggccggcaccctcaggacggccgcagtgcctggcccccaccggggcccatacctgctgggcactgggaagcaggacccaagggcccaggtggggtgcaggcccatggagacgtcacgctgtacaaggtggcggcgctgggcctggccaccggcatcgtcttggtgctgctgctgctctgcctctaccgcgtgctatgcccgcgcaactacgggcagctgggtggtgggcccgggcggcggaggcgcggggagctgccctgcgacgactacggctatgcgccacccgagacggagatcgtgccgcttgtgctgcgcggccacctcatggacatcgagtgcctggccagcgacggcatgctgctggtgagctgctgcctggcaggccacgtctgcgtgtgggacgcgcagaccggggattgcctaacgcgcattccgcgcccaggcaggcagcgccgggacagtggcgtgggcagcgggcttgaggctcaggagagctgggaacgactttcagatggtgggaaggctggtccagaggagcctggggacagccctcccctgagacaccgcccccggggccctccgccgccttccctcttcggggaccagcctgacctcacctgcttaattgacaccaacttttcagcgcagcctcggtcctcacagcccactcagcccgagccccggcaccgggcggtctgtggccgctctcgggactccccaggctatgacttcagctgcctggtgcagcgggtgtaccaggaggaggggctggcggccgtctgcacaccagccctgcgcccaccctcgcctgggccggtgctgtcccaggcccctgaggacgagggtggctcccccgagaaaggctccccttccctcgcctgggcccccagtgccgagggttccatctggagcttggagctgcagggcaacctcatcgtggtggggcggagcagcggccggctggaggtgtgggacgccattgaaggggtgctgtgctgcagcagcgaggaggtctcctcaggcattaccgctctggtgttcttggacaaaaggattgtggctgcacggctcaacggttcccttgatttcttctccttggagacccacactgccctcagccccctgcagtttagagggaccccagggcggggcagttcccctgcctctccagtgtacagcagcagcgacacagtggcctgtcacctgacccacacagtgccctgtgcacaccaaaaacccatcacagccctgaaagccgctgctgggcgcttggtgactgggagccaagaccacacactgagagtgttccgtctggaggactcgtgctgcctcttcacccttcagggccactcaggggccatcacgaccgtgtacattgaccagaccatggtgctggccagtggaggacaagatggggccatctgcctgtgggatgtactgactggcagccgggtcagccatgtgtttgctcaccgtggggatgtcacctcccttacctgtaccacctcctgtgtcatcagcagtggcctggatgacctcatcagcatctgggaccgcagcacaggcatcaagttctactccattcagcaggacctgggctgtggtgcaagcttgggtgtcatctcagacaacctgctggtgactggcggccagggctgtgtctccttttgggacctaaactacggggacctgttacagacagtctacctggggaagaacagtgaggcccagcctgcccgccagatcctggtgctggacaacgctgccattgtctgcaactttggcagtgagctcagcctggtgtatgtgccctctgtgctggagaagctggactgagcgcagggcctccttgcccaggcaggaggctggggtgctgtgtgggggccaatgcactgaacctggacttgggggaaagagccgagtatcttccagccgctgcctcctgactgtaataatattaaacttttttaaaaaacc

SEQ ID NO: 173285 - DNA, 2925 bp, Artificial Sequence
  derived and/or modified sequence
ctgggaacgcttccatgctgatcctgacatcattgggaccatccaccagcacgagcctaaaaccctgcagacttcagccacactcaaagacttgttatttggtgttcctgggaagtacagcggggtgagcctctacaccaggaagaggatggtctcctacaccatcaccctggtcttccagcactaccatgccaagttcctgggcagcctgcgtgcccgcctgatgcttctgcaccccagccccaactgcagccttcgggcggagagcctggtccacgtgcacttcaaggaggagattggtgtcgctgagctcatcccccttgtgaccacctacatcatcttgtttgcctacatctacttctccacgcggaagatcgacatggtcaagtccaagtgggggctggccctggctgccgtggtcacagtgctcagctcgctgctcatgtctgtgggactctgcacactcttcggcctgacgcccaccctcaatggcggcgagattttcccctaccttgtggtggttattgggttagagaatgtgttggtgctcaccaagtctgtggtctcaaccccggtagacctggaggtgaagctgcggatcgcccaaggcctaagcagcgagagctggtccatcatgaagaacatggccacggagctgggcatcatcctcatcggctacttcaccctagtgcccgccatccaggagttctgtctctttgctgtcgtggggctggtgtctgacttcttccttcagatgctgtttttcaccactgtcctgtccattgacattcgccggatggagctagcagacctgaacaagcgactgccccctgaggcctgcctgccctcagccaagccagtgggacagccaacgcgctacgagcggcagctggctgtgaggccgtccacaccccacaccatcacgttgcagccgtcttccttccgaaacctgcggctccccaagaggctgcgtgttgtctacttcctggcccccaccggggcccatacctgctgggcactgggaagcaggacccaagggcccaggtggggtgcaggcccatggagacgtcacgctgtacaaggtggcggcgctgggcctggccaccggcatcgtcttggtgctgctgctgctctgcctctaccgcgtgctatgcccgcgcaactacgggcagctgggtggtgggcccgggcggcggaggcgcggggagctgccctgcgacgactacggctatgcgccacccgagacggagatcgtgccgcttgtgctgcgcggccacctcatggacatcgagtgcctggccagcgacggcatgctgctggtgagctgctgcctggcaggccacgtctgcgtgtgggacgcgcagaccggggattgcctaacgcgcattccgcgcccaggcaggcagcgccgggacagtggcgtgggcagcgggcttgaggctcaggagagctgggaacgactttcagatggtgggaaggctggtccagaggagcctggggacagccctcccctgagacaccgcccccggggccctccgccgccttccctcttcggggaccagcctgacctcacctgcttaattgacaccaacttttcagcgcagcctcggtcctcacagcccactcagcccgagccccggcaccgggcggtctgtggccgctctcgggactccccaggctatgacttcagctgcctggtgcagcgggtgtaccaggaggaggggctggcggccgtctgcacaccagccctgcgcccaccctcgcctgggccggtgctgtcccaggcccctgaggacgagggtggctcccccgagaaaggctccccttccctcgcctgggcccccagtgccgagggttccatctggagcttggagctgcagggcaacctcatcgtggtggggcggagcagcggccggctggaggtgtgggacgccattgaaggggtgctgtgctgcagcagcgaggaggtctcctcaggcattaccgctctggtgttcttggacaaaaggattgtggctgcacggctcaacggttcccttgatttcttctccttggagacccacactgccctcagccccctgcagtttagagggaccccagggcggggcagttcccctgcctctccagtgtacagcagcagcgacacagtggcctgtcacctgacccacacagtgccctgtgcacaccaaaaacccatcacagccctgaaagccgctgctgggcgcttggtgactgggagccaagaccacacactgagagtgttccgtctggaggactcgtgctgcctcttcacccttcagggccactcaggggccatcacgaccgtgtacattgaccagaccatggtgctggccagtggaggacaagatggggccatctgcctgtgggatgtactgactggcagccgggtcagccatgtgtttgctcaccgtggggatgtcacctcccttacctgtaccacctcctgtgtcatcagcagtggcctggatgacctcatcagcatctgggaccgcagcacaggcatcaagttctactccattcagcaggacctgggctgtggtgcaagcttgggtgtcatctcagacaacctgctggtgactggcggccagggctgtgtctccttttgggacctaaactacggggacctgttacagacagtctacctggggaagaacagtgaggcccagcctgcccgccagatcctggtgctggacaacgctgccattgtctgcaactttggcagtgagctcagcctggtgtatgtgccctctgtgctggagaagctggactgagcgcagggcctccttgcccaggcaggaggctggggtgctgtgtgggggccaatgcactgaacctggacttgggggaaagagccgagtatcttccagccgctgcctcctgactgtaataatattaaactttttt

SEQ ID NO: 173286 - protein, 389 aa, Artificial Sequence
  derived and/or modified sequence
MAEPDPSHPLETQAGKVQEAQDSDSDSEGGAAGGEADMDFLRNLFSQTLSLGSQKERLLDELTLEGVARYMQSERCRRVICLVGAGISTSAGIPDFRSPSTGLYDNLEKYHLPYPEAIFEISYFKKHPEPFFALAKELYPGQFKPTICHYFMRLLKDKGLLLRCYTQNIDTLERIAGLEQEDLVEAHGTFYTSHCVSASCRHEYPLSWMKEKIFSEVTPKCEDCQSLVKPDIVFFGESLPARFFSCMQSDFLKVDLLLVMGTSLQVQPFASLISKAPLSTPRLLINKEKAGQSDPFLGMIMGLGGGMDFDSKKAYRDVAWLGECDQGCLALAELLGWKKELEDLVRREHASIDAQSGAGVPNPSTSASPKKSPPPAKDEARTTEREKPQ

SEQ ID NO: 173287 - protein, 130 aa, Artificial Sequence
  derived and/or modified sequence
MDFLRNLFSQTLSLGSQKERLLDELTLEGVARYMQSERCRRVICLVGAGISTSAGIPDFRSPSTGLYDNLEKYHLPYPEAIFEISYFKKHPEPFFALAKELYPGQFKPTICHYFMRLLKDKGLLLRCYTQ

SEQ ID NO: 173288 - protein, 352 aa, Artificial Sequence
  derived and/or modified sequence
MDFLRNLFSQTLSLGSQKERLLDELTLEGVARYMQSERCRRVICLVGAGISTSAGIPDFRSPSTGLYDNLEKYHLPYPEAIFEISYFKKHPEPFFALAKELYPGQFKPTICHYFMRLLKDKGLLLRCYTQNIDTLERIAGLEQEDLVEAHGTFYTSHCVSASCRHEYPLSWMKEKIFSEVTPKCEDCQSLVKPDIVFFGESLPARFFSCMQSDFLKVDLLLVMGTSLQVQPFASLISKAPLSTPRLLINKEKAGQSDPFLGMIMGLGGGMDFDSKKAYRDVAWLGECDQGCLALAELLGWKKELEDLVRREHASIDAQSGAGVPNPSTSASPKKSPPPAKDEARTTEREKPQ

SEQ ID NO: 173289 - protein, 169 aa, Artificial Sequence
  derived and/or modified sequence
MDFLRNLFSQTLSLGSQKERLLDELTLEGVARYMQSERCRRVICLVGAGISTSAGIPDFRSPSTGLYDNLEKYHLPYPEAIFEISYFKKHPEPFFALAKELYPGQFKPTICHYFMRLLKDKGLLLRCYTQNIDTLERIAGLEQEDLVEAHGTFYTSHCVSASCRHEYPL

SEQ ID NO: 173290 - protein, 237 aa, Artificial Sequence
  derived and/or modified sequence
MDFLRNLFSQTLSLGSQKERLLDELTLEGVARYMQSERCRRVICLVGAGISTSAGIPDFRSPSTGLYDNLEKYHLPYPEAIFEISYFKKHPEPFFALAKELYPGQFKPTICHYFMRLLKDKGLLLRCYTQNIDTLERIAGLEQEDLVEAHGTFYTSHCVSASCRHEYPLSWMKEKIFSEVTPKCEDCQSLVKPDIVFFGESLPARFFSCMQSDFLKVDLLLVMGTSLQVQPFASLIS

SEQ ID NO: 173291 - protein, 73 aa, Artificial Sequence
  derived and/or modified sequence
MDFLRNLFSQTLSLGSQKERLLDELTLEGVARYMQSERCRRVICLVGAGISTSAGIPDFRSPSTGLYDNLEKY

SEQ ID NO: 173292 - protein, 389 aa, Artificial Sequence
  derived and/or modified sequence
MSDEAEDSDSDSEGGAAGGEADMDFLRNLFSQTLSLGSQKERLLDELTLEGVARYMQSERCRRVICLVGAGISTSAGIPDFRSPSTGLYDNLEKYHLPYPEAIFEISYFKKHPEPFFALAKELYPGQFKPTICHYFMRLLKDKGLLLRCYTQNIDTLERIAGLEQEDLVEAHGTFYTSHCVSASCRHEYPLSWMKEKIFSEVTPKCEDCQSLVKPDIVFFGESLPARFFSCMQSDFLKVDLLLVMGTSLQVQPFASLISKAPLSTPRLLINKEKAGQSDPFLGMIMGLGGGMDFDSKKAYRDVAWLGECDQGCLALAELLGWKKELEDLVRREHASIDAQGGGGPQPQHFSFPQEVPATCQGRGQDNREGETPVTAASPRRDAELLRDS

SEQ ID NO: 173293 - DNA, 1170 bp, Artificial Sequence
  derived and/or modified sequence
atggccgagcccgaccccagccaccccctggagacccaggccggcaaggtgcaggaggcccaggacagcgacagcgacagcgagggcggcgccgccggcggcgaggccgacatggacttcctgagaaacctgttcagccagaccctgagcctgggcagccagaaggagagactgctggacgagctgaccctggagggcgtggccagatacatgcagagcgagagatgcagaagagtgatctgcctggtgggcgccggcatcagcaccagcgccggcatccccgacttcagaagccccagcaccggcctgtacgacaacctggagaagtaccacctgccctaccccgaggccatcttcgagatcagctacttcaagaagcaccccgagcccttcttcgccctggccaaggagctgtaccccggccagttcaagcccaccatctgccactacttcatgagactgctgaaggacaagggcctgctgctgagatgctacacccagaacatcgacaccctggagagaatcgccggcctggagcaggaggacctggtggaggcccacggcaccttctacaccagccactgcgtgagcgccagctgcagacacgagtaccccctgagctggatgaaggagaagatcttcagcgaggtgacccccaagtgcgaggactgccagagcctggtgaagcccgacatcgtgttcttcggcgagagcctgcccgccagattcttcagctgcatgcagagcgacttcctgaaggtggacctgctgctggtgatgggcaccagcctgcaggtgcagcccttcgccagcctgatcagcaaggcccccctgagcacccccagactgctgatcaacaaggagaaggccggccagagcgaccccttcctgggcatgatcatgggcctgggcggcggcatggacttcgacagcaagaaggcctacagagacgtggcctggctgggcgagtgcgaccagggctgcctggccctggccgagctgctgggctggaagaaggagctggaggacctggtgagaagagagcacgccagcatcgacgcccagagcggcgccggcgtgcccaaccccagcaccagcgccagccccaagaagagccccccccccgccaaggacgaggccagaaccaccgagagagagaagccccagtag

SEQ ID NO: 173294 - DNA, 1170 bp, Artificial Sequence
  derived and/or modified sequence
atgagcgacgaggccgaggacagcgacagcgacagcgagggcggcgccgccggcggcgaggccgacatggacttcctgagaaacctgttcagccagaccctgagcctgggcagccagaaggagagactgctggacgagctgaccctggagggcgtggccagatacatgcagagcgagagatgcagaagagtgatctgcctggtgggcgccggcatcagcaccagcgccggcatccccgacttcagaagccccagcaccggcctgtacgacaacctggagaagtaccacctgccctaccccgaggccatcttcgagatcagctacttcaagaagcaccccgagcccttcttcgccctggccaaggagctgtaccccggccagttcaagcccaccatctgccactacttcatgagactgctgaaggacaagggcctgctgctgagatgctacacccagaacatcgacaccctggagagaatcgccggcctggagcaggaggacctggtggaggcccacggcaccttctacaccagccactgcgtgagcgccagctgcagacacgagtaccccctgagctggatgaaggagaagatcttcagcgaggtgacccccaagtgcgaggactgccagagcctggtgaagcccgacatcgtgttcttcggcgagagcctgcccgccagattcttcagctgcatgcagagcgacttcctgaaggtggacctgctgctggtgatgggcaccagcctgcaggtgcagcccttcgccagcctgatcagcaaggcccccctgagcacccccagactgctgatcaacaaggagaaggccggccagagcgaccccttcctgggcatgatcatgggcctgggcggcggcatggacttcgacagcaagaaggcctacagagacgtggcctggctgggcgagtgcgaccagggctgcctggccctggccgagctgctgggctggaagaaggagctggaggacctggtgagaagagagcacgccagcatcgacgcccagggcggcggcggcccccagccccagcacttcagcttcccccaggaggtgcccgccacctgccagggcagaggccaggacaacagagagggcgagacccccgtgaccgccgccagccccagaagagacgccgagctgctgagagacagctag

SEQ ID NO: 173295 - DNA, 1170 bp, Artificial Sequence
  derived and/or modified sequence
atggccgagccagacccatcccaccccttggaaactcaggctgggaaggtgcaggaagcgcaggacagcgatagcgacagtgaagggggagcagccggtggcgaagctgacatggactttcttagaaacctgttctcacaaactctgtcattaggcagtcagaaggagcggttgctggacgaactcaccctcgaaggtgtcgcaaggtacatgcaaagcgaacggtgtaggcgagtcatctgcttggtgggcgctggaatctccacctctgctggcatcccagattttagaagcccatcgacaggcctatacgacaaccttgagaaatatcatctaccttatcccgaggctatcttcgaaatctcttacttcaaaaaacaccccgaaccattctttgctctcgccaaagagctataccccggccagttcaagccaacgatctgccactacttcatgcgccttctcaaggataagggtctgctgttaaggtgctacacccaaaacatagataccttagagcggattgcaggcctggagcaagaggacttagttgaagcccatggaactttttacacaagtcactgcgtatctgcctcctgcagacacgagtatccattgtcttggatgaaagaaaaaatcttctcggaagtcacaccaaaatgtgaagactgtcagagcctggttaagcccgacattgtgttcttcggggagtccctgcctgctcgctttttttcctgcatgcagtctgatttcctgaaggtggacttgttgttagtgatggggacttcccttcaggtgcagccgttcgcatctctgatctctaaggcccccttgtctacccccagactgctgataaacaaagagaaggcagggcagtccgaccccttcctgggcatgattatgggactggggggtgggatggactttgacagtaaaaaagcttaccgcgatgttgcttggcttggagagtgcgaccaggggtgtttggctctcgctgagctgctgggctggaagaaggagctggaggacttggtgcgaagagaacacgccagcattgatgctcaatccggggctggtgtcccaaaccccagtacttcagcatcccctaagaagtctcctccaccagcaaaggatgaggctagaaccaccgagcgagaaaaaccacagtag

SEQ ID NO: 173296 - DNA, 1170 bp, Artificial Sequence
  derived and/or modified sequence
atgtcagacgaggcagaggattccgacagcgactccgaagggggcgctgccggcggtgaagcagacatggatttccttcgaaacctcttcagtcagactctgtctctgggctcccagaaggaacgactgttggacgagctgacgctagagggtgtggctaggtatatgcaatccgagagatgccggagggtcatctgtctcgttggcgctgggatttccacgagcgctggcataccagactttagatccccatcaacaggtctgtatgacaatctcgaaaaataccaccttccctatccagaggctatattcgagataagttactttaagaagcaccccgaacccttcttcgccctcgcaaaagaattatatcctggtcagtttaagcctacaatctgccactacttcatgaggctgctgaaagacaagggcctgctgcttcgctgctacacgcaaaacatcgacaccttggagaggatcgccgggttagagcaagaagacctagtggaggcccacggcaccttctacactagccattgtgtgagcgcatcttgccggcacgaatatccgctctcatggatgaaggaaaaaattttttccgaagtcacgcccaaatgcgaggactgccaatccttagtgaaaccggacatagtgttctttggcgaaagtctgccagcccggttcttcagctgcatgcagagcgacttcctaaaggttgacctactccttgtgatggggacgagtctgcaagtgcagccatttgctagcttaatctctaaggcccctctgtccacacctaggttactcattaataaggagaaagctggacaaagtgatccgttcctgggcatgattatgggcctggggggggggatggatttcgattcaaagaaagcatacagagatgttgcttggctgggtgagtgcgatcaaggttgtttagcactcgctgagctgctgggctggaaaaaggagctcgaggacctggtacgcagggaacatgcatcaattgatgcccaaggaggaggcggacctcagcctcagcatttctcgttccctcaggaggtgcctgccacatgccagggcaggggccaggataacagagagggtgagacccccgtcacagcagcgtcccctcgcagggatgcagagctcttgagggactcttag

SEQ ID NO: 173297 - DNA, 1170 bp, Artificial Sequence
  derived and/or modified sequence
atggccgagccagaccccagccaccccctggagacccaggccggcaaggtgcaggaggcccaggacagcgacagcgacagcgagggcggggccgccggcggggaggccgacatggacttcctgaggaacctcttcagccagaccctgagcctgggcagccagaaggagcggctgctggatgagctgaccctggagggcgtggcccgctacatgcagagcgagcgctgcagaagagtcatctgcctggtgggcgccggcatcagcaccagcgctggcatcccagacttccgcagccccagcacaggcctgtatgacaacctggagaagtaccacctgccctacccagaggccatctttgagatctcctacttcaagaagcaccctgagcccttctttgccctggccaaggagctgtacccaggccagttcaagcccaccatctgccactacttcatgaggctgctgaaggacaagggcctgctgctgcgctgctacacccagaacatcgacaccctggagagaattgctggcctggagcaggaggacctggtggaggcccacggcaccttctacaccagccactgtgtgtctgccagctgcagacatgagtaccccctgtcctggatgaaggagaagatcttcagcgaggtgacccccaagtgtgaggactgccagagcctggtgaagccagacatcgtgttctttggagagagcctgcctgcccgcttcttcagctgcatgcagagcgacttcctgaaggtggacctgctgctggtgatgggcaccagcctgcaggtgcagccctttgccagcctcatcagcaaggcccccctgagcaccccccggctgctgatcaacaaggagaaggccggccagagcgaccccttcctgggcatgatcatgggcctgggcggcggcatggactttgacagcaagaaggcctacagagatgtggcctggctgggagaatgtgaccagggctgcctggccctggccgagctgctgggctggaagaaggagctggaggacctggtgcggcgggagcacgccagcattgatgcccagagcggggccggcgtgcccaaccccagcaccagcgccagccccaagaagagccccccaccagccaaggatgaggcccggaccacagagcgggagaagccccagtag

SEQ ID NO: 173298 - DNA, 1170 bp, Artificial Sequence
  derived and/or modified sequence
atgtctgatgaagctgaggacagcgacagcgacagcgagggcggcgctgctggaggagaggccgacatggacttcctgaggaacctcttcagccagaccctgagcctgggcagccagaaggagcggctgctggatgagctgaccctggagggcgtggcccgctacatgcagagcgagcgctgccggcgggtcatctgcctggtgggcgccggcatcagcaccagcgctggcatcccagacttccgcagccccagcacaggcctgtatgacaacctggagaagtaccacctgccctacccagaggccatctttgagatctcctacttcaagaagcaccctgagcccttctttgccctggccaaggagctgtacccaggccagttcaagcccaccatctgccactacttcatgaggctgctgaaggacaagggcctgctgctgcgctgctacacccagaacatcgacaccctggagagaattgctggcctggagcaggaggacctggtggaggcccacggcaccttctacaccagccactgtgtgtctgccagctgcagacatgagtaccccctgtcctggatgaaggagaagatcttcagcgaggtgacccccaagtgtgaggactgccagagcctggtgaagccagacatcgtgttcttcggggagagcctgcctgcccgcttcttcagctgcatgcagagcgacttcctgaaggtggacctgctgctggtgatgggcaccagcctgcaggtgcagccctttgccagcctcatcagcaaggcccccctgagcaccccccggctgctgatcaacaaggagaaggccggccagagcgaccccttcctgggcatgatcatgggcctgggcggcggcatggactttgacagcaagaaggcctacagagatgtggcctggctgggggagtgtgaccagggctgcctggccctggccgagctgctgggctggaagaaggagctggaggacctggtgagaagagagcacgccagcattgatgcccagggcggcggcggcccccagccccagcacttctccttcccccaggaggtgcctgccacctgccagggccggggccaggacaaccgggagggggagacccctgtgacagctgccagccccaggagagatgctgagctgctgcgggacagctag

SEQ ID NO: 173299 - DNA, 1170 bp, Artificial Sequence
  derived and/or modified sequence
atggccgagcccgaccccagccaccccctggagacccaggccggcaaagtgcaggaggcacaggatagcgacagtgattctgaagggggcgccgcgggcggcgaagccgacatggattttctgcgcaacctcttcagtcaaacgctctctttggggagccaaaaagaacgcctgttagacgaattaaccctcgagggagtggcccgatacatgcagagtgagcgttgtcgacgagtgatatgcttggtgggagccggaataagcacatccgctggcatccctgactttcgatctccctctaccggcctgtatgataatttagagaaataccatctgccctaccctgaagctatttttgaaatttcctactttaagaaacaccccgagccatttttcgccctcgcgaaggaactgtatccagggcagttcaagccaacgatctgtcattattttatgaggctcttgaaagacaagggcctgttattgcgctgttatactcagaacatcgacaccctggaacggatcgccgggctagaacaagaggacctggttgaggctcacgggactttctatacctcccactgcgtgtcagccagttgtcgtcatgagtatcctctcagctggatgaaggagaaaatattcagtgaagtaacacccaaatgcgaagattgccagtccctggtaaaacccgatatcgtttttttcggcgaatcgctgccggcccgtttcttttcctgcatgcagagcgattttctgaaagtagacttattgttagtgatggggactagcctgcaagtacagccattcgcatcactgatctccaaagcccctctgtctactccgcgcttgttgattaacaaagagaaggcaggccagtcagaccctttccttggcatgataatgggactgggcgggggaatggatttcgattccaagaaggcctaccgcgatgtagcgtggcttggcgagtgcgaccagggatgccttgctctggccgaacttttgggctggaagaaagagcttgaggacttggtgcgtcgggagcatgccagtatagacgcacaaagtggggccggggtgccaaatccttctacgtcagcaagccctaaaaagtcaccacctcctgctaaggatgaggcaagaactacagaaagagagaaaccccagtag

SEQ ID NO: 173300 - DNA, 1170 bp, Artificial Sequence
  derived and/or modified sequence
atgagcgacgaggccgaggacagcgacagcgacagcgagggcggcgccgcaggtggggaggccgacatggattttctgagaaacctgttcagtcaaacgctgagtctcggttcccaaaaggaaaggctcctcgacgaactgaccttggaaggcgtggcccgctacatgcaatcggaaaggtgtaggagagtcatctgcctggtgggggctgggatctcaacctcagccggtattcctgatttcaggagccctagtaccggcctttacgataacctggagaaatatcaccttccatatccagaagcaatcttcgagattagttatttcaagaagcatccagagcctttttttgccttagcaaaggagctgtatccaggacagttcaagcccactatctgccactatttcatgcgcctgttaaaggacaagggactgcttcttcgctgctacacgcaaaatatagataccttggaacgtatcgccgggctggaacaggaggaccttgttgaggcccacggaactttttatactagtcattgtgtttccgcttcctgtcggcatgagtatcccctctcatggatgaaggagaagattttcagcgaagtgacgccaaagtgcgaggactgtcagagccttgtcaagcccgatatcgtatttttcggagaaagcctgccagccaggttcttctcatgcatgcagagcgacttcttgaaggtcgacctgttgttagtcatgggcacttctcttcaggtgcagccctttgcatccctgatctccaaggctcctctcagcacgcctcggctgctgataaacaaggagaaggcgggtcagtctgaccccttcttggggatgattatgggattggggggagggatggacttcgattccaaaaaagcctacagagacgtggcgtggcttggagagtgtgatcagggatgtctggctctggccgaactgctcggatggaaaaaagagctcgaagaccttgtacgaagggagcacgcatcaattgatgcacagggcggcggagggcctcagccacagcacttcagcttcccacaagaggtaccagctacgtgccaagggcgtggccaggacaacagagaaggggaaactcctgtgaccgctgctagccctcgaagggacgccgagctcctaagggattcctag

SEQ ID NO: 173301 - DNA, 1170 bp, Artificial Sequence
  derived and/or modified sequence
atggctgagccagacccgagccaccctctggagacccaagctggaaaagtccaggaggctcaggacagcgacagcgacagtgagggtggagccgcaggaggggaggctgacatggattttttgcggaatctgttcagccaaactctgagcctggggtcacagaaagaacgccttctcgacgaactaacactggagggagtggcacgctacatgcaatccgagcggtgtcgccgagtgatttgcttggtgggtgccggaatctccacaagcgctggcatccctgatttccgctctccctcgacaggcctgtatgacaacttggagaaatatcatctgccgtacccagaggcaatctttgaaatatcttacttcaagaagcatcccgagcctttctttgcactggccaaggagctgtacccgggtcagttcaagcccaccatttgccattactttatgagacttctgaaggacaaagggctgctgctgcggtgttacacccagaacatagatacgcttgagcgaatagcgggactagaacaggaggacctggtcgaagctcacgggactttttacaccagtcactgtgttagcgcctcctgtaggcacgagtatcctctgagctggatgaaggagaaaatattcagcgaggtcaccccgaaatgtgaggattgtcagagccttgtgaagccagacatcgtgttttttggcgagtccctgcccgcaaggtttttttcttgcatgcagtccgattttttgaaggtcgacctcttactggtgatgggcaccagtttgcaggtacagccttttgctagtctcatcagcaaagcacctctgagcacaccaaggctgctgatcaataaagagaaggctggccagtctgatccatttctaggaatgatcatggggctcggaggtggtatggattttgactctaaaaaagcttaccgggacgtggcgtggcttggtgagtgcgaccagggctgtctggcactggctgagctgctgggctggaagaaggaactggaggatctggtaaggcgcgagcatgcttctattgacgcacagtctggtgcaggtgtgcccaatcctagtacaagcgcatccccaaagaaaagtccaccgcctgccaaagatgaagcacggaccactgagcgcgagaaacctcagtag

SEQ ID NO: 173302 - DNA, 1170 bp, Artificial Sequence
  derived and/or modified sequence
atgtccgacgaggcagaagacagcgattccgacagcgaaggaggagccgctggcggtgaggccgatatggacttcctgcgaaaccttttctcccagaccctgtcgctgggctctcagaaggagagactcctcgatgaacttacattggagggcgttgccagatacatgcagagtgaacgctgtcgtcgggtgatctgcctggtaggagctggtatctcaacttctgccggtattcctgatttcaggagcccttccacgggcctgtacgacaacttggaaaagtatcaccttccatatcctgaagctattttcgaaatatcttatttcaagaagcaccccgaaccgtttttcgcactagcaaaagagttgtaccccggacagttcaagccaaccatttgtcactacttcatgcgcctcctaaaggataagggtctattattacggtgttatacccagaacatcgacactctagaacgcatcgcaggccttgaacaggaagatctagttgaggcacatggaactttttacacaagccattgtgtcagcgcgagttgccgacacgaatatcccttaagttggatgaaagaaaagatcttcagcgaggtcacccctaaatgcgaagactgtcaatccttagttaagcccgacatcgtgttttttggcgagagcttacccgcaaggttctttagttgcatgcagagcgatttcctgaaggttgacctgcttctggtaatgggtacctctctccaagtgcagccgttcgctagtcttatttcaaaggcccctctatcaactcctcggctgctcatcaacaaggaaaaggcgggtcagagtgacccttttttgggcatgataatgggcctcggaggaggtatggattttgactcgaagaaggcctacagggacgttgcctggctgggggaatgcgatcagggatgcctggcgttagcagagctgctgggctggaaaaaagaacttgaggatttagttcgacgtgagcacgcgagtatcgacgcccaggggggtggaggcccacagcctcagcacttctcattccctcaagaggtgccagctacctgccaaggccgagggcaagacaacagggaaggagagacacccgtgacggccgctagccctagaagagatgctgagctgcttagggactcttag

SEQ ID NO: 173303 - DNA, 2070 bp, Artificial Sequence
  derived and/or modified sequence
cattttccgggcgccctttaccaacatggctgctgacgccacgccttctgggactcgtagtccggtcctcgcgcgctttcttacctaactggggcgctctgggtgttgtacgaaagcgcgtctgcggccgcaatgtctgctgagagttgtagttctgtgccctatcacggccactcccatttctggtgccgtcacgggacagagcagtcggtgacaggacagagcagtcggtgacgggacacagtggttggtgacgggacagagcggtcggtgacagcctcaagggcttcagcaccgcgcccatggcagagccagacccctctcaccctctggagacccaggcagggaaggtgcaggaggctcaggactcagattcagactctgagggaggagccgctggtggagaagcagacatggacttcctgcggaacttattctcccagacgctcagcctgggcagccagaaggagcgtctgctggacgagctgaccttggaaggggtggcccggtacatgcagagcgaacgctgtcgcagagtcatctgtttggtgggagctggaatctccacatccgcaggcatccccgactttcgctctccatccaccggcctctatgacaacctagagaagtaccatcttccctacccagaggccatctttgagatcagctatttcaagaaacatccggaacccttcttcgccctcgccaaggaactctatcctgggcagttcaagccaaccatctgtcactacttcatgcgcctgctgaaggacaaggggctactcctgcgctgctacacgcagaacatagataccctggagcgaatagccgggctggaacaggaggacttggtggaggcgcacggcaccttctacacatcacactgcgtcagcgccagctgccggcacgaatacccgctaagctggatgaaagagaagatcttctctgaggtgacgcccaagtgtgaagactgtcagagcctggtgaagcctgatatcgtcttttttggtgagagcctcccagcgcgtttcttctcctgtatgcagtcagacttcctgaaggtggacctcctcctggtcatgggtacctccttgcaggtgcagccctttgcctccctcatcagcaaggcacccctctccacccctcgcctgctcatcaacaaggagaaagctggccagtcggaccctttcctggggatgattatgggcctcggaggaggcatggactttgactccaagaaggcctacagggacgtggcctggctgggtgaatgcgaccagggctgcctggcccttgctgagctccttggatggaagaaggagctggaggaccttgtccggagggagcacgccagcatagatgcccagtcgggggcgggggtccccaaccccagcacttcagcttcccccaagaagtccccgccacctgccaaggacgaggccaggacaacagagagggagaaaccccagtgacagctgcatctcccaggcgggatgccgagctcctcagggacagctgagccccaaccgggcctggccccctcttaaccagcagttcttgtctggggagctcagaacatcccccaatctcttacagctccctccccaaaactggggtcccagcaaccctggcccccaaccccagcaaatctctaacacctcctagaggccaaggcttaaacaggcatctctaccagccccactgtctctaaccactcctgggctaaggagtaacctccctcatctctaactgcccccacggggccagggctaccccagaacttttaactcttccaggacagggagcttcgggcccccactctgtctcctgcccccgggggcctgtggctaagtaaaccatacctaacctaccccagtgtgggtgtgggcctctgaatataacccacacccagcgtagggggagtctgagccgggagggctcccgagtctctgccttcagctcccaaagtgggtggtgggcccccttcacgtgggacccacttcccatgctggatgggcagaagacattgcttattggagacaaattaaaaacaaaaacaactaacaatcc

SEQ ID NO: 173304 - DNA, 1170 bp, Artificial Sequence
  derived and/or modified sequence
atgagtgacgaggcagaggactcagattcagactctgagggaggagccgctggtggagaagcagacatggacttcctgcggaacttattctcccagacgctcagcctgggcagccagaaggagcgtctgctggacgagctgaccttggaaggggtggcccggtacatgcagagcgaacgctgtcgcagagtcatctgtttggtgggagctggaatctccacatccgcaggcatccccgactttcgctctccatccaccggcctctatgacaacctagagaagtaccatcttccctacccagaggccatctttgagatcagctatttcaagaaacatccggaacccttcttcgccctcgccaaggaactctatcctgggcagttcaagccaaccatctgtcactacttcatgcgcctgctgaaggacaaggggctactcctgcgctgctacacgcagaacatagataccctggagcgaatagccgggctggaacaggaggacttggtggaggcgcacggcaccttctacacatcacactgcgtcagcgccagctgccggcacgaatacccgctaagctggatgaaagagaagatcttctctgaggtgacgcccaagtgtgaagactgtcagagcctggtgaagcctgatatcgtcttttttggtgagagcctcccagcgcgtttcttctcctgtatgcagtcagacttcctgaaggtggacctcctcctggtcatgggtacctccttgcaggtgcagccctttgcctccctcatcagcaaggcacccctctccacccctcgcctgctcatcaacaaggagaaagctggccagtcggaccctttcctggggatgattatgggcctcggaggaggcatggactttgactccaagaaggcctacagggacgtggcctggctgggtgaatgcgaccagggctgcctggcccttgctgagctccttggatggaagaaggagctggaggaccttgtccggagggagcacgccagcatagatgcccaggggggcgggggtccccaaccccagcacttcagcttcccccaagaagtccccgccacctgccaaggacgaggccaggacaacagagagggagaaaccccagtgacagctgcatctcccaggcgggatgccgagctcctcagggacagctga

SEQ ID NO: 173305 - protein, 747 aa, Artificial Sequence
  derived and/or modified sequence
MADEAALALQPGGSPSAAGADREAASSPAGEPLRKRPRRDGPGLERSPGEPGGAAPEREVPAAARGCPGAAAAALWREAEAEAAAAGGEQEAQATAAAGEGDNGPGLQGPSREPPLADNLYDEDDDDEGEEEEEAAAAAIGYRDNLLFGDEIITNGFHSCESDEEDRASHASSSDWTPRPRIGPYTFVQQHLMIGTDPRTILKDLLPETIPPPELDDMTLWQIVINILSEPPKRKKRKDINTIEDAVKLLQECKKIIVLTGAGVSVSCGIPDFRSRDGIYARLAVDFPDLPDPQAMFDIEYFRKDPRPFFKFAKEIYPGQFQPSLCHKFIALSDKEGKLLRNYTQNIDTLEQVAGIQRIIQCHGSFATASCLICKYKVDCEAVRGDIFNQVVPRCPRCPADEPLAIMKPEIVFFGENLPEQFHRAMKYDKDEVDLLIVIGSSLKVRPVALIPSSIPHEVPQILINREPLPHLHFDVELLGDCDVIINELCHRLGGEYAKLCCNPVKLSEITEKPPRTQKELAYLSELPPTPLHVSEDSSSPERTSPPDSSVIVTLLDQAAKSNDDLDVSESKGCMEEKPQEVQTSRNVESIAEQMENPDLKNVGSSTGEKNERTSVAGTVRKCWPNRVAKEQISRRLDGNQYLFLPPNRYIFHGAEVYSDSEDDVLSSSSCGSNSDSGTCQSPSLEEPMEDESEIEEFYNGLEDEPDVPERAGGAGFGTDGDDQEAINEAISVKQEVTDMNYPSNKS

SEQ ID NO: 173306 - protein, 452 aa, Artificial Sequence
  derived and/or modified sequence
MFDIEYFRKDPRPFFKFAKEIYPGQFQPSLCHKFIALSDKEGKLLRNYTQNIDTLEQVAGIQRIIQCHGSFATASCLICKYKVDCEAVRGDIFNQVVPRCPRCPADEPLAIMKPEIVFFGENLPEQFHRAMKYDKDEVDLLIVIGSSLKVRPVALIPSSIPHEVPQILINREPLPHLHFDVELLGDCDVIINELCHRLGGEYAKLCCNPVKLSEITEKPPRTQKELAYLSELPPTPLHVSEDSSSPERTSPPDSSVIVTLLDQAAKSNDDLDVSESKGCMEEKPQEVQTSRNVESIAEQMENPDLKNVGSSTGEKNERTSVAGTVRKCWPNRVAKEQISRRLDGNQYLFLPPNRYIFHGAEVYSDSEDDVLSSSSCGSNSDSGTCQSPSLEEPMEDESEIEEFYNGLEDEPDVPERAGGAGFGTDGDDQEAINEAISVKQEVTDMNYPSNKS

SEQ ID NO: 173307 - DNA, 2241 bp, Artificial Sequence
  derived and/or modified sequence
atggccgacgaggccgccctggccctgcagcccggcggcagccccagcgccgccggcgccgaccgcgaggccgccagcagccccgccggcgagcccctgcgcaagcgcccccgccgcgacggccccggcctggagcgcagccccggcgagcccggcggcgccgcccccgagcgcgaggtgcccgccgccgcccgcggctgccccggcgccgccgccgccgccctgtggcgcgaggccgaggccgaggccgccgccgccggcggcgagcaggaggcccaggccaccgccgccgccggcgagggcgacaacggccccggcctgcagggccccagccgcgagccccccctggccgacaacctgtacgacgaggacgacgacgacgagggcgaggaggaggaggaggccgccgccgccgccatcggctaccgcgacaacctgctgttcggcgacgagatcatcaccaacggcttccacagctgcgagagcgacgaggaggaccgcgccagccacgccagcagcagcgactggaccccccgcccccgcatcggcccctacaccttcgtgcagcagcacctgatgatcggcaccgacccccgcaccatcctgaaggacctgctgcccgagaccatccccccccccgagctggacgacatgaccctgtggcagatcgtgatcaacatcctgagcgagccccccaagcgcaagaagcgcaaggacatcaacaccatcgaggacgccgtgaagctgctgcaggagtgcaagaagatcatcgtgctgaccggcgccggcgtgagcgtgagctgcggcatccccgacttccgcagccgcgacggcatctacgcccgcctggccgtggacttccccgacctgcccgacccccaggccatgttcgacatcgagtacttccgcaaggacccccgccccttcttcaagttcgccaaggagatctaccccggccagttccagcccagcctgtgccacaagttcatcgccctgagcgacaaggagggcaagctgctgcgcaactacacccagaacatcgacaccctggagcaggtggccggcatccagcgcatcatccagtgccacggcagcttcgccaccgccagctgcctgatctgcaagtacaaggtggactgcgaggccgtgcgcggcgacatcttcaaccaggtggtgccccgctgcccccgctgccccgccgacgagcccctggccatcatgaagcccgagatcgtgttcttcggcgagaacctgcccgagcagttccaccgcgccatgaagtacgacaaggacgaggtggacctgctgatcgtgatcggcagcagcctgaaggtgcgccccgtggccctgatccccagcagcatcccccacgaggtgccccagatcctgatcaaccgcgagcccctgccccacctgcacttcgacgtggagctgctgggcgactgcgacgtgatcatcaacgagctgtgccaccgcctgggcggcgagtacgccaagctgtgctgcaaccccgtgaagctgagcgagatcaccgagaagcccccccgcacccagaaggagctggcctacctgagcgagctgccccccacccccctgcacgtgagcgaggacagcagcagccccgagcgcaccagcccccccgacagcagcgtgatcgtgaccctgctggaccaggccgccaagagcaacgacgacctggacgtgagcgagagcaagggctgcatggaggagaagccccaggaggtgcagaccagccgcaacgtggagagcatcgccgagcagatggagaaccccgacctgaagaacgtgggcagcagcaccggcgagaagaacgagcgcaccagcgtggccggcaccgtgcgcaagtgctggcccaaccgcgtggccaaggagcagatcagccgccgcctggacggcaaccagtacctgttcctgccccccaaccgctacatcttccacggcgccgaggtgtacagcgacagcgaggacgacgtgctgagcagcagcagctgcggcagcaacagcgacagcggcacctgccagagccccagcctggaggagcccatggaggacgagagcgagatcgaggagttctacaacggcctggaggacgagcccgacgtgcccgagcgcgccggcggcgccggcttcggcaccgacggcgacgaccaggaggccatcaacgaggccatcagcgtgaagcaggaggtgaccgacatgaactaccccagcaacaagagc

SEQ ID NO: 173308 - DNA, 4094 bp, Artificial Sequence
  derived and/or modified sequence
gtcgagcgggagcagaggaggcgagggaggagggccagagaggcagttggaagatggcggacgaggcggccctcgcccttcagcccggcggctccccctcggcggcgggggccgacagggaggccgcgtcgtcccccgccggggagccgctccgcaagaggccgcggagagatggtcccggcctcgagcggagcccgggcgagcccggtggggcggccccagagcgtgaggtgccggcggcggccaggggctgcccgggtgcggcggcggcggcgctgtggcgggaggcggaggcagaggcggcggcggcaggcggggagcaagaggcccaggcgactgcggcggctggggaaggagacaatgggccgggcctgcagggcccatctcgggagccaccgctggccgacaacttgtacgacgaagacgacgacgacgagggcgaggaggaggaagaggcggcggcggcggcgattgggtaccgagataaccttctgttcggtgatgaaattatcactaatggttttcattcctgtgaaagtgatgaggaggatagagcctcacatgcaagctctagtgactggactccaaggccacggataggtccatatacttttgttcagcaacatcttatgattggcacagatcctcgaacaattcttaaagatttattgccggaaacaatacctccacctgagttggatgatatgacactgtggcagattgttattaatatcctttcagaaccaccaaaaaggaaaaaaagaaaagatattaatacaattgaagatgctgtgaaattactgcaagagtgcaaaaaaattatagttctaactggagctggggtgtctgtttcatgtggaatacctgacttcaggtcaagggatggtatttatgctcgccttgctgtagacttcccagatcttccagatcctcaagcgatgtttgatattgaatatttcagaaaagatccaagaccattcttcaagtttgcaaaggaaatatatcctggacaattccagccatctctctgtcacaaattcatagccttgtcagataaggaaggaaaactacttcgcaactatacccagaacatagacacgctggaacaggttgcgggaatccaaaggataattcagtgtcatggttcctttgcaacagcatcttgcctgatttgtaaatacaaagttgactgtgaagctgtacgaggagatatttttaatcaggtagttcctcgatgtcctaggtgcccagctgatgaaccgcttgctatcatgaaaccagagattgtgttttttggtgaaaatttaccagaacagtttcatagagccatgaagtatgacaaagatgaagttgacctcctcattgttattgggtcttccctcaaagtaagaccagtagcactaattccaagttccataccccatgaagtgcctcagatattaattaatagagaacctttgcctcatctgcattttgatgtagagcttcttggagactgtgatgtcataattaatgaattgtgtcataggttaggtggtgaatatgccaaactttgctgtaaccctgtaaagctttcagaaattactgaaaaacctccacgaacacaaaaagaattggcttatttgtcagagttgccacccacacctcttcatgtttcagaagactcaagttcaccagaaagaacttcaccaccagattcttcagtgattgtcacacttttagaccaagcagctaagagtaatgatgatttagatgtgtctgaatcaaaaggttgtatggaagaaaaaccacaggaagtacaaacttctaggaatgttgaaagtattgctgaacagatggaaaatccggatttgaagaatgttggttctagtactggggagaaaaatgaaagaacttcagtggctggaacagtgagaaaatgctggcctaatagagtggcaaaggagcagattagtaggcggcttgatggtaatcagtatctgtttttgccaccaaatcgttacattttccatggcgctgaggtatattcagactctgaagatgacgtcttatcctctagttcttgtggcagtaacagtgatagtgggacatgccagagtccaagtttagaagaacccatggaggatgaaagtgaaattgaagaattctacaatggcttagaagatgagcctgatgttccagagagagctggaggagctggatttgggactgatggagatgatcaagaggcaattaatgaagctatatctgtgaaacaggaagtaacagacatgaactatccatcaaacaaatcatagtgtaataattgtgcaggtacaggaattgttccaccagcattaggaactttagcatgtcaaaatgaatgtttacttgtgaactcgatagagcaaggaaaccagaaaggtgtaatatttataggttggtaaaatagattgtttttcatggataatttttaacttcattatttctgtacttgtacaaactcaacactaacttttttttttttaaaaaaaaaaaggtactaagtatcttcaatcagctgttggtcaagactaactttcttttaaaggttcatttgtatgataaattcatatgtgtatatataattttttttgttttgtctagtgagtttcaacatttttaaagttttcaaaaagccatcggaatgttaaattaatgtaaagggaacagctaatctagaccaaagaatggtattttcacttttctttgtaacattgaatggtttgaagtactcaaaatctgttacgctaaacttttgattctttaacacaattatttttaaacactggcattttccaaaactgtggcagctaactttttaaaatctcaaatgacatgcagtgtgagtagaaggaagtcaacaatatgtggggagagcactcggttgtctttacttttaaaagtaatacttggtgctaagaatttcaggattattgtatttacgttcaaatgaagatggcttttgtacttcctgtggacatgtagcaatgtctatattggctcataaaactaacctgaaaaacaaataaatgctttggaaatgtttcagttgctttagaaacattagtgcctgcctggatccccttagttttgaaatatttgccattgttgtttaaatacctatcactgtggtagagcttgcattgatcttttccacaagtattaaactgccaaaatgtgaatatgcaaagcctttctgaatctataataatggtacttctactggggagagtgtaatattttggactgctgttttccattaatgaggagagcaacaggcccctgattatacagttccaaagtaataagatgttaattgtaattcagccagaaagtacatgtctcccattgggaggatttggtgttaaataccaaactgctagccctagtattatggagatgaacatgatgatgtaacttgtaatagcagaatagttaatgaatgaaactagttcttataatttatctttatttaaaagcttagcctgccttaaaactagagatcaactttctcagctgcaaaagcttctagtctttcaagaagttcatactttatgaaattgcacagtaagcatttatttttcagaccatttttgaacatcactcctaaattaataaagtattcctctgttgctttagtatttattacaataaaaagggtttgaaatatagctgttctttatgcataaaacacccagctaggaccattactgccagagaaaaaaatcgtattgaatggccatttccctacttataagatgtctcaatctgaatttatttggctacactaaagaatgcagtatatttagttttccatttgcatgatgtttgtgtgctatagatgatattttaaattgaaaagtttgttttaaattatttttacagtgaagactgttttcagctctttttatattgtacatagtcttttatgtaatttactggcatatgttttgtagactgtttaatgactggatatcttccttcaacttttgaaatacaaaaccagtgttttttacttgtacactgttttaaagtctattaaaattgtcatttgacttttttctgttaactta

SEQ ID NO: 173309 - DNA, 2244 bp, Artificial Sequence
  derived and/or modified sequence
atggccgacgaggccgccctggccctgcagcccggcggcagccccagcgccgccggcgccgacagagaggccgccagcagccccgccggcgagcccctgagaaagagacccagaagagacggccccggcctggagagaagccccggcgagcccggcggcgccgcccccgagagagaggtgcccgccgccgccagaggctgccccggcgccgccgccgccgccctgtggagagaggccgaggccgaggccgccgccgccggcggcgagcaggaggcccaggccaccgccgccgccggcgagggcgacaacggccccggcctgcagggccccagcagagagccccccctggccgacaacctgtacgacgaggacgacgacgacgagggcgaggaggaggaggaggccgccgccgccgccatcggctacagagacaacctgctgttcggcgacgagatcatcaccaacggcttccacagctgcgagagcgacgaggaggacagagccagccacgccagcagcagcgactggacccccagacccagaatcggcccctacaccttcgtgcagcagcacctgatgatcggcaccgaccccagaaccatcctgaaggacctgctgcccgagaccatccccccccccgagctggacgacatgaccctgtggcagatcgtgatcaacatcctgagcgagccccccaagagaaagaagagaaaggacatcaacaccatcgaggacgccgtgaagctgctgcaggagtgcaagaagatcatcgtgctgaccggcgccggcgtgagcgtgagctgcggcatccccgacttcagaagcagagacggcatctacgccagactggccgtggacttccccgacctgcccgacccccaggccatgttcgacatcgagtacttcagaaaggaccccagacccttcttcaagttcgccaaggagatctaccccggccagttccagcccagcctgtgccacaagttcatcgccctgagcgacaaggagggcaagctgctgagaaactacacccagaacatcgacaccctggagcaggtggccggcatccagagaatcatccagtgccacggcagcttcgccaccgccagctgcctgatctgcaagtacaaggtggactgcgaggccgtgagaggcgacatcttcaaccaggtggtgcccagatgccccagatgccccgccgacgagcccctggccatcatgaagcccgagatcgtgttcttcggcgagaacctgcccgagcagttccacagagccatgaagtacgacaaggacgaggtggacctgctgatcgtgatcggcagcagcctgaaggtgagacccgtggccctgatccccagcagcatcccccacgaggtgccccagatcctgatcaacagagagcccctgccccacctgcacttcgacgtggagctgctgggcgactgcgacgtgatcatcaacgagctgtgccacagactgggcggcgagtacgccaagctgtgctgcaaccccgtgaagctgagcgagatcaccgagaagccccccagaacccagaaggagctggcctacctgagcgagctgccccccacccccctgcacgtgagcgaggacagcagcagccccgagagaaccagcccccccgacagcagcgtgatcgtgaccctgctggaccaggccgccaagagcaacgacgacctggacgtgagcgagagcaagggctgcatggaggagaagccccaggaggtgcagaccagcagaaacgtggagagcatcgccgagcagatggagaaccccgacctgaagaacgtgggcagcagcaccggcgagaagaacgagagaaccagcgtggccggcaccgtgagaaagtgctggcccaacagagtggccaaggagcagatcagcagaagactggacggcaaccagtacctgttcctgccccccaacagatacatcttccacggcgccgaggtgtacagcgacagcgaggacgacgtgctgagcagcagcagctgcggcagcaacagcgacagcggcacctgccagagccccagcctggaggagcccatggaggacgagagcgagatcgaggagttctacaacggcctggaggacgagcccgacgtgcccgagagagccggcggcgccggcttcggcaccgacggcgacgaccaggaggccatcaacgaggccatcagcgtgaagcaggaggtgaccgacatgaactaccccagcaacaagagctag

SEQ ID NO: 173310 - DNA, 2244 bp, Artificial Sequence
  derived and/or modified sequence
atggcagatgaagcagctcttgccctgcagccgggcggttctccgtctgcggctggagctgacagggaggctgcttccagtccagccggagaacctctacgaaaacggccgagacgagatggacccggtcttgagcggtcaccgggcgagccaggtggcgctgccccggaacgcgaagtccctgcagccgcccgtgggtgtcctggagcagccgcagccgctctctggagagaagcagaggcagaagccgccgcggcaggcggtgagcaggaggcgcaggcaaccgcggcagcgggcgaaggggacaacggcccaggacttcaggggccttcccgagagccacctctagccgacaacttgtatgacgaggatgatgacgacgaaggagaagaggaagaggaggccgctgcagccgccattggttatagggataatctcctcttcggcgacgaaattataacaaatggattccactcctgtgaaagcgacgaggaagatcgagccagtcacgcatcatcctcagactggacaccccgaccccgtatcggaccttatactttcgtgcaacaacacctcatgataggaaccgatcctcgaacaattctgaaagatctgctgccagagactatcccccctcccgaactcgatgatatgaccctttggcagattgtgattaacattctttccgagccaccaaaacgaaaaaaacgcaaagacatcaacacaatcgaggacgctgttaagctgctgcaggagtgcaagaagatcatcgtgctcacaggcgcaggggtctccgtgtcatgtgggatacccgactttaggagccgcgacggaatctacgctagactggccgtcgactttcctgatctccctgaccctcaggccatgtttgatattgagtactttagaaaggatcccaggccattctttaagttcgcaaaagaaatttatcctggacagttccagcctagcctgtgccacaaattcattgccctgtcagataaggagggcaagttgctgaggaattatacccagaatatcgataccctggaacaggtggcaggcatccagcgaatcatccagtgtcacggcagtttcgccacagcaagttgtctaatttgcaaatataaggtcgactgtgaggctgtgagaggggacattttcaaccaggttgttcccaggtgccccagatgccccgccgatgagccactagcaatcatgaagccagaaatagttttcttcggcgaaaaccttcccgagcagtttcatagagccatgaaatatgataaggatgaggtagaccttcttattgtcatcggcagttctttgaaagtgaggcccgttgccctgattccctcatccatcccacacgaagtgccccagattctaattaatcgggaaccattaccccatctgcacttcgatgtggaattattgggggattgtgacgttattatcaatgagttgtgccatcgactgggaggagagtacgctaaactgtgttgcaatccggtcaagctttccgagataacagagaagcctcctaggactcagaaagagcttgcctatctcagcgagctgccaccgactcctctgcacgtctcagaagattcaagctctcctgaacgcactagcccacctgattcctccgtgatcgtgacgttactggaccaggctgcaaaaagcaatgatgatcttgacgtgagtgagagcaaagggtgtatggaagagaagcctcaggaggtgcagaccagccgcaatgtcgagagcattgcagaacagatggaaaatcccgatttgaagaacgtggggtcatctacgggggagaaaaacgaacgcacttcagtcgctggcacagtgcggaaatgctggcctaatagagtggcaaaagagcagatcagccgcaggcttgacggcaatcagtatctgtttctgcctcccaacaggtatatcttccacggggccgaggtgtacagtgatagcgaagatgacgttctgtcgtccagttcctgtggctcaaacagtgactccggaacttgccaatcgccatctttggaagagccaatggaggatgagtctgagattgaggaattttataatggtcttgaggacgagccagacgtgcccgagcgggctggcggcgccggatttggaacagatggtgatgatcaggaggctatcaacgaggctatctcagtgaaacaagaagtgaccgacatgaactacccaagcaacaagagctag

SEQ ID NO: 173311 - DNA, 2244 bp, Artificial Sequence
  derived and/or modified sequence
atggctgatgaagctgccctggccctgcagcccggcggcagccccagcgctgctggagctgaccgggaggccgccagcagccctgctggggagcccctgaggaagaggcccaggagagatggccctggcctggagaggagccctggagagcctggaggagctgcccctgagcgggaggtgcctgctgctgcccggggctgccctggagctgctgctgctgccctgtggagggaggccgaggccgaggccgctgctgctggaggagagcaggaggcccaggccacagctgctgctggggagggggacaatggacctggcctgcagggccccagccgggagccccccctggccgacaacctgtatgatgaagatgatgatgatgaaggagaggaggaggaggaggccgctgctgctgccatcggctacagagacaacctgctgtttggagatgagatcatcaccaacggcttccacagctgtgagagtgatgaagaagatcgggccagccacgccagcagcagtgactggaccccccggccccgcatcggcccctacacctttgtgcagcagcacctgatgattggaacagaccccaggaccatcctgaaggacctgctgcctgagaccatccccccacctgagctggatgacatgaccctgtggcagatcgtcatcaacatcctgtctgagccccccaagaggaagaagaggaaggacatcaacaccattgaagatgctgtgaagctgctgcaggagtgcaagaagatcatcgtgctgaccggggccggcgtgtctgtgtcctgtggcatcccagacttccgcagcagagatggcatctatgcccggctggccgtggacttcccagacctgcctgacccccaggccatgtttgatattgagtacttcaggaaggacccccggcccttcttcaagtttgccaaggagatctacccaggccagttccagcccagcctgtgccacaagttcatcgccctgagtgacaaggagggcaagctgctgaggaactacacccagaacatcgacaccctggagcaggtggccggcatccagaggatcatccagtgccacggcagctttgccacagccagctgcctgatctgcaagtacaaggtggactgtgaggccgtgcggggggacatcttcaaccaggtggtgccccgctgcccccgctgcccagcagatgagcccctggccatcatgaagccagaaattgtgttcttcggggagaacctgcctgagcagttccaccgggccatgaagtatgacaaggatgaggtggacctgctgattgtgattggcagcagcctgaaggtgcggcctgtggccctgatccccagcagcatcccccatgaggtgccccagatcctgatcaaccgggagcccctgccccacctgcactttgatgtggagctgctgggggactgtgatgtgatcatcaatgagctgtgccaccggctgggcggggagtatgccaagctgtgctgcaaccctgtgaagctgtctgagatcacagagaagccacccaggacccagaaggagctggcctacctgtctgagctgccccccacccccctgcacgtgtctgaggacagcagcagccctgagaggaccagccccccagacagcagcgtcatcgtgaccctgctggaccaggccgccaagagcaatgatgacctggatgtgtctgagagcaagggctgcatggaggagaagccccaggaggtgcagaccagcagaaatgtggagagcattgctgagcagatggagaacccagacctgaagaatgtgggcagcagcactggagagaagaatgaaagaacatctgtggccggcaccgtgaggaagtgctggcccaacagagtggccaaggagcagatcagccggcggctggatggcaaccagtacctgttcctgccccccaaccgctacatcttccatggagctgaggtgtacagcgacagtgaagatgatgtgctgagcagcagcagctgtggcagcaacagcgacagcggcacctgccagagccccagcctggaggagcccatggaggatgaaagtgaaattgaggagttctacaacggcctggaggatgagccagatgtgcctgagcgggccggcggggccggctttggaacagatggagatgaccaggaggccatcaatgaggccatctctgtgaagcaggaggtgacagacatgaactaccccagcaacaagagctag

SEQ ID NO: 173312 - DNA, 2244 bp, Artificial Sequence
  derived and/or modified sequence
atggccgacgaggccgccctggccctgcagcccggcggcagcccctctgccgccggagctgatcgcgaggctgcaagcagcccagctggggagcctctcaggaagcgcccccggcgagacggaccaggactggaaaggtccccaggggagcccggaggcgcggcgccagagcgggaggttcccgctgcagcacgaggatgtcctggcgcggcggctgccgcactatggagagaagccgaggccgaagccgccgcagccggcggagagcaggaggcccaggcgaccgcagccgccggcgaaggagacaacggaccgggcttacagggccccagcagggagccgccactggctgataacctgtatgatgaggacgacgatgacgagggcgaagaggaggaggaggcagcagccgccgccataggctaccgggataacctgctcttcggggacgagataattacaaacggctttcattcctgcgaatccgacgaagaggatcgggcatcacacgcttcatcatcagactggaccccccgaccgaggatcggtccatataccttcgtccagcagcacctcatgattggcactgacccaaggaccattttgaaggatctccttccagaaacgatccctcccccagagctcgacgatatgacgctttggcagatagtgataaacatattgtctgaacccccgaagagaaagaaaagaaaggatatcaataccattgaggatgcggtgaagcttcttcaggaatgcaagaaaatcatcgtcctcaccggggcaggagtatcagtttcatgtgggatccccgatttccggtctcgtgatggcatttacgccagactagccgttgacttccctgacctccccgacccccaagcgatgtttgatattgaatattttcgtaaagaccccaggcccttttttaagttcgcaaaagaaatctaccctggacagtttcaaccaagtctgtgtcacaaatttatcgccctgtccgataaagagggaaagttgctaagaaactacacgcaaaacatagatactctggaacaggtggccggcattcaacgcattatacagtgccatggtagtttcgctacagccagttgtctgatatgcaaatataaagtcgattgcgaggccgtccggggcgatatattcaaccaagtggtgcctcggtgtcctagatgccccgccgacgaacctcttgcaatcatgaagcccgagattgtgttcttcggggagaatctgccagagcagttccatcgggccatgaagtacgataaggatgaagtggatttgctgatagtaatcggaagttcactcaaggtgcgaccggtggctctcatcccgagctctattccgcatgaggttccacaaatcctgattaacagagagccgctgccacatctccactttgatgttgaacttcttggtgattgcgacgtgataatcaatgaactctgccacagactcgggggggaatacgccaaactgtgctgtaaccccgtgaagttgtcagagatcacagaaaaacccccacgcacacagaaagaactggcatacctgagtgagcttcctccaacacctctgcacgtaagtgaagattcatcttcccccgaaaggacgtcgccccctgactcttcagtgattgttacgctgctggatcaagctgcaaagagtaacgatgacttagacgtcagtgaatccaagggatgtatggaagagaagcctcaggaggttcagacatcacgcaatgtcgagagtatagctgagcagatggaaaacccggacttaaagaacgtcgggagctccaccggagagaagaatgagaggacctctgtcgctggaacggtccgtaagtgttggccaaaccgcgtggcaaaggaacagattagccggcggctggacggcaaccaatatctgttcctcccccccaacaggtacatctttcatggcgccgaggtgtatagtgattcagaagacgatgttctctccagctccagctgcggatcaaacagtgacagcggcacttgtcagagtccaagcctagaggagcccatggaggatgagtcagaaatcgaggagttttataacggccttgaagatgaacccgatgtacctgagagggcaggtggtgctggcttcgggaccgacggtgacgatcaagaggccatcaatgaggccattagtgtgaagcaggaggttaccgatatgaattatccatccaacaagtcttag

SEQ ID NO: 173313 - DNA, 2244 bp, Artificial Sequence
  derived and/or modified sequence
atggccgacgaagccgcattggctctccagcctggcggttctcccagcgcagccggagccgacagggaagcagctagcagccccgctggcgaacctctgcgaaagagaccaagaagggatggacccggactggaacggtcccccggtgagcccggaggcgctgcgcctgaaagggaagtgcccgctgccgctaggggctgtcctggtgccgctgccgcagctctctggcgtgaagctgaagccgaggccgctgctgctggaggggagcaggaagcgcaggcgacggccgcagctggagagggagataatgggcctggccttcaggggccatctcgagagccacccctcgcagataatctatacgatgaagacgacgacgatgagggagaagaagaggaggaagccgctgccgctgcaatcggataccgtgataatttactgttcggagatgagattatcaccaacggcttccacagctgcgagtcagatgaagaggaccgggcttcccacgccagctccagcgactggacccccagacctcgcatagggccatatacattcgtgcagcagcacttaatgattggcacagatccgcgaacgattctcaaagatctcctgcctgaaaccattccaccaccggaacttgacgatatgacactgtggcagattgtcattaatatcctgagcgagcctcctaaaagaaagaaaagaaaagacatcaacactatcgaggatgccgtcaagctcctgcaggaatgtaagaaaattattgttttaacaggcgctggcgtctccgtgtcctgtgggatccccgacttccgctcgagagacggtatctacgccaggctggctgttgattttccggatctgccagacccccaggcgatgtttgacattgagtactttaggaaagaccctcgccctttcttcaaatttgctaaagagatctacccaggacagtttcaaccaagcctctgtcacaagtttattgctttgtctgataaagaggggaagctgctcaggaactatactcaaaacatcgacacccttgaacaagtggccggaattcagagaatcattcagtgtcacggctctttcgctactgcatcatgtctaatatgtaaatataaagtcgactgtgaagccgtacgaggcgacattttcaatcaggttgttcctcggtgccctcggtgtcctgccgatgaacccctggcaattatgaagccagagatcgtcttctttggggaaaaccttcctgaacagttccatcgagcaatgaaatacgataaggacgaagtcgacctgcttatagtaatcggaagcagcttgaaggtgaggcccgtcgcgctcattcctagctctatccctcacgaagtgccacagatattaattaatagggaacccctcccacacttgcactttgacgtagaactactcggcgactgtgatgtaattatcaacgaattatgccataggctgggcggagagtacgcgaagttatgctgcaacccggtgaagctgagcgaaatcacggaaaaaccacctcggacacaaaaagaactagcctaccttagtgaattacccccaacccctctacatgtgtccgaagactctagcagtcccgagcggacgtctccgccagacagtagcgtgatagtcactctattggaccaagcggcaaaatctaacgacgacctggatgtgtcagagagcaagggctgcatggaagagaaaccacaggaggtccagacctcacgaaatgtcgagtccattgctgaacagatggaaaatcctgacttgaagaatgtgggtagctctacgggagaaaagaacgagagaacgtctgtagccggaaccgtgagaaaatgctggccaaaccgggtggctaaggagcagatctctaggcgcttggacggaaatcagtatctgttcttaccccctaatcgatatatttttcacggcgctgaggtgtacagcgactccgaggatgacgtattaagcagcagcagctgcggctccaacagtgactcaggcacttgccaaagcccttctctagaggaacccatggaggacgagagcgagatcgaagaattttataatggactggaggacgagcctgatgtgccagagagggccggaggagccggattcggtacagacggggatgatcaggaggcaattaacgaagctatttcggtgaagcaggaagtcaccgatatgaactatccgagtaataagtcttag

SEQ ID NO: 173314 - DNA, 2244 bp, Artificial Sequence
  derived and/or modified sequence
atggccgacgaggctgccctggctttgcagcctggggggagcccttcagccgcgggcgcagatcgggaggcggcctcgtcacctgctggtgaaccgctccgcaaaagaccaaggagagatggcccaggcttggaacgaagtccaggtgagccgggaggcgccgccccagagagagaagtgccagctgctgctcgcggatgccctggagccgccgcagctgcactgtggcgggaggccgaagccgaagccgcagccgccggaggggagcaggaggcccaggctacggcagctgcaggagagggcgacaatggcccagggctccaggggccctcgcgagagccacccctcgcggataatttatatgacgaggacgacgacgatgaaggagaggaagaggaggaggctgccgctgctgccatcggctaccgggacaatctgctattcggtgatgagatcattactaatgggttccacagttgcgagagcgacgaggaggatcgcgcatcacatgcttcttcgtccgattggacacctaggccacgaatcggcccctataccttcgtgcagcaacatctcatgataggaacagacccccgcaccattctaaaagatctacttcccgagaccataccacctccagaactggatgatatgacactgtggcaaatcgtgatcaatattctctctgagccccctaagaggaaaaagagaaaggatatcaacacaatagaagatgcagtgaaactcttacaggaatgcaagaagattattgtgcttactggggctggggtttccgtctcctgtggaattccagactttcgttcaagagacggcatttatgcacgcctggccgtggactttcctgatctgcccgatcctcaggccatgtttgatattgaatacttcagaaaggacccacggccatttttcaagtttgcaaaagagatatatcctggccagtttcaacctagcctgtgccataaatttatcgcactgtcagacaaggaaggtaaactcttacgcaactatacacagaacatcgataccctcgagcaggtggccggcattcaacgaataatccagtgccacggctccttcgcgacagcatcttgtctgatctgtaaatacaaagtcgattgtgaggctgtcaggggagatatcttcaatcaggttgtccctagatgtcctcgatgcccagcagacgagcctctggccattatgaagcccgaaatcgtcttctttggggagaatttgcctgagcagtttcatcgggccatgaaatacgataaagatgaagttgatctcctaattgtgatcggatcatccctgaaggttaggccagtggcccttattccctcctctatcccccacgaagtgccacagatcctgatcaacagggaacctctcccccacttacatttcgatgtggagttgctcggggattgcgacgttattataaacgaactgtgccaccggttaggcggcgagtatgccaagctgtgctgcaacccagtcaaactctctgaaataaccgagaagccacctcgaacacagaaagaacttgcctacctctccgaactccccccaactcctctccacgtctcggaagacagttcatcccccgagcgcacatccccacccgactcttccgtgatcgtgactcttcttgaccaggccgcaaaatcaaatgacgaccttgacgtgagcgaaagcaaagggtgcatggaggagaaaccacaagaagtccagactagtcgaaatgttgaatctattgcagagcagatggagaaccccgacctaaagaatgtgggcagctccactggagagaagaacgagagaacatctgtagccggtacagtcagaaaatgttggcccaatcgcgttgcaaaagagcagatttctcgccgactggatggcaatcagtatctgtttctcccgcccaatcggtacatattccatggagccgaggtgtacagcgatagtgaagatgacgtactgagttcaagcagctgtggaagcaactccgattctggtacatgccagtcaccatccctggaggagccaatggaagacgaaagtgaaatagaggagttttacaatggtctggaagacgagcctgacgtccctgaaagggccggcggggccggatttggtaccgatggcgacgaccaagaggcgatcaatgaagctatctctgtgaaacaggaggttacagacatgaactatccaagtaacaagagttag

SEQ ID NO: 173315 - DNA, 2244 bp, Artificial Sequence
  derived and/or modified sequence
atggctgatgaagcagctttggcgctacaacctggtggaagcccctccgctgctggcgctgatcgggaagcggcgtcaagccccgccggagagccgcttagaaagcgtcccaggcgcgatggacccggactggaaagaagcccaggagagcctggcggtgccgcaccggagcgagaagtccccgcagccgctaggggctgtcccggagccgctgctgccgcgctctggagggaggctgaggcagaggccgctgctgccgggggcgaacaagaagcacaggcaaccgcggcagccggggaaggcgataacgggccagggttgcaaggtccttcaagagaacccccactggccgacaacctgtatgatgaagatgatgatgatgaaggggaagaagaggaggaggcagccgctgcggctatcggatatcgcgacaaccttctgtttggagacgaaattattaccaatgggttccactcctgcgagtccgatgaagaagacagagcatcacatgcttcttcatccgattggaccccacgacctaggatcggtccctacacattcgtccagcaacacttaatgattggaaccgacccacggacaatccttaaggacctgctgcccgagaccatcccgccacctgagctagacgacatgacactttggcaaatcgtgataaatattctgtccgagccccccaagagaaagaagagaaaagatattaatacaattgaagacgccgtgaaactactgcaagaatgtaagaagatcatcgtactgacaggtgctggggtcagcgttagctgcggcatccctgatttccgcagtcgtgacggaatttatgctcgattggctgtggactttcctgatctccctgacccccaggccatgtttgacatcgagtactttagaaaggatccacgcccattttttaagtttgccaaggagatttatcccggtcagtttcagccaagcctttgtcataagtttattgccttgtcagataaagaaggaaagttactaaggaattacacccaaaatatcgacacactcgagcaagtagcaggaatccaacggataattcagtgtcatgggagctttgcaacagcctcttgcctcatttgtaaatataaggtcgactgcgaagcggtgcggggtgatattttcaaccaggtcgtcccaagatgtcccagatgcccagcagacgagcccctagcaataatgaagccagagatcgttttctttggtgaaaacttacccgagcagttccacagggccatgaagtacgacaaagacgaggtcgacttattaatcgtgattggatcctccctgaaagtccgacctgtcgcccttattccctcctctatccctcatgaagtaccccagatattgatcaaccgcgaaccattgccgcatctgcactttgacgtcgagctcctgggcgattgtgacgtcataattaatgaactgtgtcacagattaggtggtgaatatgccaaactgtgctgcaacccagtcaaactctctgaaataaccgagaagccacctcgaacacagaaagaacttgcctacctctccgaactccccccaactcctctccacgtctcggaagacagttcatcccccgagcgcacatccccacccgactcttccgtgatcgtgactcttcttgaccaggccgcaaaatcaaatgacgaccttgacgtgagcgaaagcaaagggtgcatggaggagaaaccacaagaagtccagactagtcgaaatgttgaatctattgcagagcagatggagaaccccgacctaaagaatgtcggaagctccacaggcgagaaaaacgaacgtaccagtgtcgcgggaaccgttaggaaatgttggccaaaccgggtggccaaagaacagatctccagaagactggacggcaaccagtatctctttttacctcctaatcggtacatctttcatggggcggaggtgtattctgattcagaagacgatgtattgtctagttcaagctgcgggagcaacagcgacagcggaacctgccaatccccttccctcgaggaaccaatggaggatgaatcagaaatagaagagttttataatggtctggaagacgagcccgacgtgcctgagagagctgggggagcaggattcggcaccgacggcgatgaccaagaagcgatcaacgaagctatctccgtgaaacaagaagtcactgacatgaactacccaagcaacaaatcatag

SEQ ID NO: 173316 - protein, 399 aa, Artificial Sequence
  derived and/or modified sequence
MAFWGWRAAAALRLWGRVVERVEAGGGVGPFQACGCRLVLGGRDDVSAGLRGSHGARGEPLDPARPLQRPPRPEVPRAFRRQPRAAAPSFFFSSIKGGRRSISFSVGASSVVGSGGSSDKGKLSLQDVAELIRARACQRVVVMVGAGISTPSGIPDFRSPGSGLYSNLQQYDLPYPEAIFELPFFFHNPKPFFTLAKELYPGNYKPNVTHYFLRLLHDKGLLLRLYTQNIDGLERVSGIPASKLVEAHGTFASATCTVCQRPFPGEDIRADVMADRVPRCPVCTGVVKPDIVFFGEPLPQRFLLHVVDFPMADLLLILGTSLEVEPFASLTEAVRSSVPRLLINRDLVGPLAWHPRSRDVAQLGDVVHGVESLVELLGWTEEMRDLVQRETGKLDGPDK

SEQ ID NO: 173317 - protein, 318 aa, Artificial Sequence
  derived and/or modified sequence
MAFWGWRAAAALRLWGRVVERVEAGGGVGPFQACGCRLVLGGRDDDVAELIRARACQRVVVMVGAGISTPSGIPDFRSPGSGLYSNLQQYDLPYPEAIFELPFFFHNPKPFFTLAKELYPGNYKPNVTHYFLRLLHDKGLLLRLYTQNIDGLERVSGIPASKLVEAHGTFASATCTVCQRPFPGEDIRADVMADRVPRCPVCTGVVKPDIVFFGEPLPQRFLLHVVDFPMADLLLILGTSLEVEPFASLTEAVRSSVPRLLINRDLVGPLAWHPRSRDVAQLGDVVHGVESLVELLGWTEEMRDLVQRETGKLDGPDK

SEQ ID NO: 173318 - protein, 257 aa, Artificial Sequence
  derived and/or modified sequence
MVGAGISTPSGIPDFRSPGSGLYSNLQQYDLPYPEAIFELPFFFHNPKPFFTLAKELYPGNYKPNVTHYFLRLLHDKGLLLRLYTQNIDGLERVSGIPASKLVEAHGTFASATCTVCQRPFPGEDIRADVMADRVPRCPVCTGVVKPDIVFFGEPLPQRFLLHVVDFPMADLLLILGTSLEVEPFASLTEAVRSSVPRLLINRDLVGPLAWHPRSRDVAQLGDVVHGVESLVELLGWTEEMRDLVQRETGKLDGPDK

SEQ ID NO: 173319 - DNA, 1200 bp, Artificial Sequence
  derived and/or modified sequence
atggccttctggggatggagggctgccgcagcccttagactgtgggggagagtggttgagcgggtcgaagcagggggaggggtgggaccttttcaggcctgcggatgtagactggtattgggcgggcgggatgacgtgagcgcaggactccgaggctcccacggcgcgcgcggcgagccattagatcctgcacgccctctgcagcgccctccccggcctgaagtgcccagggctttcaggcgtcagccacgggcggccgccccttccttctttttttcaagcattaagggcggaaggcggagcatctcattctcggtgggagcatcatcggtcgttggttcaggagggtcttccgataagggtaagctcagcctccaggatgtcgccgagctgatccgagcacgtgcctgccaacgagtggtagtaatggtgggcgctgggattagcacaccttcaggaatcccagactttcggtctccaggttcaggcctctactccaatctgcagcagtacgatcttccgtacccggaggcgatatttgaactacctttcttcttccacaatccaaagccctttttcacactggcgaaggaactctacccaggcaattacaagcccaatgtgacacattatttcctccgcctgctgcacgataagggcttgctgcttcggctgtatacccagaatattgacggactagagcgtgtgtccgggattccagctagtaaacttgtggaggctcacggcacctttgcatctgccacctgtactgtttgccagcggccattccctggtgaggatattagagctgatgtgatggcggatagggttcccaggtgccctgtttgtactggagttgtgaagcctgacatcgtgttcttcggagaaccgctgccacagaggttcctcctacacgtggtggactttccgatggccgacctactattaattctcgggacctcactggaagtggaaccattcgcctctttgacggaggccgtccgatcctcagtgccccgcctcctcatcaacagggatctggtcggccccttggcctggcacccacgcagccgcgatgtggcgcagttgggagatgtagtgcatggggtggagtctctagtagaactcctcggctggaccgaggaaatgcgagatttggtacagagagagacaggcaaactcgatgggccagacaagtag

SEQ ID NO: 173320 - DNA, 957 bp, Artificial Sequence
  derived and/or modified sequence
atggctttttggggatggagagccgcagctgcgctgaggctttggggccgagtcgtggaacgagtagaagctggggggggggtcggccctttccaagcatgcgggtgccgcctcgtcttgggtggccgagatgatgacgttgctgaactgatccgcgccagggcctgtcagcgggtcgtagtaatggtcggagccggtatctctacaccttccggcatacccgattttcgttctcccgggtccgggctgtacagcaacctgcaacaatatgatctgccctatcccgaggcaatcttcgaacttcccttcttctttcataaccccaaaccatttttcacgttggccaaggaactgtacccaggaaactacaaacccaacgtgacacattactttctccggctgctgcacgataaaggcctgctgctacgactgtatacccagaacattgacggcctggaacgagtgagtggcatcccggcttccaagctcgttgaggctcatggcacgttcgcctccgctacttgtacagtgtgccagaggccatttcccggggaagatattcgtgcggacgtaatggccgacagagtcccaagatgcccagtgtgcacaggagttgtaaagcccgacatcgtcttctttggggagccgcttccacaacgattcctgctgcacgtcgtagacttccccatggcagacttgcttttgatcctcggcacaagtctggaggtggaaccctttgcctctttaaccgaggcagtgcgcagtagtgtccccagattgcttatcaacagagacctggtcggccctctagcatggcaccccaggagccgcgacgtcgcccaacttggcgacgttgtccatggcgtcgagtcattggtggagctgcttggatggacagaagagatgcgggacttggtacagagagaaaccggaaagttggatggccctgataagtag

SEQ ID NO: 173321 - DNA, 1200 bp, Artificial Sequence
  derived and/or modified sequence
atggccttctggggctggagggctgctgctgccctgcggctgtggggccgggtggtggagcgggtggaggccggcggcggcgtgggccccttccaggcctgtggctgccgcctggtgctgggcggcagagatgatgtgtctgctggcctgcggggcagccacggggcccggggggagcccctggaccctgcccggcccctgcagaggcctcccaggcctgaggtgccccgggccttccggcggcagcccagggctgctgcccccagcttcttcttcagcagcatcaagggcggcagaagaagcatctccttctctgtgggcgccagctctgtggtgggcagcggcggcagcagtgacaagggcaagctgagcctgcaggatgtggccgagctgatccgggcccgggcctgccagagggtggtggtgatggtgggcgccggcatcagcacccccagcggcatcccagacttccgcagccctggcagcggcctgtacagcaacctgcagcagtatgacctgccctacccagaggccatctttgagctgcccttcttcttccacaaccccaagcccttcttcaccctggccaaggagctgtacccaggcaactacaagcccaacgtgacccactacttcctgcggctgctgcatgacaagggcctgctgctgcggctgtacacccagaacattgatggcctggagcgggtgtctggcatcccagccagcaagctggtggaggcccacggcacctttgccagcgccacctgcaccgtgtgccagaggcccttccctggagaggacatccgggcagatgtgatggctgacagagtgccccgctgccctgtgtgcaccggggtggtgaagccagacatcgtgttcttcggggagcccctgccccagcgcttcctgctgcacgtggtggacttccccatggctgacctgctgctgatcctgggcaccagcctggaggtggagccctttgccagcctgacagaagctgtgcgcagctctgtgccccggctgctgatcaacagagacctggtgggccccctggcctggcaccccaggagcagagatgtggcccagctgggagatgtggtgcacggcgtggagagcctggtggagctgctgggctggacagaggagatgagggacctggtgcagcgggagaccgggaagctggatggccctgacaagtag

SEQ ID NO: 173322 - DNA, 957 bp, Artificial Sequence
  derived and/or modified sequence
atggccttctggggctggagggctgctgctgccctgcggctgtggggccgggtggtggagcgggtggaggccggcggcggcgtgggccccttccaggcctgtggctgccgcctggtgctgggcggcagagatgatgatgtggccgagctgatccgggcccgggcctgccagagggtggtggtgatggtgggcgccggcatcagcaccccatctggcatcccagacttccgcagccctggcagcggcctgtacagcaacctgcagcagtatgacctgccctacccagaggccatctttgagctgcccttcttcttccacaaccccaagcccttcttcaccctggccaaggagctgtacccaggcaactacaagcccaacgtgacccactacttcctgcggctgctgcatgacaagggcctgctgctgcggctgtacacccagaacattgatggcctggagcgggtgtctggcatcccagccagcaagctggtggaggcccacggcacctttgccagcgccacctgcaccgtgtgccagaggcccttccctggagaggacatccgggcagatgtgatggctgacagagtgccccgctgccctgtgtgcacaggagtggtgaagccagacatcgtgttctttggagagcccctgccccagcgcttcctgctgcacgtggtggacttccccatggctgacctgctgctgatcctgggcaccagcctggaggtggagccctttgccagcctgacagaggccgtgcgcagctctgtgccccggctgctgatcaacagagacctggtgggccccctggcctggcaccccaggagcagagatgtggcccagctgggagatgtggtgcatggagtggagagcctggtggagctgctgggctggacagaggagatgagggacctggtgcagcgggagaccgggaagctggatggccctgacaagtag

SEQ ID NO: 173323 - DNA, 1200 bp, Artificial Sequence
  derived and/or modified sequence
atggccttctggggctggcgggccgccgccgccctgcggctgtggggtcgggtagtggagcgcgttgaggccggaggcggtgtggggccctttcaagcgtgcggatgtaggctcgtgcttggggggcgggacgacgtgtcagcaggactgaggggaagccacggggctcgcggcgagcctttggatccggcgagacccctgcaaagacctccccgcccggaagtaccacgcgcatttcgacgtcagccaagagccgctgccccttcattcttcttttctagcattaaggggggtcgccggtccattagttttagcgttggggcatcatcagtagtcggttctgggggatcctccgataaaggtaaattatccctccaggacgtggcagaactgatacgggccagggcctgtcagcgcgttgtggttatggtgggcgctggaatcagcacgccgtctgggatccctgattttcggagccccgggagtggcctgtatagtaacctgcagcaatacgatttgccctaccccgaggctatcttcgaactgccattcttttttcataacccaaagccctttttcaccctcgctaaagagttatacccagggaattataaacctaacgtgacacactacttcttgcggttgctacatgacaagggcctcctcctaaggttgtacacccaaaacatcgatggcctggagcgcgtgtctggaatccctgcatcaaagctggtagaagcccatggcacatttgccagcgctacatgcacggtttgtcaacgccccttccccggagaagatatccgcgccgacgtaatggccgaccgtgtaccaaggtgccccgtatgtacgggcgtcgttaaacctgatattgtgttctttggtgagcccctgccacagcgatttttgttacacgtagtagatttcccaatggcagacctactgctgatcctcgggaccagcctggaggtagagccgttcgccagtcttaccgaagccgtgagatcctcagtgcccagattgctcatcaaccgagatctcgttggtccactcgcctggcaccccagatcacgagacgtggcgcagctcggcgatgtggtccatggcgtagagagtctggtggagctgctcggttggaccgaggaaatgcgggacctggtccagcgggaaacgggaaagttggatgggcccgacaaatag

SEQ ID NO: 173324 - DNA, 957 bp, Artificial Sequence
  derived and/or modified sequence
atggccttctggggctggcgggccgccgccgccctgcggctgtggggtagagttgtcgagagagtggaggctggtggtggggtcggccccttccaggcctgcgggtgtagacttgtgttgggcggccgtgatgatgacgtggccgaactgatccgagcacgagcttgccagcgcgtagtggtgatggtgggagccggtatttctactccatctggcatccctgatttcaggtcgcctggaagcgggttatacagcaacctgcagcagtacgatctaccctatcctgaagctattttcgagctgccattctttttccacaatcccaaacctttttttacccttgcaaaggagctgtatcctgggaactacaaacctaatgtgactcactattttctgcgtctcctgcatgataaggggttgctgctgcgcctttatacccagaatattgatggtcttgagcgggtgtcggggattcccgccagcaagttggtagaggcccacggaacattcgcgtccgccacttgcacagtctgtcaacggcctttccccggcgaggatataagagcagatgttatggcagatcgcgtcccacggtgccccgtgtgcactggcgtggtcaaacctgacatcgtgttttttggcgagccccttcctcagcggtttctcctacacgttgtggatttcccaatggccgacttgctgctcatacttgggacttctctagaagtggagccttttgcatctctcaccgaagcagtcagatcaagcgtgccccgactgcttattaatagagacctggtgggcccactggcatggcacccacggtctcgggacgtggcccagttaggcgatgtggtccacggggttgagtccctggtcgagctgctggggtggacggaggaaatgcgagacttggtgcagcgcgagaccggtaagttagacggcccagataagtag

SEQ ID NO: 173325 - DNA, 1200 bp, Artificial Sequence
  derived and/or modified sequence
atggcattttggggatggagggctgctgctgcgctgcgcctgtggggcagagtggttgaacgcgtggaagccggagggggagtgggccctttccaggcgtgcgggtgcagactagtgctgggcggtcgagacgatgttagtgccggactgcgtgggtctcatggggctcggggagaacctctggaccccgctcgcccactccagcggcctcctagaccagaggtgccccgagcttttcgacggcaacctagagcggctgcccctagctttttttttagctcaattaaaggtggcaggcggtccatctcattcagcgtgggggcatcctctgtggtcggcagtggcggtagtagcgacaagggcaagctgtctctgcaggatgtggcggaactgatccgcgcacgggcatgccagagagtcgtcgtcatggtgggggcaggtatcagtactccttccggcatccctgacttccgcagccctgggagcggcctgtattccaatcttcaacagtacgatctgccttatcctgaagccatttttgagctgccctttttttttcataaccccaaaccttttttcactcttgcaaaagaactgtatccaggtaattataaacctaacgtgacccactatttcctgaggctgctccacgacaaaggactcctgctccgcctgtacacacaaaacatcgatgggctcgagagggtcagtgggatccccgctagtaaactcgtagaggctcacggaacttttgcttccgccacatgtaccgtgtgccaacggcctttccctggagaggacatcagggcagacgtcatggctgacagagtgcccagatgtcctgtgtgtaccggggtcgtgaagcctgacatagtattcttcggggagccactgccccaacgatttttgctgcatgtggtggacttcccaatggctgacctcctactgatcttgggcacaagcctggaagtggagccattcgcctctctgaccgaggccgtccgcagctctgtgccgcgattgctcattaatcgcgatttagtgggtccgctcgcctggcatccacgttcccgggatgtagctcagctcggcgatgtggtccacggggtggagtccctggttgagctgttgggatggactgaggaaatgagggacctagtacaacgggaaaccgggaaactggacggaccagataagtag

SEQ ID NO: 173326 - DNA, 957 bp, Artificial Sequence
  derived and/or modified sequence
atggcattctggggctggagagcagctgccgctctaaggctttggggtagagttgtggagcgtgtagaggctggagggggagtcggcccttttcaggcatgcggttgtagactcgtgcttggaggccgagatgacgacgtggctgaattgattagagctcgggcttgtcagcgggtagtcgtgatggtgggagcaggcatttctacaccctcaggaatccctgactttcgttctccgggttccgggctgtacagcaatctacagcaatacgatctgccctaccctgaagccattttcgaattgccatttttcttccacaacccaaaaccattcttcaccctggccaaggaactatatccagggaactacaagcctaacgtgacccattattttctgcggctgctacacgacaaggggctactcctgcgcctctacactcagaatattgatggtctcgaaagggtttctgggatcccggcatcgaagctggtcgaagcccacgggaccttcgcgagcgccacatgtacagtctgtcagagacctttccctggcgaggatatccgggcagacgtaatggctgatagggtgccaagatgtcctgtctgcaccggcgtcgtgaaaccagatattgtttttttcggggagccactgcctcaaaggttcctcctccatgtcgtggactttcctatggctgacctgctgttgatactgggcacatctttagaagtggagccattcgcaagcttaaccgaggcagtccggagctccgttcctaggctgcttattaacagggacctggtcggacccctggcctggcacccgagaagcagagacgtggcacagttaggcgacgtggttcatggagtggaatctttggtggaacttcttgggtggactgaggaaatgagggatctagtccagcgtgagacgggcaagctggacggcccagacaaatag

SEQ ID NO: 173327 - DNA, 2543 bp, Artificial Sequence
  derived and/or modified sequence
cggaggcggggctggggcgccgggggcgggggtgggaggcggaggcggggccggggcgccgggggcggggcgagtccggaggactccttggactgcgcggaacatggcgttctggggttggcgcgccgcggcagccctccggctgtggggccgggtagttgaacgggtcgaggccgggggaggcgtggggccgtttcaggcctgcggctgtcggctggtgcttggcggcagggacgatgtgagtgcggggctgagaggcagccatggggcccgcggtgagcccttggacccggcgcgccccttgcagaggcctcccagacccgaggtgcccagggcattccggaggcagccgagggcagcagctcccagtttcttcttttcgagtattaaaggtggaagaaggtccatatctttttctgtgggtgcttcaagtgttgttggaagtggaggcagcagtgacaaggggaagctttccctgcaggatgtagctgagctgattcgggccagagcctgccagagggtggtggtcatggtgggggccggcatcagcacacccagtggcattccagacttcagatcgccggggagtggcctgtacagcaacctccagcagtacgatctcccgtaccccgaggccatttttgaactcccattcttctttcacaaccccaagccctttttcactttggccaaggagctgtaccctggaaactacaagcccaacgtcactcactactttctccggctgcttcatgacaaggggctgcttctgcggctctacacgcagaacatcgatgggcttgagagagtgtcgggcatccctgcctcaaagctggttgaagctcatggaacctttgcctctgccacctgcacagtctgccaaagacccttcccaggggaggacattcgggctgacgtgatggcagacagggttccccgctgcccggtctgcaccggcgttgtgaagcccgacattgtgttctttggggagccgctgccccagaggttcttgctgcatgtggttgatttccccatggcagatctgctgctcatccttgggacctccctggaggtggagccttttgccagcttgaccgaggccgtgcggagctcagttccccgactgctcatcaaccgggacttggtggggcccttggcttggcatcctcgcagcagggacgtggcccagctgggggacgtggttcacggcgtggaaagcctagtggagcttctgggctggacagaagagatgcgggaccttgtgcagcgggaaactgggaagcttgatggaccagacaaataggatgatggctgcccccacacaataaatggtaacataggagacatccacatcccaattctgacaagacctcatgcctgaagacagcttgggcaggtgaaaccagaatatgtgaactgagtggacacccgaggctgccactggaatgtcttctcaggccatgagctgcagtgactggtagggctgtgtttacagtcagggccaccccgtcacatatacaaaggagctgcctgcctgtttgctgtgttgaactcttcactctgctgaagctcctaatggaaaaagctttcttctgactgtgaccctcttgaactgaatcagaccaactggaatcccagaccgagtctgctttctgtgcctagttgaacggcaagctcggcatctgttggttacaagatccagacttgggccgagcggtccccagccctcttcatgttccgaagtgtagtcttgaggccctggtgccgcacttctagcatgttggtctcctttagtggggctatttttaatgagagaaaatctgttctttccagcatgaaatacatttagtctcctcaaagggactgcaggtgttgacatgagttggaaagggaaccctgggatacgtggcgtcccctctattggaacagtctgaggactgaaggcatttgtccctggatttattggagacggcccagctcctccctctgaaggtggtcacattctgttgactctccatactcagcctctcctccagaaacagatctgttccagaacattccagcactttctatctggcctccttgtccccacactacgcccccccaccctcgccagggcttcctctagtgacactgttagagctaatctctgagacagggaaggcattactcacttaaaacccaggctgagtcctggccacctgctggattgtgacataggaggtggaatccactgaactgctacttctgcacaggctccttctcctggggctgtacccaggcccagccctgatggctcaccctgtcaggcaccagctgctccctcctgggctctcacccacctgcacatcctccttcctagcatcacattacctgcgtgtttccccagacaaaagcacttcccattcttgaaccttgcctaccctgggctgagctgacggcaatagatttaatgacagtgactcccaggaagggggtcctgtgactttgcgccttaataagaacaaaaggtggaattggtgacctaggaaaactgttgaatt

SEQ ID NO: 173328 - DNA, 1475 bp, Artificial Sequence
  derived and/or modified sequence
ggaggactccttggactgcgcggaacatggcgttctggggttggcgcgccgcggcagccctccggctgtggggccgggtagttgaacgggtcgaggccgggggaggcgtggggccgtttcaggcctgcggctgtcggctggtgcttggcggcagggacgatgatgtagctgagctgattcgggccagagcctgccagagggtggtggtcatggtgggggccggcatcagcacacccagtggcattccagacttcagatcgccggggagtggcctgtacagcaacctccagcagtacgatctcccgtaccccgaggccatttttgaactcccattcttctttcacaaccccaagccctttttcactttggccaaggagctgtaccctggaaactacaagcccaacgtcactcactactttctccggctgcttcatgacaaggggctgcttctgcggctctacacgcagaacatcgatgggcttgagagagtgtcgggcatccctgcctcaaagctggttgaagctcatggaacctttgcctctgccacctgcacagtctgccaaagacccttcccaggggaggacattcgggctgacgtgatggcagacagggttccccgctgcccggtctgcaccggcgttgtgaagcccgacattgtgttctttggggagccgctgccccagaggttcttgctgcatgtggttgatttccccatggcagatctgctgctcatccttgggacctccctggaggtggagccttttgccagcttgaccgaggccgtgcggagctcagttccccgactgctcatcaaccgggacttggtggggcccttggcttggcatcctcgcagcagggacgtggcccagctgggggacgtggttcacggcgtggaaagcctagtggagcttctgggctggacagaagagatgcgggaccttgtgcagcgggaaactgggaagcttgatggaccagacaaataggatgatggctgcccccacacaataaatggtaacataggagacatccacatcccaattctgacaagacctcatgcctgaagacagcttgggcaggtgaaaccagaatatgtgaactgagtggacacccgaggctgccactggaatgtcttctcaggccatgagctgcagtgactggtagggctgtgtttacagtcagggccaccccgtcacatatacaaaggagctgcctgcctgtttgctgtgttgaactcttcactctgctgaagctcctaatggaaaaagctttcttctgactgtgaccctcttgaactgaatcagaccaactggaatcccagaccgagtctgctttctgtgcctagttgaacggcaagctcggcatctgttggttacaagatccagacttgggccgagcggtccccagccctcttcatgttccgaagtgtagtcttgaggccctggtgccgcacttctagcatgttggtctcctttagt

SEQ ID NO: 173329 - DNA, 1225 bp, Artificial Sequence
  derived and/or modified sequence
acttggctgtgccattgaggcgtcaaagagtgtgggcgcctgtggtcgaacccgctacggactagctttgtggtgtcagcctttgtgacccggaattgctcctgtcaaatgaggatcttcccagtagtgttttgcgaggattaggtgtaaatataatgcctgaccatagtaaaagcgctcagaaagtattaactatcaccgccatccgggttgaaaaagtattaaaggtggaagaaggtccatatctttttctgtgggtgcttcaagtgttgttggaagtggaggcagcagtgacaaggggaagctttccctgcaggatgtagctgagctgattcgggccagagcctgccagagggtggtggtcatggtgggggccggcatcagcacacccagtggcattccagacttcagatcgccggggagtggcctgtacagcaacctccagcagtacgatctcccgtaccccgaggccatttttgaactcccattcttctttcacaaccccaagccctttttcactttggccaaggagctgtaccctggaaactacaagcccaacgtcactcactactttctccggctgcttcatgacaaggggctgcttctgcggctctacacgcagaacatcgatgggcttgagagagtgtcgggcatccctgcctcaaagctggttgaagctcatggaacctttgcctctgccacctgcacagtctgccaaagacccttcccaggggaggacattcgggctgacgtgatggcagacagggttccccgctgcccggtctgcaccggcgttgtgaagcccgacattgtgttctttggggagccgctgccccagaggttcttgctgcatgtggttgatttccccatggcagatctgctgctcatccttgggacctccctggaggtggagccttttgccagcttgaccgaggccgtgcggagctcagttccccgactgctcatcaaccgggacttggtggggcccttggcttggcatcctcgcagcagggacgtggcccagctgggggacgtggttcacggcgtggaaagcctagtggagcttctgggctggacagaagagatgcgggaccttgtgcagcgggaaactgggaagcttgatggaccagacaaataggatgatggctgcccccacacaataaatggtaacataggagacatccacatcccaattctgacaagacctcatgcctgaagacagctt

SEQ ID NO: 173330 - DNA, 1200 bp, Artificial Sequence
  derived and/or modified sequence
atggccttctggggctggagagccgccgccgccctgagactgtggggcagagtggtggagagagtggaggccggcggcggcgtgggccccttccaggcctgcggctgcagactggtgctgggcggcagagacgacgtgagcgccggcctgagaggcagccacggcgccagaggcgagcccctggaccccgccagacccctgcagagaccccccagacccgaggtgcccagagccttcagaagacagcccagagccgccgcccccagcttcttcttcagcagcatcaagggcggcagaagaagcatcagcttcagcgtgggcgccagcagcgtggtgggcagcggcggcagcagcgacaagggcaagctgagcctgcaggacgtggccgagctgatcagagccagagcctgccagagagtggtggtgatggtgggcgccggcatcagcacccccagcggcatccccgacttcagaagccccggcagcggcctgtacagcaacctgcagcagtacgacctgccctaccccgaggccatcttcgagctgcccttcttcttccacaaccccaagcccttcttcaccctggccaaggagctgtaccccggcaactacaagcccaacgtgacccactacttcctgagactgctgcacgacaagggcctgctgctgagactgtacacccagaacatcgacggcctggagagagtgagcggcatccccgccagcaagctggtggaggcccacggcaccttcgccagcgccacctgcaccgtgtgccagagacccttccccggcgaggacatcagagccgacgtgatggccgacagagtgcccagatgccccgtgtgcaccggcgtggtgaagcccgacatcgtgttcttcggcgagcccctgccccagagattcctgctgcacgtggtggacttccccatggccgacctgctgctgatcctgggcaccagcctggaggtggagcccttcgccagcctgaccgaggccgtgagaagcagcgtgcccagactgctgatcaacagagacctggtgggccccctggcctggcaccccagaagcagagacgtggcccagctgggcgacgtggtgcacggcgtggagagcctggtggagctgctgggctggaccgaggagatgagagacctggtgcagagagagaccggcaagctggacggccccgacaagtag

SEQ ID NO: 173331 - DNA, 957 bp, Artificial Sequence
  derived and/or modified sequence
atggccttctggggctggagagccgccgccgccctgagactgtggggcagagtggtggagagagtggaggccggcggcggcgtgggccccttccaggcctgcggctgcagactggtgctgggcggcagagacgacgacgtggccgagctgatcagagccagagcctgccagagagtggtggtgatggtgggcgccggcatcagcacccccagcggcatccccgacttcagaagccccggcagcggcctgtacagcaacctgcagcagtacgacctgccctaccccgaggccatcttcgagctgcccttcttcttccacaaccccaagcccttcttcaccctggccaaggagctgtaccccggcaactacaagcccaacgtgacccactacttcctgagactgctgcacgacaagggcctgctgctgagactgtacacccagaacatcgacggcctggagagagtgagcggcatccccgccagcaagctggtggaggcccacggcaccttcgccagcgccacctgcaccgtgtgccagagacccttccccggcgaggacatcagagccgacgtgatggccgacagagtgcccagatgccccgtgtgcaccggcgtggtgaagcccgacatcgtgttcttcggcgagcccctgccccagagattcctgctgcacgtggtggacttccccatggccgacctgctgctgatcctgggcaccagcctggaggtggagcccttcgccagcctgaccgaggccgtgagaagcagcgtgcccagactgctgatcaacagagacctggtgggccccctggcctggcaccccagaagcagagacgtggcccagctgggcgacgtggtgcacggcgtggagagcctggtggagctgctgggctggaccgaggagatgagagacctggtgcagagagagaccggcaagctggacggccccgacaagtag

SEQ ID NO: 173332 - protein, 314 aa, Artificial Sequence
  derived and/or modified sequence
MKMSFALTFRSAKGRWIANPSQPCSKASIGLFVPASPPLDPEKVKELQRFITLSKRLLVMTGAGISTESGIPDYRSEKVGLYARTDRRPIQHGDFVRSAPIRQRYWARNFVGWPQFSSHQPNPAHWALSTWEKLGKLYWLVTQNVDALHTKAGSRRLTELHGCMDRVLCLDCGEQTPRGVLQERFQVLNPTWSAEAHGLAPDGDVFLSEEQVRSFQVPTCVQCGGHLKPDVVFFGDTVNPDKVDFVHKRVKEADSLLVVGSSLQVYSGYRFILTAWEKKLPIAILNIGPTRSDDLACLKLNSRCGELLPLIDPC

SEQ ID NO: 173333 - DNA, 945 bp, Artificial Sequence
  derived and/or modified sequence
atgaaaatgagctttgcgctgaccttccgaagcgcaaaaggcagatggattgccaatccttcgcagccatgttccaaggcctctatcggattgttcgtgcccgcctcacccccactggatccagagaaggttaaggagcttcaacggttcattaccttgtctaagaggttactggtgatgactggagccggtatctcaactgaatccggaatccccgactacagaagcgagaaggtcgggctctacgcgagaactgatcgaaggccaatacagcacggcgacttcgttcgcagcgctcccatcagacaacgatactgggctcggaacttcgtcggttggcctcagtttagttctcatcagcccaatccagcccactgggcgctatctacctgggagaagctgggcaaactgtactggctggtgacacagaacgtggatgccttgcacacgaaagcagggagtaggcggttgacagaactccacggctgtatggaccgggtcctgtgcctggattgcggagaacagactcctaggggggtgctgcaagagagatttcaggtgttaaatccaacatggtcggctgaggcccacgggttggccccggacggtgatgtcttcctgagtgaagagcaagtgcgttcgttccaggtgccaacctgcgtgcagtgtggaggccacctcaaacctgacgtggtgttctttggagacacagtaaacccagataaagtggacttcgttcacaagagagtgaaggaggcagatagtctgttggtggtaggctcaagcctccaagtctacagcggctataggtttattctaacagcatgggagaaaaagcttccaatcgccattcttaatataggaccgacacgatctgatgacctcgcatgccttaaactcaatagcagatgtggggaactgctaccgctgattgatccctgctag

SEQ ID NO: 173334 - DNA, 945 bp, Artificial Sequence
  derived and/or modified sequence
atgaagatgagctttgccctgaccttccgcagcgccaagggccgctggatcgccaaccccagccagccctgcagcaaggccagcatcggcctgtttgtgcctgccagcccccccctggaccctgagaaggtgaaggagctgcagcgcttcatcaccctgagcaagaggctgctggtgatgactggagctggcatcagcacagaaagtggcatcccagactacagaagtgagaaggtgggcctgtatgccaggacagacagaagacccatccagcacggggactttgtgcgcagcgcccccatccggcagcgctactgggccaggaactttgtgggctggccccagttcagcagccaccagcccaacccagcccactgggccctgagcacctgggagaagctgggcaagctgtactggctggtgacccagaatgtggatgccctgcacaccaaggccggcagccggcggctgacagagctgcacggctgcatggacagagtgctgtgcctggactgtggggagcagaccccccggggcgtgctgcaggagcgcttccaggtgctgaaccccacctggagcgctgaggcccacggcctggccccagatggagatgtgttcctgtctgaggagcaggtgcgctccttccaggtgcccacctgtgtgcagtgtggcggccacctgaagccagatgtggtgttcttcggggacacagtgaacccagacaaggtggactttgtgcacaagagggtgaaggaggccgacagcctgctggtggtgggcagcagcctgcaggtgtacagcggctaccgcttcatcctgacagcctgggagaagaagctgcccatcgccatcctgaacatcggccccaccaggagtgatgacctggcctgcctgaagctgaacagccgctgtggggagctgctgcccctgattgacccctgctag

SEQ ID NO: 173335 - DNA, 945 bp, Artificial Sequence
  derived and/or modified sequence
atgaagatgagcttcgccctgaccttccggagcgccaagggccggtggattgcaaacccttcacagccctgtagtaaagcaagcatcgggctctttgtacctgcgtccccgcccctcgacccagagaaagtgaaggaactgcagcggttcatcacactgtccaaacgcctcttggttatgacaggagccgggatatctaccgaatcaggcataccagattatcgcagcgaaaaagtgggcctatatgcgcgcaccgatcggagaccaattcaacatggcgattttgttcgaagcgctcccatcaggcagagatactgggccaggaacttcgtggggtggccccagttctcctctcatcagccaaatcctgcgcactgggcactcagtacatgggagaaactgggcaagctgtactggttggtcacacagaacgtcgacgccctgcacaccaaggccggctcgagacgattgactgagttacacggttgtatggacagagtcttgtgcttggattgcggcgaacagactccaaggggagttcttcaggagagatttcaggtgttgaatccgacgtggtcagcagaagcgcacgggctggcccctgacggtgacgtcttcctgtcagaagagcaggttcgttcctttcaggtgcccacttgtgtgcagtgtggcggccatcttaagcccgacgtggtgttcttcggggacaccgtaaaccctgataaagtcgacttcgtgcacaagagggtgaaggaagccgacagcttactcgtcgtgggctcgagtctccaggtatattcaggataccggttcatactcaccgcttgggagaaaaagctgcccatagctattctgaacatcggacctacacgatcggatgacctggcctgtctgaaactgaattcccgatgtggcgagctgctccctctcatcgacccttgctag

SEQ ID NO: 173336 - DNA, 945 bp, Artificial Sequence
  derived and/or modified sequence
atgaagatgagcttcgccctgaccttcagaagcgctaaggggagatggatagccaatccttcgcagccttgctctaaggcatccatcgggctgtttgttcccgcatctccacccctcgacccagagaaggttaaggagctgcagaggttcattacactgtctaagaggcttttggtaatgaccggggcaggtatatcaaccgagagcgggatccccgattataggtcagagaaagtgggcctgtatgccaggacggataggcgtcccatccagcacggggacttcgtcaggagcgcacctatccgccagaggtattgggcacgcaattttgtagggtggccgcagtttagttcccaccagcctaatccagcccattgggcgctatccacctgggagaaattgggcaagctttactggctcgtgacgcaaaatgttgatgcgttgcacaccaaggccggtagtcgcaggctgacagagctgcatggctgtatggaccgcgtgctctgcttagactgcggagagcagacccccaggggagttctgcaggagcgctttcaggttctgaaccctacttggagcgccgaggctcatggactggcccctgatggagacgtgttcctgtccgaagaacaggttcgttcctttcaggtgcctacctgcgtccagtgcggtggacacctaaaacccgatgtcgtgttcttcggcgacacagtgaacccggacaaagtcgactttgtccataagagagttaaagaggctgacagcctcctagtggtgggatcctcgttacaggtgtactccggctatcgcttcatactgaccgcatgggaaaagaagctgccgattgctattctcaatataggtcccaccagaagcgacgatcttgcatgccttaagttgaattctcgatgcggtgagcttctgcctctgattgatccttgctag

SEQ ID NO: 173337 - DNA, 1217 bp, Artificial Sequence
  derived and/or modified sequence
gcaaatgcaatcagacggtcccactgtggggtgtgaagtgtccgtagagctgtgagagaatgaagatgagctttgcgttgactttcaggtcagcaaaaggccgttggatcgcaaaccccagccagccgtgctcgaaagcctccattgggttatttgtgccagcaagtcctcctctggaccctgagaaggtcaaagagttacagcgcttcatcaccctttccaagagactccttgtgatgactggggcaggaatctccaccgaatcggggataccagactacaggtcagaaaaagtggggctttatgcccgcactgaccgcaggcccatccagcatggtgattttgtccggagtgccccaatccgccagcggtactgggcgagaaacttcgtaggctggcctcaattctcctcccaccagcctaaccctgcacactgggctttgagcacctgggagaaactcggaaagctgtactggttggtgacccaaaatgtggatgctttgcacaccaaggcggggagtcggcgcctgacagagctccacggatgcatggacagggtcctgtgcttggattgtggggaacagactccccggggggtgctgcaagagcgtttccaagtcctgaaccccacctggagtgctgaggcccatggcctggctcctgatggtgacgtctttctctcagaggagcaagtccggagctttcaggtcccaacctgcgttcaatgtggaggccatctgaaaccagatgtcgttttcttcggggacacagtgaaccctgacaaggttgattttgtgcacaagcgtgtaaaagaagccgactccctcttggtggtgggatcatccttgcaggtatactctggttacaggtttatcctcactgcctgggagaagaagctcccgattgcaatactgaacattgggcccacacggtcggatgacttggcgtgtctgaaactgaattctcgttgtggagagttgctgcctttgatagacccatgctgaccacagcctgatattccagaacctggaacagggactttcacttgaatcttgctgctaaatgtaaatgccttctcaaatgacagattccagttcccattcaacagagtagggtgcactgacaaagtatagaaggttctaggtatcttaatgtgtggatattcttaattaaaactcattttttttaaataaaaaattgttcagctttatatgaaa

SEQ ID NO: 173338 - DNA, 945 bp, Artificial Sequence
  derived and/or modified sequence
atgaagatgagcttcgccctgaccttcagaagcgccaagggcagatggatcgccaaccccagccagccctgcagcaaggccagcatcggcctgttcgtgcccgccagcccccccctggaccccgagaaggtgaaggagctgcagagattcatcaccctgagcaagagactgctggtgatgaccggcgccggcatcagcaccgagagcggcatccccgactacagaagcgagaaggtgggcctgtacgccagaaccgacagaagacccatccagcacggcgacttcgtgagaagcgcccccatcagacagagatactgggccagaaacttcgtgggctggccccagttcagcagccaccagcccaaccccgcccactgggccctgagcacctgggagaagctgggcaagctgtactggctggtgacccagaacgtggacgccctgcacaccaaggccggcagcagaagactgaccgagctgcacggctgcatggacagagtgctgtgcctggactgcggcgagcagacccccagaggcgtgctgcaggagagattccaggtgctgaaccccacctggagcgccgaggcccacggcctggcccccgacggcgacgtgttcctgagcgaggagcaggtgagaagcttccaggtgcccacctgcgtgcagtgcggcggccacctgaagcccgacgtggtgttcttcggcgacaccgtgaaccccgacaaggtggacttcgtgcacaagagagtgaaggaggccgacagcctgctggtggtgggcagcagcctgcaggtgtacagcggctacagattcatcctgaccgcctgggagaagaagctgcccatcgccatcctgaacatcggccccaccagaagcgacgacctggcctgcctgaagctgaacagcagatgcggcgagctgctgcccctgatcgacccctgctag

SEQ ID NO: 173339 - protein, 266 aa, Artificial Sequence
  derived and/or modified sequence
MMALGAAGATRVFVAMVAAALGGHPLLGVSATLNSVLNSNAIKNLPPPLGGAAGHPGSAVSAAPGILYPGGNKYQTIDNYQPYPCAEDEECGTDEYCASPTRGGDAGVQICLACRKRRKRCMRHAMCCPGNYCKNGICVSSDQNHFRGEIEETITESFGNDHSTLDGYSRRTTLSSKMYHTKGQEGSVCLRSSDCASGLCCARHFWSKICKPVLKEGQVCTKHRRKGSHGLEIFQRCYCGEGLSCRIQKDHHQASNSSRLHTCQRH

SEQ ID NO: 173340 - DNA, 801 bp, Artificial Sequence
  derived and/or modified sequence
atgatggccttgggggctgcgggggcaacaagggttttcgtggctatggtggcagccgctctgggaggtcaccccttgctgggggtttctgccaccctgaatagtgtgcttaacagcaacgctatcaagaatttacctccccccctgggaggcgctgccgggcaccccggttctgcagtctccgctgcaccagggatactttaccctggtggaaataagtaccaaacaattgataattatcagccatatccatgtgccgaggacgaggagtgcggcacagacgagtactgcgcaagcccaacacggggcggtgatgcaggcgtgcagatttgcctcgcctgtaggaaaaggcggaaaagatgtatgcgtcacgccatgtgttgcccgggtaactactgcaagaatggaatttgcgtcagctcggaccagaaccactttagaggcgaaattgaggaaacaataactgaatcatttggaaacgatcactctacacttgacggttacagtagaagaacgaccctgagctcaaagatgtatcacaccaaaggacaggagggctccgtctgcctcaggtctagtgattgcgctagcggcctctgttgtgctagacatttctggtccaagatttgtaaacccgtactgaaggagggccaggtgtgtactaaacatcggaggaaaggctcacatggattagagattttccagaggtgctactgtggcgagggtctgtcctgccgaatccaaaaagatcaccatcaggcatccaactcttcccgactgcatacatgccagcggcactag

SEQ ID NO: 173341 - DNA, 801 bp, Artificial Sequence
  derived and/or modified sequence
atgatggccctgggcgctgctggggccaccagggtgtttgtggccatggtggccgccgccctgggcggccaccccctgctgggcgtgtctgccaccctgaacagcgtgctgaacagcaatgccatcaagaacctgcccccacccctgggcggcgctgctggccaccctggcagcgctgtgtctgctgcccctggcatcctgtacccaggcggcaacaagtaccagaccatcgacaactaccagccctacccctgtgctgaagatgaggagtgtggcacagatgagtactgtgccagccccaccagaggaggagatgctggggtgcagatctgcctggcctgcaggaagaggaggaagcgctgcatgagacatgccatgtgctgccccggcaactactgcaagaatggcatctgtgtgtccagtgaccagaaccacttccggggggagattgaggagaccatcacagagagctttggaaatgaccacagcaccctggatggctacagcaggaggaccaccctgagcagcaagatgtaccacaccaagggccaggagggctctgtgtgcctgcggagcagtgactgtgccagcggcctgtgctgtgcccggcacttctggagcaagatctgcaagcctgtgctgaaggagggccaggtgtgcaccaagcacaggaggaagggcagccacggcctggagatcttccagcgctgctactgtggggagggcctgagctgccgcatccagaaggaccaccaccaggccagcaacagcagccggctgcacacctgccagaggcactag

SEQ ID NO: 173342 - DNA, 801 bp, Artificial Sequence
  derived and/or modified sequence
atgatggccctgggcgccgccggcgccacccgggtgttcgtggccatggtcgccgctgcactgggggggcacccattgttgggtgtctctgccacgttaaatagcgtcctgaactcaaacgcaatcaaaaatctgccccctcccctgggcggcgcagctgggcatcctggctccgccgtgtctgctgctccaggaattttatatcctggaggaaataaatatcagactattgacaattatcagccctacccttgcgctgaggatgaagaatgtggcaccgatgaatactgcgcgagccccacccggggaggggacgcgggagtccagatttgcctggcctgtaggaaacgcaggaagcgctgtatgcgtcatgctatgtgttgcccaggtaattactgcaagaatgggatttgcgtgtcatctgatcagaatcatttcagaggcgagattgaagagaccattactgagtcatttgggaatgatcactccactttagacggatatagccggcgaactaccctgagcagtaagatgtatcacactaagggtcaggaggggtccgtgtgtctgagaagtagtgactgtgcttccggtctgtgttgtgccagacacttttggtccaagatctgcaaacccgtactgaaggaggggcaggtgtgcaccaaacatcgccgcaaaggaagccatggcctcgagatttttcagcgatgctattgtggcgaaggcctgtcgtgcaggatacagaaagatcatcatcaggcctccaattcatctcgactccacacctgtcagaggcactag

SEQ ID NO: 173343 - DNA, 801 bp, Artificial Sequence
  derived and/or modified sequence
atgatggctctcggcgcagccggtgccacacgcgtgttcgtggccatggtggcagcagctctggggggtcacccactgctcggtgtgtccgcaaccctcaactctgtcctgaattctaatgctatcaagaatctgcctccacctctagggggtgccgcaggacacccagggagcgctgtgtcagctgccccaggcattctttaccccggtggtaataagtaccaaaccatcgataactaccagccctacccctgtgctgaggatgaggaatgtggaactgacgaatattgcgctagtccgaccagagggggagatgcaggcgtacagatttgcctggcttgtcggaagaggcgtaagcgctgtatgagacacgctatgtgttgccctggcaactactgcaagaatgggatatgcgtaagcagtgaccagaaccattttagaggggagatcgaggaaaccatcacagaatcctttggaaatgatcacagcaccctcgatggttacagccggagaacaaccctgtcctcaaagatgtatcacactaagggacaggaagggtctgtatgtctgaggagcagcgactgcgcctccggactgtgttgtgcccgacacttttggagcaaaatttgcaagcctgttctgaaagaagggcaggtatgcactaagcatagaagaaaagggagccatggactggaaattttccaacggtgctattgtggagagggtctctcctgtcgcattcaaaaagaccatcatcaagcatctaattcaagcagactccatacttgtcagagacattag

SEQ ID NO: 173344 - DNA, 801 bp, Artificial Sequence
  derived and/or modified sequence
atgatggccctgggcgccgccggcgccaccagagtgttcgtggccatggtggccgccgccctgggcggccaccccctgctgggcgtgagcgccaccctgaacagcgtgctgaacagcaacgccatcaagaacctgcccccccccctgggcggcgccgccggccaccccggcagcgccgtgagcgccgcccccggcatcctgtaccccggcggcaacaagtaccagaccatcgacaactaccagccctacccctgcgccgaggacgaggagtgcggcaccgacgagtactgcgccagccccaccagaggcggcgacgccggcgtgcagatctgcctggcctgcagaaagagaagaaagagatgcatgagacacgccatgtgctgccccggcaactactgcaagaacggcatctgcgtgagcagcgaccagaaccacttcagaggcgagatcgaggagaccatcaccgagagcttcggcaacgaccacagcaccctggacggctacagcagaagaaccaccctgagcagcaagatgtaccacaccaagggccaggagggcagcgtgtgcctgagaagcagcgactgcgccagcggcctgtgctgcgccagacacttctggagcaagatctgcaagcccgtgctgaaggagggccaggtgtgcaccaagcacagaagaaagggcagccacggcctggagatcttccagagatgctactgcggcgagggcctgagctgcagaatccagaaggaccaccaccaggccagcaacagcagcagactgcacacctgccagagacactag

SEQ ID NO: 173345 - DNA, 1790 bp, Artificial Sequence
  derived and/or modified sequence
ccctgcagtcaggactctgggaccgcagggggctcccggaccctgactctgcagccgaaccggcacggtttcgtggggacccaggcttgcaaagtgacggtcattttctctttctttctccctcttgagtccttctgagatgatggctctgggcgcagcgggagctacccgggtctttgtcgcgatggtagcggcggctctcggcggccaccctctgctgggagtgagcgccaccttgaactcggttctcaattccaacgctatcaagaacctgcccccaccgctgggcggcgctgcggggcacccaggctctgcagtcagcgccgcgccgggaatcctgtacccgggcgggaataagtaccagaccattgacaactaccagccgtacccgtgcgcagaggacgaggagtgcggcactgatgagtactgcgctagtcccacccgcggaggggacgcaggcgtgcaaatctgtctcgcctgcaggaagcgccgaaaacgctgcatgcgtcacgctatgtgctgccccgggaattactgcaaaaatggaatatgtgtgtcttctgatcaaaatcatttccgaggagaaattgaggaaaccatcactgaaagctttggtaatgatcatagcaccttggatgggtattccagaagaaccaccttgtcttcaaaaatgtatcacaccaaaggacaagaaggttctgtttgtctccggtcatcagactgtgcctcaggattgtgttgtgctagacacttctggtccaagatctgtaaacctgtcctgaaagaaggtcaagtgtgtaccaagcataggagaaaaggctctcatggactagaaatattccagcgttgttactgtggagaaggtctgtcttgccggatacagaaagatcaccatcaagccagtaattcttctaggcttcacacttgtcagagacactaaaccagctatccaaatgcagtgaactccttttatataatagatgctatgaaaaccttttatgaccttcatcaactcaatcctaaggatatacaagttctgtggtttcagttaagcattccaataacaccttccaaaaacctggagtgtaagagctttgtttctttatggaactcccctgtgattgcagtaaattactgtattgtaaattctcagtgtggcacttacctgtaaatgcaatgaaacttttaattatttttctaaaggtgctgcactgcctatttttcctcttgttatgtaaatttttgtacacattgattgttatcttgactgacaaatattctatattgaactgaagtaaatcatttcagcttatagttcttaaaagcataaccctttaccccatttaattctagagtctagaacgcaaggatctcttggaatgacaaatgataggtacctaaaatgtaacatgaaaatactagcttattttctgaaatgtactatcttaatgcttaaattatatttccctttaggctgtgatagtttttgaaataaaatttaacatttaatatcatgaaatgttataagtagacatacattttgggattgtgatcttagaggtttgtgtgtgtgtacgtatgtgtgtgttctacaagaacggaagtgtgatatgtttaaagatgatcagagaaaagacagtgtctaaatataagacaatattgatcagctctagaataactttaaagaaagacgtgttctgcattgataaactcaaatgatcatggcagaatgagagtgaatcttacattactactttcaaaaatagtttccaataaattaataataccta

SEQ ID NO: 173346 - protein, 303 aa, Artificial Sequence
  derived and/or modified sequence
MGIVQICKGEYFWLEPKNAFENFQEPDIGLVALAFLQGSFAYGGWNFLNYVTEELVDPYKNLPRAIFISIPLVTFVYVFANVAYVTAMSPQELLASNAVAVTFGEKLLGVMAWIMPISVALSTFGGVNGSLFTSSRLFFAGAREGHLPSVLAMIHVKRCTPIPALLFTCISTLLMLVTSDMYTLINYVGFINYLFYGVTVAGQIVLRWKKPDIPRPIKINLLFPIIYLLFWAFLLVFSLWSEPVVCGIGLAIMLTGVPVYFLGVYWQHKPKCFSDFIELLTLVSQKMCVVVYPEVEGLRDRGG

SEQ ID NO: 173347 - protein, 535 aa, Artificial Sequence
  derived and/or modified sequence
MEEGARHRNNTEKKHPGGGESDASPEAGSGGGGVALKKEIGLVSACGIIVGNIIGSGIFVSPKGVLENAGSVGLALIVWIVTGFITVVGALCYAELGVTIPKSGGDYSYVKDIFGGLAGFLRLWIAVLVIYPTNQAVIALTFSNYVLQPLFPTCFPPESGLRLLAAICLLLLTWVNCSSVRWATRVQDIFTAGKLLALALIIIMGIVQICKGEYFWLEPKNAFENFQEPDIGLVALAFLQGSFAYGGWNFLNYVTEELVDPYKNLPRAIFISIPLVTFVYVFANVAYVTAMSPQELLASNAVAVTFGEKLLGVMAWIMPISVALSTFGGVNGSLFTSSRLFFAGAREGHLPSVLAMIHVKRCTPIPALLFTCISTLLMLVTSDMYTLINYVGFINYLFYGVTVAGQIVLRWKKPDIPRPIKINLLFPIIYLLFWAFLLVFSLWSEPVVCGIGLAIMLTGVPVYFLGVYWQHKPKCFSDFIELLTLVSQKMCVVVYPEVERGSGTEEANEDMEEQQQPMYQPTPTKDKDVAGQPQP

SEQ ID NO: 173348 - protein, 332 aa, Artificial Sequence
  derived and/or modified sequence
MGIVQICKGEYFWLEPKNAFENFQEPDIGLVALAFLQGSFAYGGWNFLNYVTEELVDPYKNLPRAIFISIPLVTFVYVFANVAYVTAMSPQELLASNAVAVTFGEKLLGVMAWIMPISVALSTFGGVNGSLFTSSRLFFAGAREGHLPSVLAMIHVKRCTPIPALLFTCISTLLMLVTSDMYTLINYVGFINYLFYGVTVAGQIVLRWKKPDIPRPIKINLLFPIIYLLFWAFLLVFSLWSEPVVCGIGLAIMLTGVPVYFLGVYWQHKPKCFSDFIELLTLVSQKMCVVVYPEVERGSGTEEANEDMEEQQQPMYQPTPTKDKDVAGQPQP

SEQ ID NO: 173349 - protein, 94 aa, Artificial Sequence
  derived and/or modified sequence
MEEGARHRNNTEKKHPGGGESDASPEAGSGGGGVALKKEIGLVSACGIIVGNIIGSGIFVSPKGVLENAGSVGLALIVWIVTGFITVVGALCYA

SEQ ID NO: 173350 - protein, 78 aa, Artificial Sequence
  derived and/or modified sequence
MEEGARHRNNTEKKHPGGGESDASPEAGSGGGGVALKKEIGLVSACGIIVGNIIGSGIFVSPKGVLENAGSVGLALIV

SEQ ID NO: 173351 - DNA, 1608 bp, Artificial Sequence
  derived and/or modified sequence
atggaggagggcgccagacacagaaacaacaccgagaagaagcaccccggcggcggcgagagcgacgccagccccgaggccggcagcggcggcggcggcgtggccctgaagaaggagatcggcctggtgagcgcctgcggcatcatcgtgggcaacatcatcggcagcggcatcttcgtgagccccaagggcgtgctggagaacgccggcagcgtgggcctggccctgatcgtgtggatcgtgaccggcttcatcaccgtggtgggcgccctgtgctacgccgagctgggcgtgaccatccccaagagcggcggcgactacagctacgtgaaggacatcttcggcggcctggccggcttcctgagactgtggatcgccgtgctggtgatctaccccaccaaccaggccgtgatcgccctgaccttcagcaactacgtgctgcagcccctgttccccacctgcttcccccccgagagcggcctgagactgctggccgccatctgcctgctgctgctgacctgggtgaactgcagcagcgtgagatgggccaccagagtgcaggacatcttcaccgccggcaagctgctggccctggccctgatcatcatcatgggcatcgtgcagatctgcaagggcgagtacttctggctggagcccaagaacgccttcgagaacttccaggagcccgacatcggcctggtggccctggccttcctgcagggcagcttcgcctacggcggctggaacttcctgaactacgtgaccgaggagctggtggacccctacaagaacctgcccagagccatcttcatcagcatccccctggtgaccttcgtgtacgtgttcgccaacgtggcctacgtgaccgccatgagcccccaggagctgctggccagcaacgccgtggccgtgaccttcggcgagaagctgctgggcgtgatggcctggatcatgcccatcagcgtggccctgagcaccttcggcggcgtgaacggcagcctgttcaccagcagcagactgttcttcgccggcgccagagagggccacctgcccagcgtgctggccatgatccacgtgaagagatgcacccccatccccgccctgctgttcacctgcatcagcaccctgctgatgctggtgaccagcgacatgtacaccctgatcaactacgtgggcttcatcaactacctgttctacggcgtgaccgtggccggccagatcgtgctgagatggaagaagcccgacatccccagacccatcaagatcaacctgctgttccccatcatctacctgctgttctgggccttcctgctggtgttcagcctgtggagcgagcccgtggtgtgcggcatcggcctggccatcatgctgaccggcgtgcccgtgtacttcctgggcgtgtactggcagcacaagcccaagtgcttcagcgacttcatcgagctgctgaccctggtgagccagaagatgtgcgtggtggtgtaccccgaggtggagagaggcagcggcaccgaggaggccaacgaggacatggaggagcagcagcagcccatgtaccagcccacccccaccaaggacaaggacgtggccggccagccccagccctag

SEQ ID NO: 173352 - DNA, 285 bp, Artificial Sequence
  derived and/or modified sequence
atggaggagggcgccagacacagaaacaacaccgagaagaagcaccccggcggcggcgagagcgacgccagccccgaggccggcagcggcggcggcggcgtggccctgaagaaggagatcggcctggtgagcgcctgcggcatcatcgtgggcaacatcatcggcagcggcatcttcgtgagccccaagggcgtgctggagaacgccggcagcgtgggcctggccctgatcgtgtggatcgtgaccggcttcatcaccgtggtgggcgccctgtgctacgcctag

SEQ ID NO: 173353 - DNA, 237 bp, Artificial Sequence
  derived and/or modified sequence
atggaggagggcgccagacacagaaacaacaccgagaagaagcaccccggcggcggcgagagcgacgccagccccgaggccggcagcggcggcggcggcgtggccctgaagaaggagatcggcctggtgagcgcctgcggcatcatcgtgggcaacatcatcggcagcggcatcttcgtgagccccaagggcgtgctggagaacgccggcagcgtgggcctggccctgatcgtgtag

SEQ ID NO: 173354 - DNA, 1608 bp, Artificial Sequence
  derived and/or modified sequence
atggaggaaggtgcccggcatcgcaataacacagaaaagaaacaccccgggggcggcgagagcgatgcttctcccgaagccgggagcggaggcggcggtgttgctctgaagaaggaaatcggcctggtatcagcatgtggaatcatcgtggggaatattatcggaagtggaatctttgtgtcgcccaagggtgtgcttgaaaatgccggtagcgttggcctggctttgatcgtgtggatcgtgacaggctttatcacagtcgtgggagctttatgttacgccgagcttggagtcaccatccctaagtctggcggtgattacagctacgtgaaagacatttttggtggactcgccggatttctgcgactgtggattgccgtgcttgtgatttaccccacaaaccaggccgtcatcgctctgactttcagcaattatgtcctccagcctctcttccccacttgttttccaccagagtccgggctgcgcttgctagccgccatttgcctacttctcctgacatgggttaactgcagctctgtgcgctgggccacccgtgttcaggacattttcacagcagggaaactcctggccttggctctgataattataatgggcattgtccagatctgtaagggagagtacttttggctagagcctaagaatgctttcgaaaattttcaggaacccgacattgggctggtagcccttgcattcctgcagggcagttttgcctacgggggttggaacttcctgaactatgtgacagaggagctcgtggacccatataaaaacctgcctagagccatctttatctctatccctctggtcaccttcgtctacgtattcgccaacgtagcgtacgtgacagctatgtctccacaagaactgctggcaagcaatgccgtggcagtcaccttcggagaaaagctgttaggggtgatggcgtggatcatgccaatcagtgtggcactctccaccttcggcggtgtcaatggttctctgtttacctctagccggttgttcttcgcaggagcgcgcgagggtcatctaccaagtgtcctggcaatgattcacgtcaaacgctgtaccccaatccccgccctgctctttacctgcatctctactctgctgatgcttgtcacatctgacatgtatacattgatcaactatgttgggttcatcaactacctgttttatggagtgaccgtcgcgggtcagatagtgctgcgctggaaaaagccagatattcctcgacctataaagatcaatttgctgttcccaattatctacctgctgttctgggccttcttgttggtattttccctttggtccgaaccagttgtttgcggaattggcttggcaataatgttaaccggagtgccagtgtattttctgggcgtgtactggcagcacaaacccaaatgcttttccgatttcatcgagcttctgacactcgtgtctcagaaaatgtgtgtggttgtatatccggaggtggaacgggggtctggcactgaggaggccaatgaggatatggaagagcagcagcagcccatgtatcaacctaccccgaccaaagataaggacgtagctggccagccccagccatag

SEQ ID NO: 173355 - DNA, 285 bp, Artificial Sequence
  derived and/or modified sequence
atggaagagggagcgagacatagaaacaatactgagaaaaaacaccccggtgggggggaaagcgacgctagtcccgaggcaggctccgggggcggtggtgtggccctgaagaaagagatcggccttgtcagcgcctgcggcataattgtgggaaacattattgggtccggcatatttgtgtcaccaaagggcgtgttggagaacgccggctctgttgggctggctttgatcgtctggatcgtgacaggcttcatcacagtcgttggagccctctgctacgcatag

SEQ ID NO: 173356 - DNA, 237 bp, Artificial Sequence
  derived and/or modified sequence
atggaggagggcgcacggcaccggaataataccgagaagaaacatcccggaggaggggaaagtgacgctagcccagaagcagggtcaggaggcggtggcgtcgccctaaagaaagaaataggcctggtgtcagcctgcggtatcattgtggggaatattatcgggtccggaatcttcgtcagccctaagggtgtccttgaaaacgctggatcggttgggctcgcactaattgtctag

SEQ ID NO: 173357 - DNA, 1608 bp, Artificial Sequence
  derived and/or modified sequence
atggaggagggcgcccggcacaggaacaacacagagaagaagcaccctgggggcggggagagtgatgccagccctgaggccggcagcggcggcggcggcgtggccctgaagaaggagatcggcctggtgtctgcctgtggcatcatcgtgggcaacatcatcggcagcggcatctttgtgagccccaagggcgtgctggagaatgccggctctgtgggcctggccctgattgtgtggatcgtgacaggcttcatcaccgtggtgggcgccctgtgctacgccgagctgggcgtgaccatccccaagtctggaggagactacagctatgtgaaggacatctttggaggcctggccggcttcctgcggctgtggattgctgtgctggtgatctaccccaccaaccaggccgtcatcgccctgaccttcagcaactacgtgctgcagcccctcttccccacctgcttccccccagagagcggcctgcggctgctggccgccatctgcctgctgctgctgacctgggtgaactgcagctctgtgcgctgggccaccagggtgcaggacatcttcaccgctgggaagctgctggccctggccctgatcatcatcatgggcatcgtgcagatctgcaagggggagtacttctggctggagcccaagaatgcctttgagaacttccaggagccagacatcggcctggtggccctggccttcctgcagggcagctttgcctatggaggctggaacttcctgaactacgtgacagaggagctggtggacccctacaagaacctgccccgggccatcttcatcagcatccccctggtgacctttgtgtatgtgtttgccaacgtggcctacgtgacagccatgagcccccaggagctgctggccagcaatgctgtggccgtgaccttcggggagaagctgctgggcgtgatggcctggatcatgcccatctctgtggccctgagcacctttggaggagtgaatggcagcctcttcaccagcagccgcctcttctttgctggggcccgggagggccacctgcccagcgtgctggccatgatccacgtgaagcgctgcacccccatcccagccctgctcttcacctgcatcagcaccctgctgatgctggtgaccagtgacatgtacaccctcatcaactacgtgggcttcatcaactacctgttctatggagtgacagtggccggccagatcgtgctgcgctggaagaagccagacatcccccggcccatcaagatcaacctgctcttccccatcatctacctgctcttctgggccttcctgctggtgttcagcctgtggagcgagcctgtggtgtgtggcatcggcctggccatcatgctgactggagtgcctgtgtacttcctgggcgtgtactggcagcacaagcccaagtgcttcagtgacttcatcgagctgctgaccctggtgtcccagaagatgtgtgtggtggtgtacccagaggtggagcggggcagcggcacagaggaggccaatgaagacatggaggagcagcagcagcccatgtaccagcccacccccaccaaggacaaggatgtggccggccagccccagccctag

SEQ ID NO: 173358 - DNA, 285 bp, Artificial Sequence
  derived and/or modified sequence
atggaggagggcgcccggcacaggaacaacacagagaagaagcaccctgggggcggggagagtgatgccagccctgaggccggcagcggcggcggcggcgtggccctgaagaaggagatcggcctggtgtctgcctgtggcatcatcgtgggcaacatcatcggcagcggcatctttgtgagccccaagggcgtgctggagaatgccggctctgtgggcctggccctgattgtgtggatcgtgacaggcttcatcaccgtggtgggcgccctgtgctacgcctag

SEQ ID NO: 173359 - DNA, 237 bp, Artificial Sequence
  derived and/or modified sequence
atggaggagggcgcccggcacaggaacaacacagagaagaagcaccctgggggcggggagagtgatgccagccctgaggccggcagcggcggcggcggcgtggccctgaagaaggagatcggcctggtgtctgcctgtggcatcatcgtgggcaacatcatcggcagcggcatctttgtgagccccaagggcgtgctggagaatgccggctctgtgggcctggccctgattgtgtag

SEQ ID NO: 173360 - DNA, 1608 bp, Artificial Sequence
  derived and/or modified sequence
atggaggagggcgcccggcaccggaacaacaccgagaagaagcaccctggggggggtgagagcgacgcatctccagaggcagggtccgggggaggtggcgttgccctgaagaaagaaattggcttagtgtctgcatgtgggatcattgtcggaaatatcataggctcaggaatattcgtgagtcccaagggtgtcctggaaaacgcaggctctgtcgggctcgcgctcatcgtttggattgtgacaggattcattactgtggtgggggcgttgtgctatgccgagctgggggtcaccattccaaagtcgggaggcgactacagctatgtaaaggatatatttggcggcctggccggctttctgaggctgtggattgccgttctagttatttaccctaccaaccaggcggtgattgcattgaccttttcaaactatgttcttcagccattattccctacctgtttcccccctgagtcagggttaagactattggcggcgatctgtctgctgctgctcacatgggtgaattgttcatccgtccgttgggctacaagggtacaggatatattcaccgctgggaagttattagccctcgccttgattattatcatgggaatcgtgcagatatgtaaaggggagtatttttggcttgaaccaaagaatgcatttgaaaacttccaggagccggatatcgggctggtggcccttgccttcctccaagggagtttcgcatacgggggctggaacttcctcaattatgtgaccgaggaactggtggacccctataaaaatctgccaagagcgatcttcattagtattcctttggtcacattcgtttacgtctttgcaaatgttgcatacgtaacagccatgtctcctcaggagctgttggcgtccaacgcggtcgcagtgacatttggggaaaagttgttgggtgtcatggcctggatcatgcccatttctgtggcacttagtacattcggaggtgtgaatgggtctctgttcacctctagtcgcctctttttcgccggtgctcgtgagggccaccttcctagcgtgcttgccatgatccatgttaaacgctgcactcctatcccagcgctcttattcacttgcattagcaccctgctcatgctggttacgtcagatatgtacactttaattaattacgtcggctttattaactatctgttctacggtgtgaccgtggctggccagatcgtgttgcgatggaaaaaaccagatattcctagacctattaagattaaccttctgttccctattatttatctacttttttgggcttttctgctggtgttctccctctggagtgagcccgtcgtgtgtggaattggcctggccatcatgttgaccggcgtgcccgtgtacttcctgggcgtttactggcagcataagccaaagtgcttttctgacttcatcgaactgttaacactcgtgtctcagaagatgtgtgtcgttgtgtacccagaggttgaacgggggagtgggacggaagaggccaacgaggacatggaggagcagcaacagcccatgtatcagcctacgccaaccaaagataaagacgtagccgggcagccccagccatag

SEQ ID NO: 173361 - DNA, 285 bp, Artificial Sequence
  derived and/or modified sequence
atggaggagggcgcccggcaccggaacaacaccgagaagaagcacccgggtggtggggaatctgacgcctcccccgaagcggggtccggagggggcggggtggccctgaagaaagaaatagggctggtgagtgcttgtggcatcatcgttggtaacatcattgggagcggaatctttgttagtcccaagggcgtcctggagaacgccgggagtgtggggctcgcgttgattgtttggattgtgacaggctttatcacagtagtgggtgccctttgttatgcgtag

SEQ ID NO: 173362 - DNA, 237 bp, Artificial Sequence
  derived and/or modified sequence
atggaggagggcgcccggcaccggaacaacaccgagaagaagcaccctggggggggtgagtctgatgcctcacccgaagccggcagtggagggggcggcgtcgccctcaaaaaggagatcgggctggtgtctgcatgtggaataatcgtaggaaatatcataggttccggtatatttgtctcacctaaaggggtgctcgaaaatgctggttcagttggcttggccttgatcgtctag

SEQ ID NO: 173363 - DNA, 1608 bp, Artificial Sequence
  derived and/or modified sequence
atggaggagggggctcgtcaccggaacaatacagaaaagaaacacccgggtggcggagaatctgatgcaagcccggaggctggtagcgggggaggcggagtggcactcaaaaaagagattggactggtcagcgcctgtggcataatcgtaggcaatataataggatctggcattttcgtgtctcctaagggcgtgctcgaaaatgctggtagtgtgggactggccctgatagtgtggatcgtcacaggctttattactgtggtgggggcactttgttacgccgagctgggagtgaccatacctaaaagcgggggagactattcttacgtgaaagacatcttcggcggactcgctggcttcttacgactatggatcgcggtgctagtgatatacccgaccaatcaggctgttatcgccctcacattcagtaattatgttctgcagcccctattccctacctgtttcccacccgagtctggcctccgcctactggccgcaatatgtttgctgcttctgacctgggtgaactgctctagtgtccgctgggctacaagagtgcaggatatattcaccgctggaaaactgctggccctggctttaataatcataatgggcatcgtgcaaatttgtaagggggagtatttttggctggaacctaaaaatgccttcgaaaacttccaggagcctgatattgggctggtcgccctagctttcctccaaggcagctttgcctacggcggttggaattttttgaattacgtcacagaggagcttgtcgacccttacaagaatcttcccagagcaatattcataagcattcccttggttactttcgtgtacgtcttcgccaatgtcgcctatgtcactgctatgtcccctcaggagttactcgcttcgaacgcagtcgccgtgacattcggtgaaaagctacttggtgtcatggcatggattatgccaatctccgtcgcactctcgaccttcggtggagtgaatggatcactgttcacctcctctcgcctgttctttgcaggagcacgcgagggccatctgccctctgtgctcgctatgatccacgtgaagcggtgtaccccgatccccgctcttctgtttacctgtatttcaacgctcctgatgctggtaacgagtgacatgtacactctcataaattatgtagggtttatcaattatctcttctacggtgtgaccgtagcaggacagattgtgctgcgctggaagaaaccagatatccccagaccaattaaaattaaccttcttttccctatcatttacttgctattctgggcgtttttgctggttttcagtctctggagcgaaccagtggtttgtggaataggtttggctattatgctgacaggggttccggtgtatttcttgggagtctattggcagcataaacccaagtgtttctcagacttcattgagctcctcactctagtatcacagaagatgtgtgtggttgtttatccggaggttgagcgtggctcagggacggaagaagcgaacgaagacatggaggaacagcagcagcccatgtatcagcctaccccaaccaaagataaggatgttgctggccaaccgcagccatag

SEQ ID NO: 173364 - DNA, 285 bp, Artificial Sequence
  derived and/or modified sequence
atggaggagggggctcgccacaggaataatactgaaaagaagcatcctggcggaggagaatccgacgcatcacccgaggcgggttcaggaggcggtggagtggccctgaaaaaagaaattggcttggtgtcagcctgtggcataattgtgggaaacatcattggctcaggtatattcgtttcacctaagggagttttggagaatgcagggagcgtgggcctagctttgatcgtttggattgtgaccggtttcattaccgtcgtgggtgccctgtgctacgcgtag

SEQ ID NO: 173365 - DNA, 237 bp, Artificial Sequence
  derived and/or modified sequence
atggaagaaggggcaaggcatcgcaacaacacagagaaaaagcaccctggaggaggggagtctgatgccagccctgaagctggctccggaggcggaggtgtcgcgctgaagaaggagatcgggctggtttccgcttgcgggatcatcgtgggcaacatcattggcagcggtatcttcgtcagccctaaaggggtacttgaaaatgccggatccgtcgggctcgccctgattgtctag

SEQ ID NO: 173366 - DNA, 1380 bp, Artificial Sequence
  derived and/or modified sequence
tgtgctggtgatctaccccaccaaccaggctgtcatcgccctcaccttctccaactacgtgctgcagccgctcttccccacctgcttccccccagagtctggccttcggctcctggctgccatctgcttattgctcctcacatgggtcaactgttccagtgtgcggtgggccacccgggttcaagacatcttcacagctgggaagctcctggccttggccctgattatcatcatggggattgtacagatatgcaaaggagagtacttctggctggagccaaagaatgcatttgagaatttccaggaacctgacatcggcctcgtcgcactggctttccttcagggctcctttgcctatggaggctggaactttctgaattacgtgactgaggagcttgttgatccctacaagaaccttcccagagccatcttcatctccatcccactggtcacatttgtgtatgtctttgccaatgtcgcttatgtcactgcaatgtccccccaggagctgctggcatccaacgccgtcgctgtgacttttggagagaagctcctaggagtcatggcctggatcatgcccatttctgttgccctgtccacatttggaggagttaatgggtctctcttcacctcctctcggctgttcttcgctggagcccgagagggccaccttcccagtgtgttggccatgatccacgtgaagcgctgcaccccaatcccagccctgctcttcacatgcatctccaccctgctgatgctggtcaccagcgacatgtacacactcatcaactatgtgggcttcatcaactacctcttctatggggtcacggttgctggacagatagtccttcgctggaagaagcctgatatcccccgccccatcaagatcaacctgctgttccccatcatctacttgctgttctgggccttcctgctggtcttcagcctgtggtcagagccggtggtgtgtggcattggcctggccatcatgctgacaggagtgcctgtctatttcctgggtgtttactggcaacacaagcccaagtgtttcagtgacttcattgagctgctaaccctggtgagccagaagatgtgtgtggtcgtgtaccccgaggtggaggggctcagggacagaggaggctaatgaggacatggaggagcagcagcagcccatgtaccaacccactcccacgaaggacaaggacgtggcggggcagccccagccctgaggaccaccattccctggctactctctccttcctcccccttttatcctacctccctgccttggtcctgccaacacatgcgagtacacacacacccctctctctgcttttgtcaggcagtggtaggactttggtgtgggtggtgagaaattgt

SEQ ID NO: 173367 - DNA, 4216 bp, Artificial Sequence
  derived and/or modified sequence
tcccgaaaccagagggatggggccggctgtgcagtagaacggggatcgaaaagaggaaaacaagggcacgaagaccagcgagaaagaagaggacacctgggaaaggcggaagcagaagacggggaagggaaaagaaacccaaagcaggtggaaaccagatctagagcaacaccgtcaggttcacagtttgtttttctagaagagaagaaagtacctgaggattgctcttttttcctaccgttaatgaaaactacttttgtcttcatcataaaagaaaaaactaaggggaggtaaaggcagtctcctgttttattagggggagaggtgaagggaaatccaggctcactttctgaataagccactgcctggtgcacagagcagaaccatcctggtttctgaagacacatccctttcagcagaattccagccggagtcgctggcacagttctatttttatatttaaatgtatgtctcccctggcctttttttttttttttttttttagcaacacttttcttgtttgtaaacgcgagtgaccagaaagtgtgaatgcggagtaggaatatttttcgtgttctcttttatctgcttgccttttttagagagtagcagtggttcctatttcggaaaaggacgttctaattcaaagctctctcccaatatatttacacgaatacgcatttagaaagggaggcagcttttgaggttgcaatcctactgagaaggatggaagaaggagccaggcaccgaaacaacaccgaaaagaaacacccaggtgggggcgagtcggacgccagccccgaggctggttccggagggggcggagtagccctgaagaaagagatcggattggtcagtgcctgtggtatcatcgtagggaacatcatcggctctggaatctttgtctcgccaaagggagtgctggagaatgctggttctgtgggccttgctctcatcgtctggattgtgacgggcttcatcacagttgtgggagccctctgctatgctgaactcggggtcaccatccccaaatctggaggtgactactcctatgtcaaggacatcttcggaggactggctgggttcctgaggctgtggattgctgtgctggtgatctaccccaccaaccaggctgtcatcgccctcaccttctccaactacgtgctgcagccgctcttccccacctgcttccccccagagtctggccttcggctcctggctgccatctgcttattgctcctcacatgggtcaactgttccagtgtgcggtgggccacccgggttcaagacatcttcacagctgggaagctcctggccttggccctgattatcatcatggggattgtacagatatgcaaaggagagtacttctggctggagccaaagaatgcatttgagaatttccaggaacctgacatcggcctcgtcgcactggctttccttcagggctcctttgcctatggaggctggaactttctgaattacgtgactgaggagcttgttgatccctacaagaaccttcccagagccatcttcatctccatcccactggtcacatttgtgtatgtctttgccaatgtcgcttatgtcactgcaatgtccccccaggagctgctggcatccaacgccgtcgctgtgacttttggagagaagctcctaggagtcatggcctggatcatgcccatttctgttgccctgtccacatttggaggagttaatgggtctctcttcacctcctctcggctgttcttcgctggagcccgagagggccaccttcccagtgtgttggccatgatccacgtgaagcgctgcaccccaatcccagccctgctcttcacatgcatctccaccctgctgatgctggtcaccagcgacatgtacacactcatcaactatgtgggcttcatcaactacctcttctatggggtcacggttgctggacagatagtccttcgctggaagaagcctgatatcccccgccccatcaagatcaacctgctgttccccatcatctacttgctgttctgggccttcctgctggtcttcagcctgtggtcagagccggtggtgtgtggcattggcctggccatcatgctgacaggagtgcctgtctatttcctgggtgtttactggcaacacaagcccaagtgtttcagtgacttcattgagctgctaaccctggtgagccagaagatgtgtgtggtcgtgtaccccgaggtggagcggggctcagggacagaggaggctaatgaggacatggaggagcagcagcagcccatgtaccaacccactcccacgaaggacaaggacgtggcggggcagccccagccctgaggaccaccattccctggctactctctccttcctcccccttttatcctacctccctgccttggtcctgccaacacatgcgagtacacacacacccctctctctgcttttgtcaggcagtggtaggactttggtgtgggtggtgagaaattgtaaacaaaaactgacattcatacccaaagaaccagcctctcaccccagggtccatgtcccaggccccactccagtgctgcccacactcccagctgctggaggagaggggagatgccaaggtgccctgcaggacctccctccgggccacaccctcagctgcctcttcaggaaccggagctcattactgccttccctcccagggaggccccttcagagaggagaggccacaggagctgcattgtggggggacaggctcaagcaattctgtccccatcaaggggtcagctggagagacccaagaccctatctgttcaccagggacccaaaatccaaggggatgcttccctctgccctctttcctgcccctccccatcatacctgcacccaccccagccagggctccctgtccagaattcggttctcctcaggacgccaactcccagagctaaggaccaaggagaagaacagcctctccacccccaagccaggcggttgaggaacatattgagaaaggttcagattgcagaaacccagccctgcccctgcctcctgcatccagcccccaacatggtgccaaagcttccagaagccaaaaagcttctgatttttaaggtagtgggcatctctctcctaatgacgaagctgctcagcaactccacctgcccgccgcaggaaggagcagtcccctgctatccctgcagccactcccagcacacccgcacacagccagcaccaccgcccccaccgtgcacttctcctctctgggccttggcttgggaccaggtacgaaggatccccaagcccttcaggcctgagatcagagccagatcagccttaagtcacctcccatccaagaacttggcctaaaaatactcccctatttctaaccctcaggacggatctgatattaaatgccttccctgggaggaagggtgctttccccctccctagaggtgcccattccataccctgggagactgaggagagcattggctgaagcccagttcctttcccatccatccccaactccaataatcccccactcctcgcaggtctcagtgtcatgctgtcttggggcagggtgaaagggtagtggcagcagggcgcccactctggagatcctcaaaaaaggccctcctctgtggctggcagcctctgacctttccctgggcttcaaaggaaggctatggagtttgctgtgggccctgcaaccttcccagccactcctgctgcactaaggacttaggatccttttatcacaaatcgggattctctcccccaccccgaattctgtctgcttaaactggaatacacaggagcccttcctggcctggatggtgtctcccagcttccccgcccagcttgcccaccccatagttggtgagatgccaagtttggtctgagttgtgaccccttcagagtagatgcccggcaggctggggttggcccctggagggtcaggggaccatcttcttattccctcttttctcattcctccaacttcctcccctccttcaattatttttttgtaaagttgatgccttactttttggataaatatttttgaagctggtatttctatttcttttggattttttttaatgtaaggttgttttgggggatggagttagaaccttaatgataatttctttcgtttggtgtaggttttagagatttgttttgtggagaggtttttttcttttgatgtaataaaatttaaaatggaaatgaa

SEQ ID NO: 173368 - DNA, 4212 bp, Artificial Sequence
  derived and/or modified sequence
tcccgaaaccagagggatggggccggctgtgcagtagaacggggatcgaaaagaggaaaacaagggcacgaagaccagcgagaaagaagaggacacctgggaaaggcggaagcagaagacggggaagggaaaagaaacccaaagcaggtggaaaccagatctagagcaacaccgtcaggttcacagtttgtttttctagaagagaagaaagtacctgaggattgctcttttttcctaccgttaatgaaaactacttttgtcttcatcataaaagaaaaaactaaggggaggtaaaggcagtctcctgttttattagggggagaggtgaagggaaatccaggctcactttctgaataagccactgcctggtgcacagagcagaaccatcctggtttctgaagacacatccctttcagcagaattccagccggagtcgctggcacagttctatttttatatttaaatgtatgtctcccctggcctttttttttttttttttttttagcaacacttttcttgtttgtaaacgcgagtgaccagaaagtgtgaatgcggagtaggaatatttttcgtgttctcttttatctgcttgccttttttagagagtagcagtggttcctatttcggaaaaggacgttctaattcaaagctctctcccaatatatttacacgaatacgcatttagaaagggaggcagcttttgaggttgcaatcctactgagaaggatggaagaaggagccaggcaccgaaacaacaccgaaaagaaacacccaggtgggggcgagtcggacgccagccccgaggctggttccggagggggcggagtagccctgaagaaagagatcggattggtcagtgcctgtggtatcatcgtagggaacatcatcggctctggaatctttgtctcgccaaagggagtgctggagaatgctggttctgtgggccttgctctcatcgtctggattgtgacgggcttcatcacagttgtgggagccctctgctatgctgaactcggggtcaccatccccaaatctggaggtgactactcctatgtcaaggacatcttcggaggactggctgggttcctgaggctgtggattgctgtgctggtgatctaccccaccaaccaggctgtcatcgccctcaccttctccaactacgtgctgcagccgctcttccccacctgcttccccccagagtctggccttcggctcctggctgccatctgcttattgctcctcacatgggtcaactgttccagtgtgcggtgggccacccgggttcaagacatcttcacagctgggaagctcctggccttggccctgattatcatcatggggattgtacagatatgcaaaggagagtacttctggctggagccaaagaatgcatttgagaatttccaggaacctgacatcggcctcgtcgcactggctttccttcagggctcctttgcctatggaggctggaactttctgaattacgtgactgaggagcttgttgatccctacaagaaccttcccagagccatcttcatctccatcccactggtcacatttgtgtatgtctttgccaatgtcgcttatgtcactgcaatgtccccccaggagctgctggcatccaacgccgtcgctgtgacttttggagagaagctcctaggagtcatggcctggatcatgcccatttctgttgccctgtccacatttggaggagttaatgggtctctccacctcctctcggctgttcttcgctggagcccgagagggccaccttcccagtgtgttggccatgatccacgtgaagcgctgcaccccaatcccagccctgctcttcacatgcatctccaccctgctgatgctggtcaccagcgacatgtacacactcatcaactatgtgggcttcatcaactacctcttctatggggtcacggttgctggacagatagtccttcgctggaagaagcctgatatcccccgccccatcaagatcaacctgctgttccccatcatctacttgctgttctgggccttcctgctggtcttcagcctgtggtcagagccggtggtgtgtggcattggcctggccatcatgctgacaggagtgcctgtctatttcctgggtgtttactggcaacacaagcccaagtgtttcagtgacttcattgagctgctaaccctggtgagccagaagatgtgtgtggtcgtgtaccccgaggtggagcggggctcagggacagaggaggctaatgaggacatggaggagcagcagcagcccatgtaccaacccactcccacgaaggacaaggacgtggcggggcagccccagccctgaggaccaccattccctggctactctctccttcctcccccttttatcctacctccctgccttggtcctgccaacacatgcgagtacacacacacccctctctctgcttttgtcaggcagtggtaggactttggtgtgggtggtgagaaattgtaaacaaaaactgacattcatacccaaagaaccagcctctcaccccagggtccatgtcccaggccccactccagtgctgcccacactcccagctgctggaggagaggggagatgccaaggtgccctgcaggacctccctccgggccacaccctcagctgcctcttcaggaaccggagctcattactgccttccctcccagggaggccccttcagagaggagaggccacaggagctgcattgtggggggacaggctcaagcaattctgtccccatcaaggggtcagctggagagacccaagaccctatctgttcaccagggacccaaaatccaaggggatgcttccctctgccctctttcctgcccctccccatcatacctgcacccaccccagccagggctccctgtccagaattcggttctcctcaggacgccaactcccagagctaaggaccaaggagaagaacagcctctccacccccaagccaggcggttgaggaacatattgagaaaggttcagattgcagaaacccagccctgcccctgcctcctgcatccagcccccaacatggtgccaaagcttccagaagccaaaaagcttctgatttttaaggtagtgggcatctctctcctaatgacgaagctgctcagcaactccacctgcccgccgcaggaaggagcagtcccctgctatccctgcagccactcccagcacacccgcacacagccagcaccaccgcccccaccgtgcacttctcctctctgggccttggcttgggaccaggtacgaaggatccccaagcccttcaggcctgagatcagagccagatcagccttaagtcacctcccatccaagaacttggcctaaaaatactcccctatttctaaccctcaggacggatctgatattaaatgccttccctgggaggaagggtgctttccccctccctagaggtgcccattccataccctgggagactgaggagagcattggctgaagcccagttcctttcccatccatccccaactccaataatcccccactcctcgcaggtctcagtgtcatgctgtcttggggcagggtgaaagggtagtggcagcagggcgcccactctggagatcctcaaaaaaggccctcctctgtggctggcagcctctgacctttccctgggcttcaaaggaaggctatggagtttgctgtgggccctgcaaccttcccagccactcctgctgcactaaggacttaggatccttttatcacaaatcgggattctctcccccaccccgaattctgtctgcttaaactggaatacacaggagcccttcctggcctggatggtgtctcccagcttccccgcccagcttgcccaccccatagttggtgagatgccaagtttggtctgagttgtgaccccttcagagtagatgcccggcaggctggggttggcccctggagggtcaggggaccatcttcttattccctcttttctcattcctccaacttcctcccctccttcaattatttttttgtaaagttgatgccttactttttggataaatatttttgaagctggtatttctatttcttttggattttttttaatgtaaggttgttttgggggatggagttagaaccttaatgataatttctttcgtttggtgtaggttttagagatttgttttgtggagaggtttttttcttttgatgtaataaaatttaaaatggaaatg

SEQ ID NO: 173369 - DNA, 536 bp, Artificial Sequence
  derived and/or modified sequence
aagagaagcacgttagtgtgtggagaagccactctcccgaaaccagagggatggggccggctgtgcagtagaacggggatcgaaaagaggaaaacaagggcacgaagaccagcgagaaagaagaggacacctgggaaaggcggaagcagaagacggggaagggaaaagaaacccaaagcaggtggaaaccagatctagagcaacaccgtcagaaagggaggcagcttttgaggttgcaatcctactgagaaggatggaagaaggagccaggcaccgaaacaacaccgaaaagaaacacccaggtgggggcgagtcggacgccagccccgaggctggttccggagggggcggagtagccctgaagaaagagatcggattggtcagtgcctgtggtatcatcgtagggaacatcatcggctctggaatctttgtctcgccaaagggagtgctggagaatgctggttctgtgggccttgctctcatcgtctggattgtgacgggcttcatcacagttgtgggagccctctgctatgctg

SEQ ID NO: 173370 - DNA, 658 bp, Artificial Sequence
  derived and/or modified sequence
gaagccactctcccgaaaccagagggatggggccggctgtgcagtagaacggggatcgaaaagaggaaaacaagggcacgaagaccagcgagaaagaagaggacacctgggaaaggcggaagcagaagacggggaagggaaaagaaacccaaagcaggtggaaaccagatctagagcaacaccgtcaggttcacagtttgtttttctagaagagaagaaagtacctgaggattgctcttttttcctaccgttaatgaaaactacttttgtcttcatcataaaagaaaaaactaaggggagagagtagcagtggttcctatttcggaaaaggacgttctaattcaaagctctctcccaatatatttacacgaatacgcatttagaaagggaggcagcttttgaggttgcaatcctactgagaaggatggaagaaggagccaggcaccgaaacaacaccgaaaagaaacacccaggtgggggcgagtcggacgccagccccgaggctggttccggagggggcggagtagccctgaagaaagagatcggattggtcagtgcctgtggtatcatcgtagggaacatcatcggctctggaatctttgtctcgccaaagggagtgctggagaatgctggttctgtgggccttgctctcatcgtc

SEQ ID NO: 173371 - protein, 536 aa, Artificial Sequence
  derived and/or modified sequence
MALTSFLPAPTQLSQDQLEAEEKARSQRSRQTSLVSSRREPPPYGYRKGWIPRLLEDFGDGGAFPEIHVAQYPLDMGRKKKMSNALAIQVDSEGKIKYDAIARQGQSKDKVIYSKYTDLVPKEVMNADDPDLQRPDEEAIKEITEKTRVALEKSVSQKVAAAMPVRAADKLAPAQYIRYTPSQQGVAFNSGAKQRVIRMVEMQKDPMEPPRFKINKKIPRGPPSPPAPVMHSPSRKMTVKEQQEWKIPPCISNWKNAKGYTIPLDKRLAADGRGLQTVHINENFAKLAEALYIADRKAREAVEMRAQVERKMAQKEKEKHEEKLREMAQKARERRAGIKTHVEKEDGEARERDEIRHDRRKERQHDRNLSRAAPDKRSKLQRNENRDISEVIALGVPNPRTSNEVQYDQRLFNQSKGMDSGFAGGEDEIYNVYDQAWRGGKDMAQSIYRPSKNLDKDMYGDDLEARIKTNRFVPDKEFSGSDRRQRGREGPVQFEEDPFGLDKFLEEAKQHGGSKRPSDSSRPKEHEHEGKKRRKE

SEQ ID NO: 173372 - DNA, 2146 bp, Artificial Sequence
  derived and/or modified sequence
cgctcgcgctggaagaagcggaagaagatggcgctcaccagctttttacctgcacctactcagctatctcaggaccagcttgaggctgaagaaaaggcaagatcccagagatcacggcagacctcactggtctcctcccgaagagaacctcccccgtacggataccggaaaggctggatacctcggttattagaggattttggagatggaggtgcttttccagagatccatgtggcccagtatccactggatatgggacgaaagaaaaaaatgtcgaatgcgctggccattcaggtggattctgaaggaaaaattaaatatgatgcaattgctcgacaaggacagtcaaaagacaaggtcatttatagcaaatacactgacctggttccaaaggaggttatgaatgcagatgatccagacctgcaaaggcccgatgaagaagctattaaagagataacagaaaagacaagagtagccttagaaaaatctgtatcacagaaggtcgccgcagccatgccagttcgagcagctgacaaattggctcctgctcagtatatccgatacacaccatctcagcaaggagtggcattcaactctggagctaaacagagggttattcggatggtagaaatgcagaaagatccaatggagcctccaaggttcaagattaataagaaaattccccggggaccaccttctcctcctgcgcctgtcatgcattctcctagccgaaagatgactgtaaaggaacaacaagagtggaagattcctccttgtatttctaactggaaaaatgcaaagggttatacaattccattagacaaacgtctggctgctgatggaagaggactacagacagtacacataaatgaaaatttcgccaaattggcagaagccctctacattgctgatcggaaggctcgtgaagctgtggaaatgcgtgcccaagtagagagaaaaatggctcagaaagaaaaggaaaaacatgaagagaaacttagagaaatggcccagaaagccagggagagaagagctgggatcaaaactcatgtggaaaaagaggatggggaggcacgtgagagggatgaaatccggcatgacaggcgaaaagagagacagcatgaccggaatctttccagggcagctcctgataagaggtcgaaacttcagagaaatgaaaatcgggatatcagtgaagttattgctctcggtgttcctaatcctcggacttccaatgaagttcagtatgaccaaaggctcttcaaccaatccaagggtatggacagtggatttgcaggtggagaagatgaaatttataatgtttatgatcaagcctggagaggtggtaaagatatggcccagagtatttataggcccagtaaaaatctggacaaggacatgtatggtgatgacctagaagccagaataaagaccaacagatttgttcccgacaaggagttttctggttcagaccgtagacagagaggccgagaaggaccagtgcagtttgaggaagatccttttggtttggacaagtttttggaagaagccaaacagcatggtggctctaaaagaccctcagatagcagccgccccaaggaacacgagcatgaaggcaagaagaggaggaaggaataggcacaggtctctccaaagtgaatgaactcttacccataaccctaatgatgcaagtcatatgggggaacactttgtaaatggtcaggataaaaaccaaatctgggtgccagatcccagcactactttttattactggagaaatgggggggatagaaaattctactttgaattatttagttttttttaaagagtgggttgtgtttgtgcttctcccacctttcagcatttatagaacatgctgccccacatacaaagtcaagaccacttacttttatgtgacactagtagtttggggttaatgttttgtgtaagaacagctgcatatgagtaaagttaccccaaccacagtgaggaggaagatgttcacatactggaactgtcctgccaaataaattttgcccctattgtgctctgttttaatttggagtgggcaaagtaacctcttgcttggtgcaactatttgtttcaaataaaaacatttagacaaaaaaaaaaaaaaaaaaaaaaa

SEQ ID NO: 173373 - DNA, 1611 bp, Artificial Sequence
  derived and/or modified sequence
atggccctcaccagttttctgccagcacctacccagctgtcacaagatcagctcgaagcagaagagaaggcccggtcacaacgcagccgccagacctccttagtctcttctcgtcgcgaaccgcccccttacgggtacaggaagggctggattccccgcctgctcgaagactttggtgatgggggggcattccctgagattcatgtcgcacagtaccccctggacatgggaagaaagaagaagatgagcaacgccctggccattcaggtcgacagcgagggaaaaataaagtacgacgctatcgcgcgtcagggacagtctaaagataaggtaatctactccaagtacactgacctggtgcccaaggaggtcatgaatgctgatgaccctgacctacagcgccccgacgaagaggctatcaaggagatcacggagaagacccgggtggcgctggaaaagtcagtcagccaaaaagtggctgcagcgatgcccgtccgtgccgccgataaactggctccggcccagtacatccgctatactccaagtcagcagggtgtggcattcaattcaggcgcgaagcaacgtgtcatcagaatggtagagatgcaaaaggatcctatggagcctccccgctttaagattaataaaaaaattcccagaggacccccctcacctcccgcccccgttatgcactccccgagtcgaaaaatgacagttaaagagcagcaggaatggaagatccctccctgtatcagcaattggaagaatgctaaagggtatacaatccctctggacaagagattagcagccgatggccgcggcctacagacggtgcatattaacgagaacttcgccaagctcgcagaggctctctacattgcagatcggaaggccagggaggctgtagagatgagggcccaggttgagcgcaaaatggctcagaaggaaaaagagaagcacgaagagaagctgagggaaatggctcaaaaggcccgcgagaggcgagctgggattaagacccatgttgagaaagaggatggtgaggctcgggagcgcgacgagatacggcatgaccggcgcaaagagcgccagcacgaccgcaacctctcccgcgccgcacctgataaaaggagcaagttacagcgcaatgagaatcgggatatctccgaggtgattgcattgggcgtgcctaatcctcgaacgagtaatgaggtccagtacgatcaaagactgttcaatcaatccaagggcatggactcagggtttgctggaggggaagacgaaatttacaacgtgtatgatcaagcttggcggggagggaaagacatggcacagagcatctataggccctccaagaacctggataaggacatgtatggggacgatcttgaagccaggattaaaactaaccggttcgtaccggacaaagagttctctggtagtgacaggagacagcgggggcgcgaaggcccagttcagtttgaggaggacccatttggactggataagttcttggaggaggccaagcagcacggcggttccaagaggccgagtgattcttcccggccaaaagagcacgaacacgagggaaaaaagaggcggaaggagtag

SEQ ID NO: 173374 - DNA, 1611 bp, Artificial Sequence
  derived and/or modified sequence
atggccctgaccagcttcctgcctgcccccacccagctgagccaggaccagctggaggccgaggagaaggcccggagccagaggagccggcagaccagcctggtgagcagccggcgggagcccccaccctacggctacaggaagggctggatcccccggctgctggaggactttggagatggaggagccttccctgagatccacgtggcccagtaccccctggacatgggcaggaagaagaagatgagcaatgccctggccatccaggtggacagcgagggcaagatcaagtatgatgccatcgcccggcagggccagagcaaggacaaggtgatctacagcaagtacacagacctggtgcccaaggaggtgatgaatgctgatgatcctgacctgcagaggccagatgaggaggccatcaaggagatcacagagaagaccagggtggccctggagaagtctgtgtcccagaaggtggccgccgccatgcctgtgcgggctgctgacaagctggccccagcccagtacatccgctacacccccagccagcagggcgtggccttcaacagcggggccaagcagagggtcatccgcatggtggagatgcagaaggaccccatggagcccccacgcttcaagatcaacaagaagatcccccggggcccccccagccccccagcccctgtgatgcacagccccagcaggaagatgacagtgaaggagcagcaggagtggaagatccccccctgcatcagcaactggaagaatgccaagggctacaccatccccctggacaagaggctggccgcagatggccggggcctgcagacagtgcacatcaatgaaaattttgccaagctggccgaggccctgtacatcgctgacaggaaggcccgggaggccgtggagatgagggcccaggtggagaggaagatggcccagaaggagaaggagaagcatgaggagaagctgcgggagatggcccagaaggcccgggagcggcgggccggcatcaagacccacgtggagaaggaggatggagaggcccgggagagagatgagatcagacatgacaggaggaaggagcggcagcacgacaggaacctgagccgggccgccccagacaagaggagcaagctgcagagaaatgaaaatagagacatcagcgaggtgattgccctgggcgtgcccaaccccaggaccagcaatgaggtgcagtatgaccagaggctcttcaaccagagcaagggcatggacagcggctttgctggaggagaagatgagatctacaacgtgtatgaccaggcctggaggggcggcaaggacatggcccagagcatctaccggcccagcaagaacctggacaaggacatgtatggagatgacctggaggcccgcatcaagaccaacagatttgtgcctgacaaggagttcagcggcagtgaccggcggcagaggggccgggagggccctgtgcagtttgaggaggaccccttcggcctggacaagttcctggaggaggccaagcagcacggcggcagcaagaggcccagcgacagcagccggcccaaggagcacgagcacgagggcaagaagaggaggaaggagtag

SEQ ID NO: 173375 - DNA, 1611 bp, Artificial Sequence
  derived and/or modified sequence
atggccctgaccagcttcctgcccgcccccacccagctgagccaggaccagctggaggcagaagagaaggcgcgatcgcagagatctaggcagaccagtctagtgtcgtcacgccgtgagcctccaccatatggatacagaaagggttggattccgcggttactcgaggactttggtgacgggggagcctttccagagattcacgtcgctcaataccctctcgacatggggcgtaagaagaagatgagcaatgctctagcaattcaagttgactctgagggaaagataaagtatgacgccattgcccgccagggacaaagtaaggataaggtgatttacagcaaatataccgatttggttcccaaagaagtgatgaacgctgacgaccccgatctgcagcgccctgacgaggaggccatcaaggagattacggagaaaacaagggtagccctggagaaaagcgtgtcccagaaagtggctgccgctatgccagtcagagccgccgataagctcgcaccagcccagtacatacgctacactcctagccagcagggggtcgcatttaacagtggggccaaacaaagggtgattcgcatggtggaaatgcaaaaggaccctatggaacctccaagattcaagattaataagaagatccctcgggggccaccttcacctccggctccagtaatgcactctccctctcgtaaaatgaccgtaaaagagcaacaggaatggaagatccccccttgtatctccaactggaagaacgccaagggttataccatcccgcttgataagaggctggccgctgacggccggggccttcagaccgtgcacattaatgagaatttcgctaagctggcagaagctctgtatatcgcagaccgcaaagctcgtgaggctgtggaaatgcgggcacaggtggaaagaaaaatggcccaaaaggagaaggaaaaacatgaggaaaagctacgtgagatggctcagaaggctagagagcgcagggccggaatcaagactcatgtggagaaagaagatggagaagcccgtgagcgagacgagatacgacatgaccgcaggaaagagcgtcagcatgatcgcaatctgtcgcgcgccgctccagacaaaagatcaaaactgcagcgcaatgaaaaccgggacatcagtgaagtcattgcactcggcgtaccgaaccctcgcaccagcaacgaggtacagtacgatcaacgccttttcaatcagtctaagggcatggactcaggcttcgccggaggggaggacgagatctacaacgtttatgatcaggcatggcggggaggcaaggatatggcacagtctatctaccgaccctcaaagaatctggataaggacatgtacggcgatgacttggaagcgaggattaagaccaaccggttcgttcccgataaggagttctcagggtcagaccgacgacagagagggagggaaggtccagttcagttcgaagaggatccttttgggttagacaaatttctggaagaggccaaacagcatggtggctcaaagcgtccgtctgattcatctaggcccaaggaacacgagcatgaaggcaagaagcgacgtaaagaatag

SEQ ID NO: 173376 - DNA, 2163 bp, Artificial Sequence
  derived and/or modified sequence
cctcatcatctggaaagacccgcccagcggtgctgtcgctcgcgctggaagaagcggaagaagatggcgctcaccagctttttacctgcacctactcagctatctcaggaccagcttgaggctgaagaaaaggcaagatcccagagatcacggcagacctcactggtctcctcccgaagagaacctcccccgtacggataccggaaaggctggatacctcggttattagaggattttggagatggaggtgcttttccagagatccatgtggcccagtatccactggatatgggacgaaagaaaaaaatgtcgaatgcgctggccattcaggtggattctgaaggaaaaattaaatatgatgcaattgctcgacaaggacagtcaaaagacaaggtcatttatagcaaatacactgacctggttccaaaggaggttatgaatgcagatgatccagacctgcaaaggcccgatgaagaagctattaaagagataacagaaaagacaagagtagccttagaaaaatctgtatcacagaaggtcgccgcagccatgccagttcgagcagctgacaaattggctcctgctcagtatatccgatacacaccatctcagcaaggagtggcattcaactctggagctaaacagagggttattcggatggtagaaatgcagaaagatccaatggagcctccaaggttcaagattaataagaaaattccccggggaccaccttctcctcctgcgcctgtcatgcattctcctagccgaaagatgactgtaaaggaacaacaagagtggaagattcctccttgtatttctaactggaaaaatgcaaagggttatacaattccattagacaaacgtctggctgctgatggaagaggactacagacagtacacataaatgaaaatttcgccaaattggcagaagccctctacattgctgatcggaaggctcgtgaagctgtggaaatgcgtgcccaagtagagagaaaaatggctcagaaagaaaaggaaaaacatgaagagaaacttagagaaatggcccagaaagccagggagagaagagctgggatcaaaactcatgtggaaaaagaggatggggaggcacgtgagagggatgaaatccggcatgacaggcgaaaagagagacagcatgaccggaatctttccagggcagctcctgataagaggtcgaaacttcagagaaatgaaaatcgggatatcagtgaagttattgctctcggtgttcctaatcctcggacttccaatgaagttcagtatgaccaaaggctcttcaaccaatccaagggtatggacagtggatttgcaggtggagaagatgaaatttataatgtttatgatcaagcctggagaggtggtaaagatatggcccagagtatttataggcccagtaaaaatctggacaaggacatgtatggtgatgacctagaagccagaataaagaccaacagatttgttcccgacaaggagttttctggttcagaccgtagacagagaggccgagaaggaccagtgcagtttgaggaagatccttttggtttggacaagtttttggaagaagccaaacagcatggtggctctaaaagaccctcagatagcagccgccccaaggaacacgagcatgaaggcaagaagaggaggaaggaataggcacaggtctctccaaagtgaatgaactcttacccataaccctaatgatgcaagtcatatgggggaacactttgtaaatggtcaggataaaaaccaaatctgggtgccagatcccagcactactttttattactggagaaatgggggggatagaaaattctactttgaattatttagttttttttaaagagtgggttgtgtttgtgcttctcccacctttcagcatttatagaacatgctgccccacatacaaagtcaagaccacttacttttatgtgacactagtagtttggggttaatgttttgtgtaagaacagctgcatatgagtaaagttaccccaaccacagtgaggaggaagatgttcacatactggaactgtcctgccaaataaattttgcccctattgtgctctgttttaatttggagtgggcaaagtaacctcttgcttggtgcaactatttgtttcaaataaaaacatttagacaaaa

SEQ ID NO: 173377 - DNA, 1611 bp, Artificial Sequence
  derived and/or modified sequence
atggcactgacctcctttctgccggctcctacgcagctatcacaggaccagttggaagccgaggaaaaggcacggtctcagagatcaagacagacaagccttgtgtcgtccagacgtgaaccccctccctatggttataggaaaggatggattcctcggctcctggaagactttggagacggaggggcattccccgaaatccacgtggcacagtatccactggacatgggacgcaagaagaaaatgtctaacgcactcgctatccaggtggactcggagggcaaaatcaagtacgacgcaatcgcccgtcaggggcaatccaaagataaagttatttactcgaaatacacggacctagtccccaaggaagttatgaatgccgacgaccctgatctccagcgccctgacgaagaggctattaaggagataaccgagaagacgcgcgtcgccctggagaaatccgttagtcagaaagtcgcagctgcaatgcctgtgagggccgctgataaactggcgcctgcccagtacattcgatataccccaagccagcagggtgtggctttcaacagcggcgcaaaacaacgagtgattagaatggtggaaatgcagaaagaccccatggagcctcccagatttaagattaacaagaaaattccaagggggcctccttcccccccagctccagtgatgcactcgccttctcgaaaaatgaccgtgaaagagcaacaggaatggaaaatcccgccttgcataagcaattggaagaacgctaaaggctacaccatacctctggacaaaaggttggccgctgatggaagagggctgcagaccgtgcacatcaacgagaatttcgcgaagctggctgaagccctgtatatagccgacaggaaagctcgggaagctgtcgagatgagagcccaggtcgagaggaagatggcacaaaaggagaaggaaaagcatgaggagaaacttcgtgaaatggcacagaaggctcgcgagcgacgcgctgggatcaaaacacatgtggagaaggaggacggcgaggccagggaaagagacgagatcaggcacgatcgccgaaaagagcggcaacacgatcgcaaccttagcagggctgcacctgataagagaagtaagcttcagcgtaatgagaaccgcgatataagcgaggtgattgcactcggcgtgccgaacccaagaacgtccaacgaggtgcagtatgatcagcggctgtttaaccagtcaaaagggatggactcaggttttgccggaggtgaagatgagatctacaacgtgtacgaccaagcctggagggggggaaaggatatggctcagtccatttacaggcctagcaaaaacctggacaaggacatgtatggagatgatcttgaggccagaatcaaaaccaaccggttcgtgcccgacaaagagttctctggcagcgatcgcagacaacggggacgcgaaggcccagtccagtttgaggaagaccctttcggactggataagttcttggaagaggccaaacagcatgggggtagtaaacgcccatccgactcatcacgcccaaaagagcacgaacacgaggggaaaaagcgcaggaaggagtag

SEQ ID NO: 173378 - DNA, 1611 bp, Artificial Sequence
  derived and/or modified sequence
atggccctgaccagcttcctgcccgcccccacccagctgagccaggaccagctggaggccgaggagaaggccagaagccagagaagcagacagaccagcctggtgagcagcagaagagagccccccccctacggctacagaaagggctggatccccagactgctggaggacttcggcgacggcggcgccttccccgagatccacgtggcccagtaccccctggacatgggcagaaagaagaagatgagcaacgccctggccatccaggtggacagcgagggcaagatcaagtacgacgccatcgccagacagggccagagcaaggacaaggtgatctacagcaagtacaccgacctggtgcccaaggaggtgatgaacgccgacgaccccgacctgcagagacccgacgaggaggccatcaaggagatcaccgagaagaccagagtggccctggagaagagcgtgagccagaaggtggccgccgccatgcccgtgagagccgccgacaagctggcccccgcccagtacatcagatacacccccagccagcagggcgtggccttcaacagcggcgccaagcagagagtgatcagaatggtggagatgcagaaggaccccatggagccccccagattcaagatcaacaagaagatccccagaggcccccccagcccccccgcccccgtgatgcacagccccagcagaaagatgaccgtgaaggagcagcaggagtggaagatccccccctgcatcagcaactggaagaacgccaagggctacaccatccccctggacaagagactggccgccgacggcagaggcctgcagaccgtgcacatcaacgagaacttcgccaagctggccgaggccctgtacatcgccgacagaaaggccagagaggccgtggagatgagagcccaggtggagagaaagatggcccagaaggagaaggagaagcacgaggagaagctgagagagatggcccagaaggccagagagagaagagccggcatcaagacccacgtggagaaggaggacggcgaggccagagagagagacgagatcagacacgacagaagaaaggagagacagcacgacagaaacctgagcagagccgcccccgacaagagaagcaagctgcagagaaacgagaacagagacatcagcgaggtgatcgccctgggcgtgcccaaccccagaaccagcaacgaggtgcagtacgaccagagactgttcaaccagagcaagggcatggacagcggcttcgccggcggcgaggacgagatctacaacgtgtacgaccaggcctggagaggcggcaaggacatggcccagagcatctacagacccagcaagaacctggacaaggacatgtacggcgacgacctggaggccagaatcaagaccaacagattcgtgcccgacaaggagttcagcggcagcgacagaagacagagaggcagagagggccccgtgcagttcgaggaggaccccttcggcctggacaagttcctggaggaggccaagcagcacggcggcagcaagagacccagcgacagcagcagacccaaggagcacgagcacgagggcaagaagagaagaaaggagtag

SEQ ID NO: 173379 - protein, 392 aa, Artificial Sequence
  derived and/or modified sequence
MSTRESFNPESYELDKSFRLTRFTELKGTGCKVPQDVLQKLLESLQENHFQEDEQFLGAVMPRLGIGMDTCVIPLRHGGLSLVQTTDYIYPIVDDPYMMGRIACANVLSDLYAMGVTECDNMLMLLGVSNKMTDRERDKVMPLIIQGFKDAAEEAGTSVTGGQTVLNPWIVLGGVATTVCQPNEFIMPDNAVPGDVLVLTKPLGTQVAVAVHQWLDIPEKWNKIKLVVTQEDVELAYQEAMMNMARLNRTAAGLMHTFNAHAATDITGFGILGHAQNLAKQQRNEVSFVIHNLPVLAKMAAVSKACGNMFGLMHGTCPETSGGLLICLPREQAARFCAEIKSPKYGEGHQAWIIGIVEKGNRTARIIDKPRIIEVAPQVATQNVNPTPGATS

SEQ ID NO: 173380 - protein, 166 aa, Artificial Sequence
  derived and/or modified sequence
MSTRESFNPESYELDKSFRLTRFTELKGTGCKVPQDVLQKLLESLQENHFQEDEQFLGAVMPRLGIGMDTCVIPLRHGGLSLVQTTDYIYPIVDDPYMMGRIACANVLSDLYAMGVTECDNMLMLLGVSNKMTDRERDKVMPLIIQGFKDAAEEAGTSVTGGQTVL

SEQ ID NO: 173381 - protein, 92 aa, Artificial Sequence
  derived and/or modified sequence
MDTCVIPLRHGGLSLVQTTDYIYPIVDDPYMMGRIACANVLSDLYAMGVTECDNMLMLLGVSNKMTDRERDKVMPLIIQGFKDAAEEAGTSV

SEQ ID NO: 173382 - protein, 325 aa, Artificial Sequence
  derived and/or modified sequence
MDTCVIPLRHGGLSLVQTTDYIYPIVDDPYMMGRIACANVLSDLYAMGVTECDNMLMLLGVSNKMTDRERDKVMPLIIQGFKDAAEEAGTSVTGGQTVLNPWIVLGGVATTVCQPNEFIMPDNAVPGDVLVLTKPLGTQVAVAVHQWLDIPEKWNKIKLVVTQEDVELAYQEAMMNMARLNRTAAGLMHTFNAHAATDITGFGILGHAQNLAKQQRNEVSFVIHNLPVLAKMAAVSKACGNMFGLMHGTCPETSGGLLICLPREQAARFCAEIKSPKYGEGHQAWIIGIVEKGNRTARIIDKPRIIEVAPQVATQNVNPTPGATS

SEQ ID NO: 173383 - protein, 324 aa, Artificial Sequence
  derived and/or modified sequence
MSTRESFNPESYELDKSFRLTRFTELKGTGCKVPQDVLQKLLESLQENHFQEDEQFLGAVMPRLGIGMDTCVIPLRHGGLSLVQTTDYIYPIVDDPYMMGRIACANVLSDLYAMGVTECDNMLMLLGVSNKMTDRERDKVMPLIIQGFKDAAEEAGTSVTGGQTVLNPWIVLGGVATTVCQPNEFIMPDNAVPGDVLVLTKPLGTQVAVAVHQWLDIPEKWNKIKLVVTQEDVELAYQEAMMNMARLNRTAAGLMHTFNAHAATDITGFGILGHAQNLAKQQRNEVSFVIHNLPVLAKMAAVSKACGNMFGLMHGTCPETSDVQ

SEQ ID NO: 173384 - DNA, 1179 bp, Artificial Sequence
  derived and/or modified sequence
atgtccacccgagagagctttaatcctgagagctacgaactcgacaaatcatttcggctgaccaggtttacggaactgaagggcaccggctgcaaagtcccccaggatgtgttgcagaagcttttggagtctttgcaggagaatcactttcaggaggatgagcaatttctgggagcagtgatgccacggctcggtatcggtatggatacatgtgtgattccactccggcatgggggactctcgctggtgcaaaccacagactacatatacccgatcgtggatgacccttatatgatgggtaggattgcttgcgccaatgtcttatccgacctttatgctatgggagtcacggagtgtgataatatgcttatgttactcggagtgagcaacaagatgactgaccgtgaaagagacaaagtgatgccactcatcatccagggcttcaaggacgccgcagaagaggccggaacgtcagtgactggaggacaaaccgtgctgaatccttggatcgtactgggaggagttgcgacaacggtctgtcagcccaatgaattcatcatgccagataacgcagttcctggcgatgtcctggtcctgaccaagcctctgggcactcaggtggcggtggctgtccaccagtggttggacataccagagaagtggaacaaaataaagttggttgtgactcaagaagacgtggaactggcttatcaggaggctatgatgaacatggctcgcctgaatagaacagccgctggcctcatgcacacctttaacgcgcatgcagccacagacatcaccgggttcggaatcctcggccacgctcaaaatcttgcgaaacagcagcgcaacgaggtctctttcgtaattcacaacctgcctgtacttgccaaaatggccgcagtaagcaaggcttgcggcaatatgtttggccttatgcatggaacatgtccagaaacatccggaggattactcatttgccttcccagagagcaggccgcccggttctgtgccgagattaagtcccccaaatatggagagggccatcaggcttggatcattgggattgtagagaagggcaataggacagcgcggattatcgataagcctaggattatagaggtagccccccaggttgcaacacaaaatgttaatccaacacctggagccactagctag

SEQ ID NO: 173385 - DNA, 975 bp, Artificial Sequence
  derived and/or modified sequence
atgagcacccgtgagtcgttcaatcccgaaagttatgagcttgataaatctttcaggctgacacgtttcaccgagctcaagggaaccggctgcaaggttcctcaggacgtgttgcaaaagttgttagaatctttgcaagagaatcactttcaagaggacgaacaatttctgggggcagtaatgccacgacttggcattggtatggacacttgtgtgatccccctccggcacgggggccttagcctagtgcagacaacggattacatctaccctattgtggacgatccttatatgatggggcgaattgcctgtgcaaatgtgctgagcgatctctatgccatgggggtcactgagtgcgacaacatgctcatgctgctgggcgtgtccaacaaaatgacggacagagagagggacaaagtgatgcctttgatcatccagggctttaaggacgctgcagaggaggcgggaacctccgttaccggcgggcagacagttctgaacccttggatcgtgctgggcggcgttgccaccactgtctgtcagccgaacgaatttatcatgccggataatgccgtaccgggcgacgtgcttgttctgacaaagcccctcggtacgcaggtggccgtggctgtccaccagtggctcgacatcccagagaaatggaacaagattaaactggtggtcacccaggaggatgttgaactcgcctaccaggaggcgatgatgaacatggcgaggcttaaccgaacggcagccggcctgatgcatacttttaatgcccatgcagctacagatatcaccgggttcggcatactcgggcatgcccaaaacctcgccaagcaacagcgcaatgaggtctctttcgtcattcataaccttcctgtcctggctaagatggccgccgtaagcaaggcctgtggcaatatgttcgggcttatgcacggcacttgccccgaaaccagtgatgtgcagtag

SEQ ID NO: 173386 - DNA, 1179 bp, Artificial Sequence
  derived and/or modified sequence
atgagcacccgggagagcttcaaccctgagagctatgagctggacaagagcttccggctgacccgcttcacagagctgaagggcaccggctgcaaggtgccccaggatgtgctgcagaagctgctggagagcctgcaggagaaccacttccaggaggatgagcagttcctgggcgctgtgatgccccggctgggcatcggcatggacacctgtgtgatccccctgcggcatggaggcctgagcctggtgcagaccacagactacatctaccccatcgtggatgacccctacatgatgggccgcatcgcctgtgccaacgtgctgagtgacctgtatgccatgggcgtgacagaatgtgacaacatgctgatgctgctgggcgtgagcaacaagatgacagaccgggagcgggacaaggtgatgcccctcatcatccagggcttcaaggatgctgctgaggaggccggcacctctgtgactggaggccagacagtgctgaacccctggatcgtgctgggcggcgtggccaccaccgtgtgccagcccaatgagttcatcatgccagacaatgctgtgcctggagatgtgctggtgctgaccaagcccctgggcacccaggtggccgtggccgtgcaccagtggctggacatccctgagaagtggaacaagatcaagctggtggtgacccaggaggatgtggagctggcctaccaggaggccatgatgaacatggcccggctgaacagaacagctgctggcctgatgcacaccttcaatgcccacgccgccacagacatcactggatttggcatcctgggccacgcccagaacctggccaagcagcagagaaatgaggtgtcctttgtgatccacaacctgcctgtgctggccaagatggctgctgtgtccaaggcctgtggcaacatgtttggcctgatgcacggcacctgcccagagaccagcggcggcctgctgatctgcctgccccgggagcaggccgcccgcttctgtgccgagatcaagagccccaagtatggagagggccaccaggcctggatcatcggcatcgtggagaagggcaacagaacagcccgcatcatcgacaagccccgcatcatcgaggtggccccccaggtggccacccagaatgtgaaccccacccctggggccaccagctag

SEQ ID NO: 173387 - DNA, 975 bp, Artificial Sequence
  derived and/or modified sequence
atgagcacccgggagagcttcaaccctgagagctatgagctggacaagagcttccggctgacccgcttcacagagctgaagggcaccggctgcaaggtgccccaggatgtgctgcagaagctgctggagagcctgcaggagaaccacttccaggaggatgagcagttcctgggcgctgtgatgccccggctgggcatcggcatggacacctgtgtgatccccctgcggcatggaggcctgagcctggtgcagaccacagactacatctaccccatcgtggatgacccctacatgatgggccgcatcgcctgtgccaacgtgctgagtgacctgtatgccatgggcgtgacagaatgtgacaacatgctgatgctgctgggcgtgagcaacaagatgacagaccgggagcgggacaaggtgatgcccctcatcatccagggcttcaaggatgctgctgaggaggccggcacctctgtgactggaggccagacagtgctgaacccctggatcgtgctgggcggcgtggccaccaccgtgtgccagcccaatgagttcatcatgccagacaatgctgtgcctggagatgtgctggtgctgaccaagcccctgggcacccaggtggccgtggccgtgcaccagtggctggacatccctgagaagtggaacaagatcaagctggtggtgacccaggaggatgtggagctggcctaccaggaggccatgatgaacatggcccggctgaacagaacagctgctggcctgatgcacaccttcaatgcccacgccgccacagacatcactggatttggcatcctgggccacgcccagaacctggccaagcagcagagaaatgaggtgtcctttgtgatccacaacctgcctgtgctggccaagatggctgctgtgtccaaggcctgtggcaacatgtttggcctgatgcacggcacctgcccagagaccagtgatgtgcagtag

SEQ ID NO: 173388 - DNA, 1179 bp, Artificial Sequence
  derived and/or modified sequence
atgagcacccgggagagcttcaaccccgagagctacgagctggacaagtctttcagactgaccagattcactgaactgaagggaaccggatgcaaggtgccccaagacgtgttgcagaaacttctggaatcactccaggagaaccatttccaggaggacgaacaattccttggcgccgttatgcctagacttgggatcggaatggacacatgtgtgatacctctgcggcatggagggcttagcttggtccagactactgactacatctatccaatagtggatgatccctacatgatggggaggattgcgtgtgcaaacgtcttgagtgatctgtatgccatgggggtgactgagtgtgacaatatgctgatgctgcttggcgtctctaacaagatgacggatagagaacgggataaggtcatgcccctgatcatacagggctttaaagacgccgccgaagaggctggaacctccgttaccgggggacagactgtcttgaacccctggatcgtcttgggcggagtggctactaccgtgtgccagccaaacgaatttatcatgcctgacaacgctgtgccaggcgacgtgctggtgctcaccaaacctttgggtacccaggtggccgtagccgttcaccaatggcttgacattcccgaaaagtggaacaaaattaagctggttgtaacccaagaggacgttgaactggcctatcaagaggccatgatgaacatggcccgactgaaccgaacagctgcggggcttatgcacacattcaatgcacacgctgccactgacatcaccggcttcggtatactgggccacgcacagaacctggccaaacagcagcgaaatgaggtaagctttgtaattcacaatctcccagtgctcgctaagatggctgcagtaagtaaggcatgcggtaacatgttcggcttaatgcatgggacttgccctgaaaccagtggaggtctgcttatctgtcttcctagagaacaagctgctaggttctgcgctgagatcaagagccctaaatatggcgaaggccatcaggcctggatcatcggcatcgtcgagaaaggtaatcgaacggccaggatcatagataaacctcgtattatagaggtagcgccccaggtcgctacccagaatgttaatcccacaccgggtgccaccagctag

SEQ ID NO: 173389 - DNA, 975 bp, Artificial Sequence
  derived and/or modified sequence
atgagcacccgggagagcttcaaccccgagagctacgagctggacaagagttttcggctgacacgcttcacggagctgaaaggcactggttgcaaagtgccacaggacgtactccagaagctcctggagtcactacaagaaaaccacttccaggaggatgaacagttcctgggcgcggtgatgcccagattagggatcgggatggatacgtgcgtcataccactgagacatggcggactcagccttgtgcaaacaacagactatatctaccctattgtggatgacccctacatgatggggcgaatcgcttgcgccaatgtgctgtcggacctgtatgccatgggggttaccgagtgtgataatatgctgatgctgctgggcgtgtcaaacaagatgaccgatcgcgaacgcgataaggtaatgcctttaattatacagggcttcaaggacgcagccgaggaggctgggacgagtgttactggagggcagacggtgcttaatccttggatcgtcctgggaggagtggccacaaccgtgtgtcagcctaatgaattcatcatgcctgacaacgcagtgcctggggatgtactggtgctgacaaagcctctcgggacacaggtggctgtggcggttcatcagtggttagacatacccgaaaaatggaataaaatcaagctggttgttacgcaagaagatgttgagctcgcatatcaggaagcaatgatgaacatggcccgcctgaatagaactgctgctgggctaatgcacaccttcaacgcccatgcagccacagatatcaccggattcggaatactgggacacgcccagaatctagccaagcagcaaagaaacgaagtttcattcgtgattcataatctccccgtccttgcgaaaatggccgcagtttcaaaggcttgcggtaacatgttcggattgatgcacggaacctgcccggagacgtccgacgtccaatag

SEQ ID NO: 173390 - DNA, 1179 bp, Artificial Sequence
  derived and/or modified sequence
atgtccaccagagagagtttcaaccccgagtcttacgaactcgataagagcttcagactgaccaggtttaccgagctgaaaggcactggctgtaaggtccctcaagacgttctgcagaaactgctagagtcattgcaggaaaatcatttccaggaagacgaacagtttctgggggctgttatgccaaggctgggaataggcatggatacatgcgtcataccactgcgccatgggggactgtctctagttcaaacaactgattacatttaccctatagttgacgacccctacatgatgggccgtattgcctgtgctaatgtcctgagcgacctttacgccatgggcgtgacagagtgcgataacatgctgatgctgcttggcgtgtccaacaagatgacggatcgggagcgtgacaaggtgatgccacttattatccagggatttaaagacgccgcagaagaagccggaacctctgtgactggaggccagaccgtcttaaacccctggattgtgctcggaggggtggccaccactgtatgtcagcccaacgaatttatcatgcctgataatgcagtgcccggtgatgttttggtcctgacgaagccgctcggcacccaggtcgctgtggccgtgcaccagtggttggacatcccggaaaaatggaataagattaaactggtcgtgactcaggaggacgtggagctcgcttatcaggaggccatgatgaacatggcaagactgaaccgcacggccgctgggctcatgcacaccttcaatgcccatgccgcaactgatattaccggttttggtatactcgggcacgcgcaaaatctggctaaacaacagagaaatgaagtgtcattcgttattcacaacctgcctgtgcttgccaaaatggcagccgtatctaaggcctgcgggaatatgtttggtttgatgcacgggacttgcccagaaacaagcgggggactgttgatttgcctcccgagagagcaggccgcaagattttgtgccgaaatcaagagccccaaatacggagagggccatcaagcatggatcatcggcattgttgaaaaaggcaaccggacagcacgcatcattgataagccacggattattgaagtggctccccaggtcgctactcagaatgtaaacccaaccccgggtgccacatcgtag

SEQ ID NO: 173391 - DNA, 975 bp, Artificial Sequence
  derived and/or modified sequence
atgagcactagagagtccttcaaccctgagagctacgagttggacaagagtttccgacttacaagatttacagaactgaaaggtactggttgtaaagtcccccaagatgtgctccagaaactcctcgagtctctgcaggaaaaccacttccaagaggacgaacagtttctgggcgctgtgatgcccagacttgggattggcatggacacatgtgttatacccctccgacacggcggtctttccttggtgcagacaacagactatatttatccgatagtggacgacccatacatgatggggcgtattgcatgcgcaaacgttctctctgacctgtacgccatgggagtgacggagtgcgataacatgcttatgctgctgggggtttccaacaaaatgaccgacagggaacgtgacaaagtcatgcctctgataatccagggatttaaagatgctgccgaagaggccggtacgtcagtgactggcggtcagacagtactgaatccttggatcgtgctcggcggagtagccacaacagtgtgccagcccaatgagttcataatgcccgacaatgccgtgccgggagatgtcctggttctcacgaaacctctgggaactcaggtcgcagtggccgtgcaccaatggctggatatcccagagaaatggaataaaatcaaactggtggttacccaggaagatgtcgaactggcctaccaagaggcaatgatgaatatggcacgacttaacagaactgctgctgggctgatgcatacttttaacgctcatgccgctacagatataactggcttcggtattctagggcatgcccaaaacctcgccaaacagcagcgtaacgaagtgtcttttgtcatccataacctacccgtgctcgccaaaatggcggcagttagcaaggcctgcggcaatatgtttgggcttatgcacggtacttgccctgaaacaagcgatgtgcaatag

SEQ ID NO: 173392 - DNA, 3273 bp, Artificial Sequence
  derived and/or modified sequence
ggccgcacgccgccacccagcagccagggccgcctcttaaagggaggtggccggccttaaaggacccccgcgcgcccagccggcgggagcgcggcggcccggctcccgcagggccgcgccgaggcaggcgagcccccgcggcgcccaggcgcgggcccgggcccccgccgccgccgccgccgccgggcgcggcatttttattcaggcgacgcttaagggagcccggccgcgcccggtgcattgtgggagcggcccgcggcccgttttcgggaggaggcggagggcgcaaagcgagccggtggatccataaagaacccagccaacccgcagagggaggggaggggctgagctgtgaggagagcggggcccaagaaccatgtctacgcgggagtcctttaacccggaaagttacgaattggacaaaagcttccggctaaccagattcactgaactgaagggcacaggctgcaaagtgccccaagatgtcctgcaaaaattgctggaatctttacaggagaaccacttccaagaagatgagcagtttctgggagccgttatgccaaggcttggcattggaatggatacttgtgtcattcctttgaggcacggtgggctttccttggttcaaaccacagattacatttacccgatcgtagacgacccttacatgatgggcaggatagcgtgtgccaatgtcctcagtgacctctatgcaatgggggtcacggaatgtgacaatatgctgatgctccttggagtcagtaataaaatgaccgacagggaaagggataaagtgatgcctctgattatccaaggttttaaagacgcagctgaggaagcaggaacatctgtaacaggcggccaaacagtactaaacccctggattgtcctgggaggagtggctaccactgtctgccaacccaatgaatttatcatgccagacaatgcagtgccaggggacgtgctggtgctgacaaaacccctggggacacaggtggcagtggctgtgcaccagtggctggatatccctgagaaatggaataagattaaactagtggtcacccaagaagatgtagagctggcctaccaggaggcgatgatgaacatggcgaggctcaacaggacagctgcaggactcatgcacacgttcaatgcccacgccgccactgacatcacgggcttcgggattttgggccatgcgcagaacctggccaagcagcagaggaacgaggtgtcgtttgtaattcacaacctcccggtgctggccaagatggctgcggtgagcaaggcctgcggaaacatgttcggcctcatgcacgggacctgcccggagacttcaggcggccttctgatctgtttaccacgtgagcaagcagctcggttctgtgcagagataaagtcccccaaatatggtgaaggccaccaagcatggattattgggattgtagagaagggcaaccgcacagccagaatcatagacaaaccccggatcatcgaggtcgcaccacaagtggccactcaaaatgtgaatcccacacccggggccacctcttaatctagacagaaatagctgtttggttttgtttttaaatagatctatttcccttatcacttcaattaaagactataaacaacaaaaatctcattgtgtctacacatcggggtgaccttaggtcggtttgtaagtggatacaattaataaaataaaatccattgcctttttttcctgttacattaactgaagatgcacctaatcttgaggcagcttctgagttgagaattatattgttatccaatactgttgattcattttgaatctttagacacttatctcttgccgcataggctttttaaaggtgctttcacatagcacaggcattacccgtagtcgtgtcaaatagcagttggtgtcttcattttatgtatatttatcatataagtctgatttttttttttaagcgtcttgaatggttttctggagagacagcattggtaagtggcacatgacggtatcccagtcataagagggttgcatgattcctttgagtgtttgatttgaaaagcctagtcttgtctctcaagagcatctcggacccagaacattctccagtagtgcattcagttcaacacagcaagtgcttcattgcatggaaaacactttgaagacaaaaaagaaatcttatttctttttttgtagccttcctgatatttacagtaataccattaactgttttatcgatagcaaaaaaggatactttttgcaatgttattagatgttctatagtgctacaaggaattgccttccgaatggaggttcatgtataatactcatttacaattcaatatataattacacaaataatttttaaatataatcaatagtaaagactgttctgtggatggtagtgtttaatacattttctattttgtacagtgatttcaggccttttgttttcttaaaatcagcagctgtttggcctaattcttagcattattttgtcctttgcgccagtacttttttgtgcacgctttttgtgatctgtgttaaaaacctgcattgccaacattgcagctcgaacttaaacttgttattcaaataaatatttaattttttaaattgctcttgtataatcagatgccccttttagtattattttagaagcgttgggagggttttgcctaaagtacaatttatcgggaaaaactagattttagttttataaaacttttaagtctttcatgggacctatattttcttgaattaaattttgtagttctagaataaataggcaatctaaaaaggtgttctctgtgttatgtaaagtggaggcttccttatattttaacctactaagcaatgaggagggattcctgtcattaagcacaagggcgctggatcctcaagtgcccatcttcgtgagagaaaaagcagcacatcctgcccatttctggtgctttctgctcacaggcaccaaagctgcacatgtaaactgacttcttgccaaaggaaatgacccctgggaagttcaagctcctggaagaggctttaactcggacgcgccctcctccaggaaccagtgggcagggcagccttcatgcatgtgtaactggacctccagccataagcatggtgtgcagtatggaagagcctgctacggaactgaaagtgattggacattttataggaattgatagagatgttggtcctcaaaagctacaaaccagtggtctgcaaaataaagtgtgttggaaacctctagtgagataaaccta

SEQ ID NO: 173393 - DNA, 1569 bp, Artificial Sequence
  derived and/or modified sequence
cgggaggaggcggagggcgcaaagcgagccggcattggaatggatacttgtgtcattcctttgaggcacggtgggctttccttggttcaaaccacagattacatttacccgatcgtagacgacccttacatgatgggcaggatagcgtgtgccaatgtcctcagtgacctctatgcaatgggggtcacggaatgtgacaatatgctgatgctccttggagtcagtaataaaatgaccgacagggaaagggataaagtgatgcctctgattatccaaggttttaaagacgcagctgaggaagcaggaacatctgtaacaggcggccaaacagtactaaacccctggattgtcctgggaggagtggctaccactgtctgccaacccaatgaatttatcatgccagacaatgcagtgccaggggacgtgctggtgctgacaaaacccctggggacacaggtggcagtggctgtgcaccagtggctggatatccctgagaaatggaataagattaaactagtggtcacccaagaagatgtagagctggcctaccaggaggcgatgatgaacatggcgaggctcaacaggacagctgcaggactcatgcacacgttcaatgcccacgccgccactgacatcacgggcttcgggattttgggccatgcgcagaacctggccaagcagcagaggaacgaggtgtcgtttgtaattcacaacctcccggtgctggccaagatggctgcggtgagcaaggcctgcggaaacatgttcggcctcatgcacgggacctgcccggagacttcaggcggccttctgatctgtttaccacgtgagcaagcagctcggttctgtgcagagataaagtcccccaaatatggtgaaggccaccaagcatggattattgggattgtagagaagggcaaccgcacagccagaatcatagacaaaccccggatcatcgaggtcgcaccacaagtggccactcaaaatgtgaatcccacacccggggccacctcttaatctagacagaaatagctgtttggttttgtttttaaatagatctatttcccttatcacttcaattaaagactataaacaacaaaaatctcattgtgtctacacatcggggtgaccttaggtcggtttgtaagtggatacaattaataaaataaaatccattgcctttttttcctgttacattaactgaagatgcacctaatcttgaggcagcttctgagttgagaattatattgttatccaatactgttgattcattttgaatctttagacacttatctcttgccgcataggctttttaaaggtgctttcacatagcacaggcattacccgtagtcgtgtcaaatagcagttggtgtcttcattttatgtatatttatcatataagtctgatttttttttttaagcgtcttgaatggttttctggagagacagcattggtaagtggcacatgacggtatcccagtcataagagggttgcatgattcctttgagtgtttgatttgaaaagcctagtcttgtctctcaagagcatctcggacccagaacattctc

SEQ ID NO: 173394 - DNA, 2689 bp, Artificial Sequence
  derived and/or modified sequence
cagcagccagggccgcctcttaaagggaggtggccggccttaaaggacccccgcgcgcccagccggcgggagcgcggcggcccggctcccgcagggccgcgccgaggcaggcgagcccccgcggcgcccaggcgcgggcccgggcccccgccgccgccgccgccgccgggcgcggcatttttattcaggcgacgcttaagggagcccggccgcgcccggtgcattgtgggagcggcccgcggcccgttttcgggaggaggcggagggcgcaaagcgagccggtggatccataaagaacccagccaacccgcagagggaggggaggggctgagctgtgaggagagcggggcccaagaaccatgtctacgcgggagtcctttaacccggaaagttacgaattggacaaaagcttccggctaaccagattcactgaactgaagggcacaggctgcaaagtgccccaagatgtcctgcaaaaattgctggaatctttacaggagaaccacttccaagaagatgagcagtttctgggagccgttatgccaaggcttggcattggaatggatacttgtgtcattcctttgaggcacggtgggctttccttggttcaaaccacagattacatttacccgatcgtagacgacccttacatgatgggcaggatagcgtgtgccaatgtcctcagtgacctctatgcaatgggggtcacggaatgtgacaatatgctgatgctccttggagtcagtaataaaatgaccgacagggaaagggataaagtgatgcctctgattatccaaggttttaaagacgcagctgaggaagcaggaacatctgtaacaggcggccaaacagtactaaacccctggattgtcctgggaggagtggctaccactgtctgccaacccaatgaatttatcatgccagacaatgcagtgccaggggacgtgctggtgctgacaaaacccctggggacacaggtggcagtggctgtgcaccagtggctggatatccctgagaaatggaataagattaaactagtggtcacccaagaagatgtagagctggcctaccaggaggcgatgatgaacatggcgaggctcaacaggacagctgcaggactcatgcacacgttcaatgcccacgccgccactgacatcacgggcttcgggattttgggccatgcgcagaacctggccaagcagcagaggaacgaggtgtcgtttgtaattcacaacctcccggtgctggccaagatggctgcggtgagcaaggcctgcggaaacatgttcggcctcatgcacgggacctgcccggagacttcagatgtgcagtaatttattagaggaaacataaatggaggataaacgggagatggagcaagcgtaggtagagagagccatcagacagcagtgcaggcggccttctgatctgtttaccacgtgagcaagcagctcggttctgtgcagagataaagtcccccaaatatggtgaaggccaccaagcatggattattgggattgtagagaagggcaaccgcacagccagaatcatagacaaaccccggatcatcgaggtcgcaccacaagtggccactcaaaatgtgaatcccacacccggggccacctcttaatctagacagaaatagctgtttggttttgtttttaaatagatctatttcccttatcacttcaattaaagactataaacaacaaaaatctcattgtgtctacacatcggggtgaccttaggtcggtttgtaagtggatacaattaataaaataaaatccattgcctttttttcctgttacattaactgaagatgcacctaatcttgaggcagcttctgagttgagaattatattgttatccaatactgttgattcattttgaatctttagacacttatctcttgccgcataggctttttaaaggtgctttcacatagcacaggcattacccgtagtcgtgtcaaatagcagttggtgtcttcattttatgtatatttatcatataagtctgatttttttttttaagcgtcttgaatggttttctggagagacagcattggtaagtggcacatgacggtatcccagtcataagagggttgcatgattcctttgagtgtttgatttgaaaagcctagtcttgtctctcaagagcatctcggacccagaacattctccagtagtgcattcagttcaacacagcaagtgcttcattgcatggaaaacactttgaagacaaaaaagaaatcttatttctttttttgtagccttcctgatatttacagtaataccattaactgttttatcgatagcaaaaaaggatactttttgcaatgttattagatgttctatagtgctacaaggaattgccttccgaatggaggttcatgtataatactcatttacaattcaatatataattacacaaataatttttaaatataatcaatagtaaagactgttctgtggatggtagtgtttaatacattttctattttgtacagtgatttcaggccttttgttttcttaaaatcagcagctgtttggcctaattcttagcattattttgtcctttgcgccagtacttttttgtgcacgctttttgtgatctgtgttaaaaacctgcattgccaacattgcagctcgaacttaaacttgttattcaaataaatatttaatttttt

SEQ ID NO: 173395 - DNA, 1179 bp, Artificial Sequence
  derived and/or modified sequence
atgagcaccagagagagcttcaaccccgagagctacgagctggacaagagcttcagactgaccagattcaccgagctgaagggcaccggctgcaaggtgccccaggacgtgctgcagaagctgctggagagcctgcaggagaaccacttccaggaggacgagcagttcctgggcgccgtgatgcccagactgggcatcggcatggacacctgcgtgatccccctgagacacggcggcctgagcctggtgcagaccaccgactacatctaccccatcgtggacgacccctacatgatgggcagaatcgcctgcgccaacgtgctgagcgacctgtacgccatgggcgtgaccgagtgcgacaacatgctgatgctgctgggcgtgagcaacaagatgaccgacagagagagagacaaggtgatgcccctgatcatccagggcttcaaggacgccgccgaggaggccggcaccagcgtgaccggcggccagaccgtgctgaacccctggatcgtgctgggcggcgtggccaccaccgtgtgccagcccaacgagttcatcatgcccgacaacgccgtgcccggcgacgtgctggtgctgaccaagcccctgggcacccaggtggccgtggccgtgcaccagtggctggacatccccgagaagtggaacaagatcaagctggtggtgacccaggaggacgtggagctggcctaccaggaggccatgatgaacatggccagactgaacagaaccgccgccggcctgatgcacaccttcaacgcccacgccgccaccgacatcaccggcttcggcatcctgggccacgcccagaacctggccaagcagcagagaaacgaggtgagcttcgtgatccacaacctgcccgtgctggccaagatggccgccgtgagcaaggcctgcggcaacatgttcggcctgatgcacggcacctgccccgagaccagcggcggcctgctgatctgcctgcccagagagcaggccgccagattctgcgccgagatcaagagccccaagtacggcgagggccaccaggcctggatcatcggcatcgtggagaagggcaacagaaccgccagaatcatcgacaagcccagaatcatcgaggtggccccccaggtggccacccagaacgtgaaccccacccccggcgccaccagctag

SEQ ID NO: 173396 - DNA, 975 bp, Artificial Sequence
  derived and/or modified sequence
atgagcaccagagagagcttcaaccccgagagctacgagctggacaagagcttcagactgaccagattcaccgagctgaagggcaccggctgcaaggtgccccaggacgtgctgcagaagctgctggagagcctgcaggagaaccacttccaggaggacgagcagttcctgggcgccgtgatgcccagactgggcatcggcatggacacctgcgtgatccccctgagacacggcggcctgagcctggtgcagaccaccgactacatctaccccatcgtggacgacccctacatgatgggcagaatcgcctgcgccaacgtgctgagcgacctgtacgccatgggcgtgaccgagtgcgacaacatgctgatgctgctgggcgtgagcaacaagatgaccgacagagagagagacaaggtgatgcccctgatcatccagggcttcaaggacgccgccgaggaggccggcaccagcgtgaccggcggccagaccgtgctgaacccctggatcgtgctgggcggcgtggccaccaccgtgtgccagcccaacgagttcatcatgcccgacaacgccgtgcccggcgacgtgctggtgctgaccaagcccctgggcacccaggtggccgtggccgtgcaccagtggctggacatccccgagaagtggaacaagatcaagctggtggtgacccaggaggacgtggagctggcctaccaggaggccatgatgaacatggccagactgaacagaaccgccgccggcctgatgcacaccttcaacgcccacgccgccaccgacatcaccggcttcggcatcctgggccacgcccagaacctggccaagcagcagagaaacgaggtgagcttcgtgatccacaacctgcccgtgctggccaagatggccgccgtgagcaaggcctgcggcaacatgttcggcctgatgcacggcacctgccccgagaccagcgacgtgcagtag

SEQ ID NO: 173397 - protein, 399 aa, Artificial Sequence
  derived and/or modified sequence
MAEASATGACGEAMAAAEGSSGPAGLTLGRLTGFSGMKGLVGGQEEASQEAGLPAGAGPSPTFPALGIGMDSCVIPLRHGGLSLVQTTDFFYPLVEDPYMMGRIACANVLSDLYAMGITECDNMLMLLSVSQSMSEEEREKVTPLMVKGFRDAAEEGGTAVTGGQTVVNPWIIIGGVATVVCQPNEFIMPDSAVVGDVLVLTKPLGTQVAVNAHQWLDNPERWNKVKMVVSREEVELAYQEAMFNMATLNRTAAGLMHTFNAHAATDITGFGILGHSQNLAKQQRNEVSFVIHNLPIIAKMAAVSKASGRFGLLQGTSAETSGGLLICLPREQAARFCSEIKSSKYGEGHQAWIVGIVEKGNRTARIIDKPRVIEVLPRGATAAVLAPDSSNASSEPSS

SEQ ID NO: 173398 - protein, 483 aa, Artificial Sequence
  derived and/or modified sequence
MAEASATGACGEAMAAAEGSSGPAGLTLGRSFSNYRPFEPQALGLSPSWRLTGFSGMKGCGCKVPQEALLKLLAGLTRPDVRPPLGRGLVGGQEEASQEAGLPAGAGPSPTFPALGIGMDSCVIPLRHGGLSLVQTTDFFYPLVEDPYMMGRIACANVLSDLYAMGITECDNMLMLLSVSQSMSEEEREKVTPLMVKGFRDAAEEGGTAVTGGQTVVNPWIIIGGVATVVCQPNEFIMPDSAVVGDVLVLTKPLGTQVAVNAHQWLDNPERWNKVKMVVSREEVELAYQEAMFNMATLNRTAAGLMHTFNAHAATDITGFGILGHSQNLAKQQRNEVSFVIHNLPIIAKMAAVSKASGRFGLLQGTSAETSGGLLICLPREQAARFCSEIKSSKYGEGHQAWIVGIVEKGNRTARIIDKPRVIEVLPRGATAAVLAPDSSNASSEPSSCDERTEVVWTLEPLSTITDGSQELIVRNFQRRLPA

SEQ ID NO: 173399 - protein, 448 aa, Artificial Sequence
  derived and/or modified sequence
MAEASATGACGEAMAAAEGSSGPAGLTLGRSFSNYRPFEPQALGLSPSWRLTGFSGMKGCGCKVPQEALLKLLAGLTRPDVRPPLGRGLVGGQEEASQEAGLPAGAGPSPTFPALGIGMDSCVIPLRHGGLSLVQTTDFFYPLVEDPYMMGRIACANVLSDLYAMGITECDNMLMLLSVSQSMSEEEREKVTPLMVKGFRDAAEEGGTAVTGGQTVVNPWIIIGGVATVVCQPNEFIMPDSAVVGDVLVLTKPLGTQVAVNAHQWLDNPERWNKVKMVVSREEVELAYQEAMFNMATLNRTAAGLMHTFNAHAATDITGFGILGHSQNLAKQQRNEVSFVIHNLPIIAKMAAVSKASGRFGLLQGTSAETSGGLLICLPREQAARFCSEIKSSKYGEGHQAWIVGIVEKGNRTARIIDKPRVIEVLPRGATAAVLAPDSSNASSEPSS

SEQ ID NO: 173400 - protein, 391 aa, Artificial Sequence
  derived and/or modified sequence
MAEASATGACGEAMAAAEGSSGPAGLTLGRSFSNYRPFEPQEAGLPAGAGPSPTFPALGIGMDSCVIPLRHGGLSLVQTTDFFYPLVEDPYMMGRIACANVLSDLYAMGITECDNMLMLLSVSQSMSEEEREKVTPLMVKGFRDAAEEGGTAVTGGQTVVNPWIIIGGVATVVCQPNEFIMPDSAVVGDVLVLTKPLGTQVAVNAHQWLDNPERWNKVKMVVSREEVELAYQEAMFNMATLNRTAAGLMHTFNAHAATDITGFGILGHSQNLAKQQRNEVSFVIHNLPIIAKMAAVSKASGRFGLLQGTSAETSGGLLICLPREQAARFCSEIKSSKYGEGHQAWIVGIVEKGNRTARIIDKPRVIEVLPRGATAAVLAPDSSNASSEPSS

SEQ ID NO: 173401 - DNA, 1200 bp, Artificial Sequence
  derived and/or modified sequence
atggccgaagcttctgcaaccggcgcctgcggagaggccatggctgccgcagagggaagctcaggtccagcagggctaactctgggcagattaacgggcttctccggaatgaaggggttagtcgggggtcaggaggaggcctctcaggaggccggtctaccagctggggcaggtccgagcccaaccttccctgctctcggtattgggatggattcctgcgtcatccccctgaggcacggaggccttagcctggtgcagactacagactttttctacccactcgtggaggacccatatatgatgggccgtatcgcctgtgccaacgtcctttcagacttgtacgcaatggggatcacggaatgtgataatatgctcatgctgctgagtgtctctcaatccatgagcgaagaggaaagggagaaagtcactcctctcatggtgaaaggttttagggatgccgcagaggagggagggactgctgttactggaggacagaccgtggtaaacccctggatcataataggaggtgttgccacggttgtgtgtcagcctaatgaattcatcatgcccgatagcgcagtagtcggggatgtgctggtgctaaccaaaccgctgggcactcaggtcgcagtcaacgcccaccagtggctggacaatccggaaagatggaataaagtcaagatggtggtgtccagagaggaggtggaactcgcctatcaggaagctatgttcaatatggccacgcttaatagaacggcggccggactgatgcacacgtttaacgcacacgcggccacagatatcactgggtttggtatactcgggcatagtcagaacctggctaaacagcagcgaaatgaggtttcttttgtaatccacaacttgccaatcatcgccaaaatggcagctgtgtcaaaggcttctggccggtttggtttactccagggtacctcagctgaaacctcgggcggcttactaatctgcctacctcgcgagcaggcagcaaggttttgctcagaaatcaaatcctccaagtatggcgaaggccaccaggcttggatcgtcggaattgttgagaaaggtaacagaactgcaaggatcattgataagcctagggtgatagaagtgctgccccgtggcgcgaccgcagcagtgttggctccagacagctcaaacgcctccagcgaaccttcatcatag

SEQ ID NO: 173402 - DNA, 1452 bp, Artificial Sequence
  derived and/or modified sequence
atggcggaagcgagcgccactggagcttgcggggaagcaatggccgcggcagaaggaagttctggaccagctggtctcaccctgggacggtcattctcaaattaccgccctttcgagccccaggctctgggccttagcccatcatggcgcctcacgggctttagtggcatgaagggatgaggctgcaaggttccccaggaggccctgttgaagctgcttgccggcctgacacgccccgacgtgaggcctccccttgggcgggggctggtcggaggtcaggaggaagccagtcaggaggccggactacccgccggtgcaggtccatcacccaccttccccgccctggggattgggatggactcgtgcgttatacctctacgccatggtggcctctccctggtacagacgactgacttcttctaccctctggtcgaagatccttacatgatgggccgcattgcttgcgcaaatgtgctctccgacttgtacgctatggggataacagagtgtgataatatgcttatgcttctgtctgtgtctcagagcatgtctgaggaggagagagagaaagttacccctctgatggtgaaagggtttcgggatgctgccgaggaggggggcaccgcggtgaccgggggtcagacagtagttaacccctggatcatcatcgggggcgtggctaccgttgtttgtcaaccaaacgaatttattatgcctgacagcgccgttgtcggggatgtgctggtgttgacaaaacctctgggcacccaggtcgccgttaacgctcatcagtggctggataacccggaaagatggaataaagttaagatggtcgtcagcagggaagaggtggagctcgcgtaccaggaagccatgttcaatatggcaacattaaataggactgccgcaggacttatgcacaccttcaacgcccacgcagccacagacatcaccggattcggcatattgggacattcgcagaacctcgctaaacaacagcgaaatgaagtgtccttcgtcattcacaaccttccaatcattgctaagatggccgccgtgtcgaaggctagtgggcggttcggcctgctgcaggggacctccgctgaaacatcaggaggcctgctgatctgtctcccacgagagcaggctgcacgcttctgtagcgagataaaatcctctaagtacggggagggccatcaggcatggattgtaggtattgtggaaaaaggaaacaggacagccagaataattgacaaacccagagtcattgaggtcttacctcgtggcgctacagcagccgtgctggccccagactcttccaacgccagttccgaaccatcctcttgagatgaacggactgaggttgtatggaccttagagcccctatctaccataacagatggctctcaagagctgatcgtacgcaattttcagcgacgacttccagcctag

SEQ ID NO: 173403 - DNA, 1347 bp, Artificial Sequence
  derived and/or modified sequence
atggccgaggctagtgcgaccggcgcttgtggggaagcaatggccgcagccgaaggctctagtggacccgccggcctcactctgggccgatctttctcaaactataggcccttcgagccccaggccctgggactgtccccttcatggcggttaacgggctttagcggaatgaaaggatgagggtgcaaggtacctcaggaggccctgctgaagctgctggcagggctcacgaggcccgacgttcgcccgccattagggaggggccttgttggtggacaagaagaagcatcccaagaagcaggactgcctgccggcgctggaccttcccctacattccccgccctaggcatcggcatggattcctgtgtaatccccctcaggcacgggggattgagcctcgtgcagacaacggactttttttatcccctggtcgaggacccgtatatgatgggccgaattgcatgtgccaatgtcctgtccgacttgtacgcaatgggaatcaccgagtgcgacaacatgctcatgctgctgagtgtgtcccagtccatgtcagaggaagagagggagaaggtgaccccattgatggtgaaaggctttcgagacgctgcggaagagggtggtaccgctgtgacaggcgggcaaaccgtcgtcaacccttggattatcatcggcggagtcgcaacagtggtctgtcagccaaacgaatttattatgccagactcggccgtggtaggagacgtattagtcctcaccaaacctctggggacgcaagtggccgtgaatgctcaccaatggcttgataaccccgaacggtggaataaggtaaaaatggtggtgtcaagggaagaagtggagctggcttaccaggaggctatgttcaatatggcgaccctgaataggacggctgccggcctaatgcacacctttaatgctcacgctgctaccgacatcaccggattcggcattttgggccattctcaaaacctggcgaagcagcaacgcaatgaagtttcctttgtgattcacaacctgccaatcatcgccaaaatggccgcagtgtctaaggcaagcggtcggttcggcctcctccaagggacttccgccgagacttcagggggcctcctcatctgtctgcccagagaacaagcagcccggttctgctcagagattaagtcatccaagtacggtgagggtcatcaggcttggatcgtgggaatcgtggaaaaggggaatagaactgcaagaatcatcgataaacctcgggtgatcgaggtattgccccgaggcgccaccgctgcagtgcttgcgccggacagtagcaatgcgagttctgagccaagtagttag

SEQ ID NO: 173404 - DNA, 1176 bp, Artificial Sequence
  derived and/or modified sequence
atggccgaggcatccgccacaggagcttgcggagaagctatggcagccgccgagggctcctcaggcccggccggactcaccctagggcggtcttttagcaactataggccttttgaacctcaggaagcgggtctgcctgctggagcaggaccttcaccaactttccctgcgttaggcattgggatggactcttgtgtcatcccattgcgacatggcggcttatcactggtgcaaaccacagattttttctatccactcgtcgaggacccatatatgatggggcgcatcgcctgtgctaacgttctcagcgatctttatgcaatgggcataacggagtgcgacaacatgctgatgctgctgtcagtttcacagagcatgtctgaggaggagagagaaaaggtgactcctctgatggtgaaggggtttcgagatgccgctgaggagggaggaaccgccgtgactggcggccagacggtcgtcaatccctggatcatcattggcggagttgccaccgtggtctgtcagcctaacgagtttataatgcctgattcagcggtggtcggggacgtccttgtgctgaccaagccactcggtacccaggtggcagtgaatgcccaccagtggctggacaaccctgaacgctggaacaaagtgaagatggtggttagccgggaagaagtagagctggcataccaggaggccatgttcaatatggctaccctcaaccgtaccgctgccgggttgatgcatacctttaacgctcacgccgctacagatattacaggcttcggtatcctgggccactcacaaaacttggccaagcaacagcgcaatgaggtgtcattcgtaatccataacctgcccattattgccaaaatggccgctgtatccaaagccagtggccgctttgggttactgcagggcactagtgccgagacgagcggcggactgttgatatgtcttccacgcgagcaggccgcacggttttgtagtgaaatcaagtcatccaagtatggtgaagggcaccaggcctggatcgtgggtatagttgaaaaagggaataggactgcccgaatcatcgataagccgagagtcatagaggtgttgccacggggtgccaccgcagctgtgctcgcacccgattcctctaatgcatcttctgaaccaagtagttag

SEQ ID NO: 173405 - DNA, 1200 bp, Artificial Sequence
  derived and/or modified sequence
atggccgaggccagcgccactggagcctgtggggaggccatggctgctgctgagggcagcagcggccctgctggcctgaccctgggccgcctgaccggcttcagcggcatgaagggcctggtgggcggccaggaggaggccagccaggaggccggcctgcctgctggagctggccccagccccaccttccctgccctgggcatcggcatggacagctgtgtgatccccctgcggcatggaggcctgagcctggtgcagaccacagacttcttctaccccctggtggaggacccctacatgatgggccgcatcgcctgtgccaacgtgctgagtgacctgtatgccatgggcatcacagaatgtgacaacatgctgatgctgctgtctgtgtcccagagcatgtctgaggaggagcgggagaaggtgacccccctgatggtgaagggcttcagagatgctgctgaggagggcggcacagctgtgactggaggccagacagtggtgaacccctggatcatcatcggcggcgtggccaccgtggtgtgccagcccaatgagttcatcatgccagacagcgctgtggtgggagatgtgctggtgctgaccaagcccctgggcacccaggtggccgtgaatgcccaccagtggctggacaaccctgagcgctggaacaaggtgaagatggtggtgtcccgggaggaggtggagctggcctaccaggaggccatgttcaacatggccaccctgaacagaacagctgctggcctgatgcacaccttcaatgcccacgccgccacagacatcactggatttggcatcctgggccacagccagaacctggccaagcagcagagaaatgaggtgtcctttgtgatccacaacctgcccatcatcgccaagatggctgctgtgtccaaggccagcggccgcttcggcctgctgcagggcaccagcgctgagaccagcggcggcctgctgatctgcctgccccgggagcaggccgcccgcttctgcagcgagatcaagagcagcaagtacggggagggccaccaggcctggatcgtgggcatcgtggagaagggcaacagaacagcccgcatcatcgacaagcccagggtcatcgaggtgctgcccaggggggccacagctgctgtgctggccccagacagcagcaatgccagcagcgagcccagcagctag

SEQ ID NO: 173406 - DNA, 1440 bp, Artificial Sequence
  derived and/or modified sequence
atggccgaggccagcgccactggagcctgtggggaggccatggctgctgctgagggcagcagcggccctgctggcctgaccctgggccgctccttcagcaactaccggccctttgagccccaggccctgggcctgagccccagctggaggctgaccggcttcagcggcatgaagggctgcaaggtgccccaggaggccctgctgaagctgctggccggcctgaccaggccagatgtgcggccccccctgggccggggcctggtgggcggccaggaggaggccagccaggaggccggcctgcctgctggggccggccccagccccaccttccctgccctgggcatcggcatggacagctgtgtgatccccctgcggcacggcggcctgagcctggtgcagaccacagacttcttctaccccctggtggaggacccctacatgatgggcagaattgcctgtgccaacgtgctgagtgacctgtatgccatgggcatcacagaatgtgacaacatgctgatgctgctgtctgtgtcccagagcatgtctgaggaggagcgggagaaggtgacccccctgatggtgaagggcttcagagatgctgctgaggagggcggcacagctgtgactggaggccagacagtggtgaacccctggatcatcattggaggagtggccaccgtggtgtgccagcccaatgagttcatcatgccagattctgctgtggtgggagatgtgctggtgctgaccaagcccctgggcacccaggtggccgtgaatgcccaccagtggctggacaaccctgagcgctggaacaaggtgaagatggtggtgtcccgggaggaggtggagctggcctaccaggaggccatgttcaacatggccaccctgaacagaacagctgctggcctgatgcacaccttcaatgcccatgctgccacagacatcaccggcttcggcatcctgggccacagccagaacctggccaagcagcagagaaatgaggtgtcctttgtgatccacaacctgcccatcatcgccaagatggctgctgtgtccaaggccagcggccgcttcggcctgctgcagggcaccagcgctgagaccagcggcggcctgctgatctgcctgccccgggagcaggccgcccgcttctgcagcgagatcaagagcagcaaatatggagagggccaccaggcctggatcgtgggcatcgtggagaagggcaacagaacagcccgcatcatcgacaagccccgggtgattgaggtgctgcccaggggggccacagctgctgtgctggccccagacagcagcaatgccagcagcgagcccagcagcgagaggacagaggtggtgtggaccctggagcccctgagcaccatcacagatggcagccaggagctgattgtgaggaacttccagaggcggctgcctgcctag

SEQ ID NO: 173407 - DNA, 1341 bp, Artificial Sequence
  derived and/or modified sequence
atggccgaggccagcgccactggagcctgtggggaggccatggctgctgctgagggcagcagcggccctgctggcctgaccctgggccgctccttcagcaactaccggccctttgagccccaggccctgggcctgagccccagctggaggctgaccggcttcagcggcatgaagggctgcaaggtgccccaggaggccctgctgaagctgctggccggcctgaccaggccagatgtgcggccccccctgggccggggcctggtgggcggccaggaggaggccagccaggaggccggcctgcctgctggggccggccccagccccaccttccctgccctgggcatcggcatggacagctgtgtgatccccctgcggcacggcggcctgagcctggtgcagaccacagacttcttctaccccctggtggaggacccctacatgatgggcagaattgcctgtgccaacgtgctgagtgacctgtatgccatgggcatcacagaatgtgacaacatgctgatgctgctgtctgtgtcccagagcatgtctgaggaggagcgggagaaggtgacccccctgatggtgaagggcttcagagatgctgctgaggagggcggcacagctgtgactggaggccagacagtggtgaacccctggatcatcattggaggagtggccaccgtggtgtgccagcccaatgagttcatcatgccagattctgctgtggtgggagatgtgctggtgctgaccaagcccctgggcacccaggtggccgtgaatgcccaccagtggctggacaaccctgagcgctggaacaaggtgaagatggtggtgtcccgggaggaggtggagctggcctaccaggaggccatgttcaacatggccaccctgaacagaacagctgctggcctgatgcacaccttcaatgcccatgctgccacagacatcaccggcttcggcatcctgggccacagccagaacctggccaagcagcagagaaatgaggtgtcctttgtgatccacaacctgcccatcatcgccaagatggctgctgtgtccaaggccagcggccgcttcggcctgctgcagggcaccagcgctgagaccagcggcggcctgctgatctgcctgccccgggagcaggccgcccgcttctgcagcgagatcaagagcagcaaatatggagagggccaccaggcctggatcgtgggcatcgtggagaagggcaacagaacagcccgcatcatcgacaagccccgggtgattgaggtgctgcccaggggggccacagctgctgtgctggccccagacagcagcaatgccagcagcgagcccagcagctag

SEQ ID NO: 173408 - DNA, 1176 bp, Artificial Sequence
  derived and/or modified sequence
atggccgaggccagcgccactggagcctgtggggaggccatggctgctgctgagggcagcagcggccctgctggcctgaccctgggccgctccttcagcaactaccggccctttgagccccaggaggccggcctgcctgctggagctggccccagccccaccttccctgccctgggcatcggcatggacagctgtgtgatccccctgcggcatggaggcctgagcctggtgcagaccacagacttcttctaccccctggtggaggacccctacatgatgggccgcatcgcctgtgccaacgtgctgagtgacctgtatgccatgggcatcacagaatgtgacaacatgctgatgctgctgtctgtgtcccagagcatgtctgaggaggagcgggagaaggtgacccccctgatggtgaagggcttcagagatgctgctgaggagggcggcacagctgtgactggaggccagacagtggtgaacccctggatcatcatcggcggcgtggccaccgtggtgtgccagcccaatgagttcatcatgccagacagcgctgtggtgggagatgtgctggtgctgaccaagcccctgggcacccaggtggccgtgaatgcccaccagtggctggacaaccctgagcgctggaacaaggtgaagatggtggtgtcccgggaggaggtggagctggcctaccaggaggccatgttcaacatggccaccctgaacagaacagctgctggcctgatgcacaccttcaatgcccacgccgccacagacatcactggatttggcatcctgggccacagccagaacctggccaagcagcagagaaatgaggtgtcctttgtgatccacaacctgcccatcatcgccaagatggctgctgtgtccaaggccagcggccgcttcggcctgctgcagggcaccagcgctgagaccagcggcggcctgctgatctgcctgccccgggagcaggccgcccgcttctgcagcgagatcaagagcagcaagtacggggagggccaccaggcctggatcgtgggcatcgtggagaagggcaacagaacagcccgcatcatcgacaagcccagggtcatcgaggtgctgcccaggggggccacagctgctgtgctggccccagacagcagcaatgccagcagcgagcccagcagctag

SEQ ID NO: 173409 - DNA, 1200 bp, Artificial Sequence
  derived and/or modified sequence
atggccgaggccagcgccaccggcgcctgcggcgaggccatggccgccgctgagggaagtagtggcccagccggccttacgctgggaaggctgaccggattctctggtatgaaaggactggtgggtgggcaggaggaggcaagtcaagaggcaggattaccagcaggcgcaggtccttcccccaccttcccagctttggggatcggcatggactcctgcgtgattccacttagacatgggggattgtcactcgtgcagacgacggactttttctacccactcgtggaagacccttacatgatggggagaatcgcatgcgcaaatgtgctctctgatctgtacgctatggggatcaccgagtgtgacaacatgcttatgctactgtctgtaagtcagagcatgtcagaggaagagcgagagaaggtgacaccattgatggtgaaggggtttagggacgctgcagaggaaggtggtacggcagtcaccggagggcagactgtggtcaatccctggattatcatcggaggagtagccactgtcgtctgtcagcctaatgaatttatcatgccagactccgctgtggtcggggatgttctggtgctgaccaaacctctcgggacccaggtcgctgtaaacgcacaccagtggctggacaatccagagcgatggaataaggtgaagatggtagtgagcagggaggaggtggaactcgcttaccaggaggctatgtttaacatggcaaccctgaacaggaccgcagccggactcatgcacacctttaatgcccacgctgcaactgacatcaccggtttcggcatccttggccattctcaaaatcttgcaaaacagcaaaggaacgaggtgtcgtttgtgattcacaacctgccaatcatcgccaaaatggcggccgtgagcaaagcttctggtcggttcgggcttctacagggcacaagtgccgagacctccggagggctgctcatttgtctgccgcgagagcaagcggccagattctgtagcgagatcaagtcatccaagtacggtgaaggccaccaggcgtggatagtcggcatcgtggaaaaggggaaccggacagctcgcataatcgataaacccagagttatcgaagtgttacctcggggggccacagcagccgtcctcgctccggactcgtcgaatgcatctagtgagccttctagttag

SEQ ID NO: 173410 - DNA, 1452 bp, Artificial Sequence
  derived and/or modified sequence
atggccgaggccagcgccaccggcgcctgcggcgaggccatggccgccgcggaaggcagtagtgggcccgcagggctgactctcggcaggagtttctccaattaccggccatttgaaccacaggcattgggcctttcacccagttggcgtctgaccgggtttagcggcatgaaaggttgagggtgcaaggtgcctcaggaagccctgctcaagttactagccgggctgacaaggcccgacgtcaggccgccgctgggcaggggattagtcggcggtcaggaggaagcctctcaagaagcaggactgcccgccggggccgggcctagccctacattccctgcgttaggcatcgggatggattcatgtgtgatccctttgcggcatggcgggctctccttagttcagacaaccgatttcttttatcccctggtagaggacccatacatgatggggcgcattgcctgcgctaatgtactgtccgacctgtacgccatgggcattaccgagtgtgacaatatgctcatgctgttgtcagtgtcgcaaagcatgagcgaagaggaacgtgagaaagtgaccccactaatggtaaaaggctttagagatgcagctgaggaggggggaaccgccgtcacaggggggcagaccgtagtgaacccatggataatcatcggtggggtggccacagtggtatgccagcctaatgagttcattatgccagatagcgcagtggtcggagacgtcctggtcctcacaaagcctttaggaacccaagtggcggtaaacgcccaccaatggctggacaacccagagcgatggaacaaagtgaaaatggtggtctcacgggaggaggtggagttggcctaccaagaagccatgttcaacatggccacactcaaccgaactgctgccggactgatgcacacctttaacgcgcacgccgccaccgacattacagggttcggaatcctagggcattcacaaaacttggctaagcagcagagaaacgaggtgtctttcgtgatccacaacctgccaatcatagcgaaaatggcagccgttagtaaggctagcgggagattcggcctgctccaaggcactagcgcggagacttcaggcggcttgcttatctgtctcccccgcgaacaggccgccaggttctgctcggagatcaaatcatcaaagtatggagagggtcatcaggcatggatcgtggggatcgtggagaaaggaaaccggaccgctaggattatcgataaaccccgcgtgattgaagtacttcctcgaggagccacagcagccgttctggccccagactcgtccaatgcctcatcagaaccttcctcatgagatgagcgtaccgaggtggtctggacacttgaacctctgtcgacaatcactgatggctcccaagagcttattgtaaggaatttccagagaagactacccgcttag

SEQ ID NO: 173411 - DNA, 1347 bp, Artificial Sequence
  derived and/or modified sequence
atggccgaggccagcgccaccggcgcctgcggcgaggccatggccgccgctgaagggagttctggtcctgccggtctgacactgggcaggagcttttcaaactacaggccttttgaaccacaggcattaggactgagcccttcatggcgtctcactggttttagcggcatgaaaggttgagggtgcaaggtgcctcaggaggctctcctgaagctgcttgccggtttgactagaccagacgtacgcccgcccctaggacgcggtctggtgggaggtcaggaggaggctagtcaggaggctggcctccccgccggcgcgggtccttcacctaccttccctgctctcgggatcggcatggattcttgtgtgattccactgcggcacggtggcttatccctagtccagacaacagatttcttctacccgcttgtggaagatccctatatgatggggaggatcgcttgcgccaacgtgctaagcgacttatacgctatgggtatcaccgagtgcgataatatgctgatgcttttgtccgtctctcagagtatgtccgaagaagaacgcgaaaaggtgactcccttgatggtgaagggttttagggatgctgccgaagagggtggcaccgctgtgacaggcggccagacagttgtgaatccatggatcatcattggtggggttgcaacagtggtgtgccagcctaatgaattcattatgccagatagcgcggtcgtgggcgatgtgctggtgctcactaaacctctcggcacacaggtggccgtgaatgcacaccagtggttggacaaccctgagcgctggaacaaagtcaagatggttgtgagtcgggaagaggtggaactggcttatcaggaagccatgttcaacatggccacgctgaacagaactgctgctggcctcatgcacactttcaatgctcacgctgccacagatatcaccggattcgggatccttggtcattcacaaaaccttgcaaagcagcagcggaacgaagtgagctttgtgatccataatctacccatcattgcaaaaatggcagccgtcagcaaagcctccggccgcttcgggttattgcagggcacgtccgcagaaacctcggggggactcctgatttgtctgccacgcgagcaggcagccaggttctgtagtgaaattaagagtagtaaatatggcgagggccaccaggcttggatcgtgggaattgtggagaaggggaaccgcactgcccgcattattgacaaaccacgggtgatcgaagtattgcctagaggagcaactgccgccgtgctcgctcctgactcatccaacgccagttccgagccgtccagttag

SEQ ID NO: 173412 - DNA, 1176 bp, Artificial Sequence
  derived and/or modified sequence
atggccgaggccagcgccaccggcgcctgcggcgaggccatggccgctgcggaaggcagttctggacctgccgggctgacacttgggcggtccttcagcaactacaggccgttcgagcctcaagaagccggcttaccagcaggggcggggccctcccctacttttcctgccctcggtatcggaatggacagctgtgttattcccctgcggcatggtggcctaagcctggttcaaaccacagactttttctatcccttggtagaggatccctatatgatgggtagaatcgcctgcgccaacgtgctatcagacctgtacgccatggggatcaccgagtgtgataatatgcttatgctgctgtcggtttcccagtcaatgagcgaggaagagcgtgagaaggtgacgccgctgatggtgaaaggctttagagatgccgcagaggagggtggcaccgcagtgacaggaggccagactgtggtgaacccttggatcattatcggcggcgttgcaacagtggtatgccagcccaatgagtttattatgcccgattcagccgtagttggggacgtgctggtgctgaccaaacccctgggcactcaggtggcagttaatgcacaccagtggttagacaatccggaaagatggaacaaggttaagatggtcgtgagtcgggaggaagtcgagctggcctaccaggaagcaatgtttaatatggccacactgaaccggactgctgctgggctgatgcacaccttcaatgctcacgctgcaaccgatattacagggtttggtatcctcgggcatagccaaaaccttgcaaaacagcagaggaacgaggttagttttgtgatccacaatctccctataatcgctaaaatggctgccgtgagcaaagcatccggtagattcggcttgctgcagggcacttctgctgaaactagcggcggcttgctcatctgtcttccacgcgagcaggctgcacggttctgttccgagatcaagagtagtaagtacggagagggccatcaggcctggatcgttggcatcgttgagaaagggaataggaccgcccgcattattgacaaacctcgcgtaattgaggtgttgccaagaggtgctaccgctgccgtccttgcgcccgattccagcaatgcctcttcggagccctcgagctag

SEQ ID NO: 173413 - DNA, 1200 bp, Artificial Sequence
  derived and/or modified sequence
atggctgaagcaagcgcaacaggcgcatgtggcgaggccatggccgctgcagaaggatcttccggccctgccggattgacactaggcaggctgacagggttctccgggatgaagggactggtaggcggtcaggaggaagccagtcaagaggccggtcttccagctggagccggaccctctcctacatttcctgccctggggattggtatggatagctgcgttataccattaagacacggaggcttaagccttgtacagaccacagactttttttatccgcttgttgaagacccctacatgatgggaagaatcgcatgcgctaatgtgctatcagatttgtatgccatgggcatcactgaatgcgataacatgctcatgttactgagtgtatctcagtctatgtcagaggaagagcgagaaaaagtgaccccgctgatggttaagggattccgagacgccgctgaggagggagggaccgcggttactgggggtcagacggtcgtaaacccttggatcatcatcggtggagtagcaaccgttgtttgccagcctaatgagtttatcatgccagacagcgcagtggtgggcgatgtcctagtcctgacaaagcccctaggcacacaagtagctgttaatgcgcaccagtggctggacaatccagaacggtggaataaggtgaagatggtggtgagccgagaggaagtggaacttgcttaccaagaggctatgttcaacatggccacactcaatagaaccgccgctggcctgatgcacacgtttaacgcgcacgcagcgactgatataacaggcttcggcattctgggccattcccagaacctagccaaacaacagagaaatgaggttagctttgtgatacacaacctgcctattatcgcaaaaatggctgcagtgtcgaaggcctccggcaggtttggacttctgcagggaacatccgccgagacatcaggcggtctgctcatttgccttccgagggagcaggctgcccgtttttgttccgaaatcaagtctagcaagtacggtgaaggccatcaggcgtggatcgttggcatcgtggaaaaaggtaatcggaccgccaggattattgataagcccagggtcatcgaagtgttaccccgaggcgctactgctgccgtgctggctccagatagttcaaatgcttcctctgagccatcttcatag

SEQ ID NO: 173414 - DNA, 1452 bp, Artificial Sequence
  derived and/or modified sequence
atggccgaggcgtccgccaccggagcttgtggcgaagctatggccgctgccgagggcagctccggaccagctgggcttactctcggtcggtcgtttagcaactataggccgttcgagcctcaggctctggggctatccccaagctggaggctcactggctttagcggtatgaagggctgagggtgcaaagtgcctcaggaggctttgctcaagctgctggctggtctgacccggcctgatgtcaggcctccacttggcaggggcctggtggggggtcaggaggaggcatcccaggaagccggtctccctgcgggagcaggtcctagtcccacttttccagccttgggcatagggatggactcctgtgtaatcccactgcgtcacggaggcttgtctctggttcagacaacagatttcttctatcctctggtggaggatccctacatgatgggacgcatcgcatgcgcaaatgtccttagcgatctgtatgctatgggtataactgagtgcgacaatatgctcatgttgctttctgtctcacaatcaatgtccgaggaagagagggaaaaggtgacacctctgatggtaaaagggttcagggacgctgcagaagagggcggaaccgccgtgactggcggtcaaaccgtcgtcaacccgtggattattattggcggtgtggccactgtagtgtgccagcccaacgagttcatcatgccagatagcgctgtcgtcggcgacgtgctggttctgacaaaaccactgggcacccaagtcgcagtaaacgctcaccaatggcttgacaatccggaacggtggaacaaagtcaaaatggtggtgagcagagaggaagtggaattggcctatcaagaagcaatgtttaacatggcaacattgaaccgaactgctgctggactgatgcatacattcaatgctcacgcggctactgatattactgggtttggtattctcgggcactcacaaaacctcgctaaacagcagaggaatgaggtgagtttcgttatccacaatcttcctattattgccaagatggccgcagtttccaaggcttccggccgttttggcctcctgcaaggcacctctgcggagacctctgggggtctcctgatctgcttgccccgtgagcaggccgcacgtttttgcagcgagattaagagcagcaagtacggagaggggcaccaggcctggatcgtcggaattgtggagaaggggaaccgaacagcacgcatcatagacaaacccagggttatcgaggtgttgcctcgaggcgctaccgccgctgtgttggcacccgactcttctaacgcctctagcgagccgagctcatgagacgagcggaccgaagttgtgtggacgcttgaaccactgagcactattacagacggctcacaggagcttattgtaaggaacttccaaaggagactgcctgcatag

SEQ ID NO: 173415 - DNA, 1347 bp, Artificial Sequence
  derived and/or modified sequence
atggctgaagcctctgcaaccggcgcttgcggcgaagcaatggctgcagctgagggctcatccggacccgcaggcttaactcttggaaggtccttcagcaattatagacctttcgagccccaagccctggggctttcaccaagctggaggttaacaggtttttctggcatgaagggctgaggctgcaaggttcctcaagaggctctcctgaagctgctggctggcttgacaagacctgatgtccgtcccccactgggcagggggctggtgggcggacaggaggaagcgtcacaggaagccggactgcctgccggagcaggaccgtctccaacatttcctgctctcggaatcgggatggactcctgtgtcatccccctgagacacgggggactgtctctcgtgcagacgacggactttttttaccccctggtggaggatccatatatgatgggacggatcgcttgcgcaaacgtactgagtgacctgtatgctatgggcatcaccgagtgtgataacatgctgatgttgctgagtgtatcacaaagcatgtctgaagaagagcgggagaaagtcactcccctcatggtcaaagggttccgggatgccgcagaggaaggaggcactgctgtgaccgggggacagaccgtcgtaaatccgtggatcatcattggcggagtggctaccgtcgtgtgtcaacctaacgaattcatcatgccagactctgcagtggtgggggacgtactagtccttaccaagcctttgggcacgcaggtcgccgtcaatgctcaccagtggctcgacaacccggagaggtggaacaaggtgaagatggttgtgtccagggaggaggtggaactagcctaccaggaagccatgttcaacatggcaaccctcaaccgcacagccgctggattgatgcatacttttaatgctcatgctgcaactgacatcaccggtttcggaatactgggccacagccagaacctggcgaagcagcagcgcaacgaagtctccttcgtaattcacaatttgccaatcattgcaaagatggcagcagtgtccaaggccagcggaagatttgggcttctgcagggcacatccgccgagacgagcgggggattgcttatctgtctgcccagggagcaggcagcaagattctgctcagaaatcaagtcaagcaaatatggcgaaggacatcaggcgtggatcgttggcattgtggaaaaaggtaacagaactgcccgtataatcgataaaccgagagtcattgaggtgctcccccgaggggcaactgctgccgtcctggctcccgactcctccaatgctagctctgaacccagctcttag

SEQ ID NO: 173416 - DNA, 1176 bp, Artificial Sequence
  derived and/or modified sequence
atggcagaagcgtccgccacgggcgcatgtggcgaggccatggcagctgccgagggtagctcggggccagctgggctgaccctcggcaggtctttttccaattaccgtccatttgagccacaggaagctggattgccggcaggcgcaggcccatccccaacctttcccgcactcggcatcgggatggattcatgtgtgattcctttgagacacggcggactgagtctagtacagaccactgacttcttctatcccttggtggaggatccctatatgatggggagaattgcgtgtgccaatgtgctgtctgatctgtatgctatggggatcaccgagtgtgacaacatgctgatgctactttctgtatcccagagcatgtctgaagaagagagggaaaaagtaacgcctcttatggtcaagggttttcgggacgccgcagaagagggtggcactgctgtgacaggtggacaaaccgtcgtgaacccttggattatcatcggtggtgtggcgaccgtcgtttgtcagcccaacgagttcatcatgcctgatagcgccgtagtgggtgatgttcttgtcctcactaaaccactgggaacccaggttgctgtgaatgcacaccaatggctagataatcccgaacgatggaataaagtgaagatggtagtgtcccgcgaggaagtggagctggcctaccaggaggcaatgttcaatatggccactctgaacagaactgctgccggactaatgcacacatttaacgcccatgctgcaacggacatcacaggctttgggattctgggtcacagccagaatctcgcgaaacaacagcgtaatgaagtgtcctttgtgatccacaacttgcccattatcgctaagatggcagcagtctccaaggccagtggacgcttcggcctcttgcagggcacgtcggccgaaacttctggcggactgctgatttgtctcccacgcgaacaggccgctagattttgttctgagatcaagtcttctaaatacggggagggacaccaggcctggatagtcggcattgtagagaagggaaaccgaaccgccaggattattgacaaacctagagtcattgaagtacttccgaggggagccactgctgctgtcttggcaccagactcctcaaacgcgtccagtgaaccgtccagctag

SEQ ID NO: 173417 - DNA, 2089 bp, Artificial Sequence
  derived and/or modified sequence
aggaagattgtgcatgccgtgggtctgacggcttgagtagcgctagggagaatccctgcaggtaatatttgacttttgcttcatattaatctgagtggaaaataaaagggccctcttctcctctcgcttccctgccgggcaggcgccatggcggaagcctcggcgacgggcgcctgcggagaggcgatggcagcggcggaaggctcctcgggcccggcgggcttgactctgggccggctgacgggcttctccggcatgaagggcctggtgggtggccaggaagaggcgtcccaggaagccggcctgccggcaggagcgggccccagccccacctttccagccctgggcatcgggatggactcctgcgtcatccccctgaggcacgggggcctgtcactggtgcagaccacggacttcttttaccccttggtagaagatccctacatgatggggcgcatagcttgtgccaacgtgctgagtgacctctacgccatggggattactgagtgtgacaacatgttgatgttactcagcgtcagccagagtatgagtgaggaggaacgcgaaaaggtaacgccactcatggtcaaaggctttcgggatgcggctgaggaaggagggacggcagtgaccggtgggcaaacggtggtcaacccttggattataatcggtggagttgccactgtagtatgccaaccaaatgagttcataatgccggacagcgccgtcgttggggacgtgctggtgttaaccaaaccgttaggaacccaggttgctgtcaatgcccaccaatggctggataatcctgaaagatggaataaagtaaagatggtggtctccagagaagaggtggagctggcctatcaggaagccatgttcaatatggctaccctcaacagaactgctgcaggtttaatgcacacatttaatgcccatgcggccacagatatcacaggctttggcattctaggacactcccagaaccttgcaaaacaacaaagaaatgaagtgtcctttgttattcataatctgccaataattgccaagatggctgccgtcagcaaggccagtggacggtttgggcttcttcaaggaacctcagctgaaacctctgggggattactgatttgtctgccaagagaacaggcggctcgcttttgttctgaaatcaaatcctccaagtacggagagggtcaccaagcgtggatcgttggcattgtggaaaagggaaaccgaacggcccggatcattgacaagccgcgagttattgaagtcctgcctcgtggggccacagctgctgttcttgctcctgacagttcaaatgcctcctctgagcctagctcgtgagatgaaagaacagaagttgtttggaccttagagccattgtccacaatcacggatggttctcaagagttgattgtaagaaatttccaaagaaggctgcctgcatagtggttccggctgccctttctaggtgattggaatcagcccatctaaagcagtctttatatgcattccgaggccagagtaacattttgaactttggggggatatttgttcatcacttgggtagaagaggagcaaaaatacctctgttttctcttgccaaagtaagatgaagctattccaggttgagggatttttctttgcacggggttgattaatttctgcacagggagtgagattattaaagtaacacacacacaaagtaaattgcaaaatgaaaaaaattagaagcaaatgagttttggaccaatattgttgataaatctaaattgttaagagagatcttataatgcaacatcaaattctttattcaattttactgaagtactggctctttcctgctctggacaagaattgagcaacttgtctgatgactgggaaaggaggacctgcaaccatctgacttggtctctgttaatgacgtctctccctctaaaccccattaaggactgggagaggcagagcaagcctcagagcccaggcctcagtggtcattaagatgttaagtcttttgcggcagattcctggtgatttgatcaataaagagtaatttcttgctaaataaataaaagaaaccttgttg

SEQ ID NO: 173418 - DNA, 2235 bp, Artificial Sequence
  derived and/or modified sequence
gtgcatgccgtgggtctgacggcttgagtagcgctagggagaatccctgcaggtaatatttgacttttgcttcatattaatctgagtggaaaataaaagggccctcttctcctctcgcttccctgccgggcaggcgccatggcggaagcctcggcgacgggcgcctgcggagaggcgatggcagcggcggaaggctcctcgggcccggcgggcttgactctgggccggagcttctcgaactaccggcccttcgagccccaggcgttgggcctcagcccgagctggcggctgacgggcttctccggcatgaagggctgaggctgcaaggtcccgcaggaggcgctgctcaaactcctggcgggactgacgcggccggacgtgcggcccccgctgggccggggcctggtgggtggccaggaagaggcgtcccaggaagccggcctgccggcaggagcgggccccagccccacctttccagccctgggcatcgggatggactcctgcgtcatccccctgaggcacgggggcctgtcactggtgcagaccacggacttcttttaccccttggtagaagatccctacatgatggggcgcatagcttgtgccaacgtgctgagtgacctctacgccatggggattactgagtgtgacaacatgttgatgttactcagcgtcagccagagtatgagtgaggaggaacgcgaaaaggtaacgccactcatggtcaaaggctttcgggatgcggctgaggaaggagggacggcagtgaccggtgggcaaacggtggtcaacccttggattataatcggtggagttgccactgtagtatgccaaccaaatgagttcataatgccggacagcgccgtcgttggggacgtgctggtgttaaccaaaccgttaggaacccaggttgctgtcaatgcccaccaatggctggataatcctgaaagatggaataaagtaaagatggtggtctccagagaagaggtggagctggcctatcaggaagccatgttcaatatggctaccctcaacagaactgctgcaggtttaatgcacacatttaatgcccatgcggccacagatatcacaggctttggcattctaggacactcccagaaccttgcaaaacaacaaagaaatgaagtgtcctttgttattcataatctgccaataattgccaagatggctgccgtcagcaaggccagtggacggtttgggcttcttcaaggaacctcagctgaaacctctgggggattactgatttgtctgccaagagaacaggcggctcgcttttgttctgaaatcaaatcctccaagtacggagagggtcaccaagcgtggatcgttggcattgtggaaaagggaaaccgaacggcccggatcattgacaagccgcgagttattgaagtcctgcctcgtggggccacagctgctgttcttgctcctgacagttcaaatgcctcctctgagcctagctcgtgagatgaaagaacagaagttgtttggaccttagagccattgtccacaatcacggatggttctcaagagttgattgtaagaaatttccaaagaaggctgcctgcatagtggttccggctgccctttctaggtgattggaatcagcccatctaaagcagtctttatatgcattccgaggccagagtaacattttgaactttggggggatatttgttcatcacttgggtagaagaggagcaaaaatacctctgttttctcttgccaaagtaagatgaagctattccaggttgagggatttttctttgcacggggttgattaatttctgcacagggagtgagattattaaagtaacacacacacaaagtaaattgcaaaatgaaaaaaattagaagcaaatgagttttggaccaatattgttgataaatctaaattgttaagagagatcttataatgcaacatcaaattctttattcaattttactgaagtactggctctttcctgctctggacaagaattgagcaacttgtctgatgactgggaaaggaggacctgcaaccatctgacttggtctctgttaatgacgtctctccctctaaaccccattaaggactgggagaggcagagcaagcctcagagcccaggcctcagtggtcattaagatgttaagtcttttgcggcagattcctggtgatttgatcaataaagagtaatttcttgctaaataaataaaagaaaccttgttgaaaaacta

SEQ ID NO: 173419 - DNA, 1347 bp, Artificial Sequence
  derived and/or modified sequence
atggcggaagcctcggcgacgggcgcctgcggagaggcgatggcagcggcggaaggctcctcgggcccggcgggcttgactctgggccggagcttctcgaactaccggcccttcgagccccaggcgttgggcctcagcccgagctggcggctgacgggcttctccggcatgaagggctgaggctgcaaggtcccgcaggaggcgctgctcaaactcctggcgggactgacgcggccggacgtgcggcccccgctgggccggggcctggtgggtggccaggaagaggcgtcccaggaagccggcctgccggcaggagcgggccccagccccacctttccagccctgggcatcgggatggactcctgcgtcatccccctgaggcacgggggcctgtcactggtgcagaccacggacttcttttaccccttggtagaagatccctacatgatggggcgcatagcttgtgccaacgtgctgagtgacctctacgccatggggattactgagtgtgacaacatgttgatgttactcagcgtcagccagagtatgagtgaggaggaacgcgaaaaggtaacgccactcatggtcaaaggctttcgggatgcggctgaggaaggagggacggcagtgaccggtgggcaaacggtggtcaacccttggattataatcggtggagttgccactgtagtatgccaaccaaatgagttcataatgccggacagcgccgtcgttggggacgtgctggtgttaaccaaaccgttaggaacccaggttgctgtcaatgcccaccaatggctggataatcctgaaagatggaataaagtaaagatggtggtctccagagaagaggtggagctggcctatcaggaagccatgttcaatatggctaccctcaacagaactgctgcaggtttaatgcacacatttaatgcccatgcggccacagatatcacaggctttggcattctaggacactcccagaaccttgcaaaacaacaaagaaatgaagtgtcctttgttattcataatctgccaataattgccaagatggctgccgtcagcaaggccagtggacggtttgggcttcttcaaggaacctcagctgaaacctctgggggattactgatttgtctgccaagagaacaggcggctcgcttttgttctgaaatcaaatcctccaagtacggagagggtcaccaagcgtggatcgttggcattgtggaaaagggaaaccgaacggcccggatcattgacaagccgcgagttattgaagtcctgcctcgtggggccacagctgctgttcttgctcctgacagttcaaatgcctcctctgagcctagctcgtga

SEQ ID NO: 173420 - DNA, 2094 bp, Artificial Sequence
  derived and/or modified sequence
aaataagggagtccggcggctcctctatcaggaagattgtgcatgccgtgggtctgacggcttgagtagcgctagggagaatccctgcaggtaatatttgacttttgcttcatattaatctgagtggaaaataaaagggccctcttctcctctcgcttccctgccgggcaggcgccatggcggaagcctcggcgacgggcgcctgcggagaggcgatggcagcggcggaaggctcctcgggcccggcgggcttgactctgggccggagcttctcgaactaccggcccttcgagccccaggaagccggcctgccggcaggagcgggccccagccccacctttccagccctgggcatcgggatggactcctgcgtcatccccctgaggcacgggggcctgtcactggtgcagaccacggacttcttttaccccttggtagaagatccctacatgatggggcgcatagcttgtgccaacgtgctgagtgacctctacgccatggggattactgagtgtgacaacatgttgatgttactcagcgtcagccagagtatgagtgaggaggaacgcgaaaaggtaacgccactcatggtcaaaggctttcgggatgcggctgaggaaggagggacggcagtgaccggtgggcaaacggtggtcaacccttggattataatcggtggagttgccactgtagtatgccaaccaaatgagttcataatgccggacagcgccgtcgttggggacgtgctggtgttaaccaaaccgttaggaacccaggttgctgtcaatgcccaccaatggctggataatcctgaaagatggaataaagtaaagatggtggtctccagagaagaggtggagctggcctatcaggaagccatgttcaatatggctaccctcaacagaactgctgcaggtttaatgcacacatttaatgcccatgcggccacagatatcacaggctttggcattctaggacactcccagaaccttgcaaaacaacaaagaaatgaagtgtcctttgttattcataatctgccaataattgccaagatggctgccgtcagcaaggccagtggacggtttgggcttcttcaaggaacctcagctgaaacctctgggggattactgatttgtctgccaagagaacaggcggctcgcttttgttctgaaatcaaatcctccaagtacggagagggtcaccaagcgtggatcgttggcattgtggaaaagggaaaccgaacggcccggatcattgacaagccgcgagttattgaagtcctgcctcgtggggccacagctgctgttcttgctcctgacagttcaaatgcctcctctgagcctagctcgtgagatgaaagaacagaagttgtttggaccttagagccattgtccacaatcacggatggttctcaagagttgattgtaagaaatttccaaagaaggctgcctgcatagtggttccggctgccctttctaggtgattggaatcagcccatctaaagcagtctttatatgcattccgaggccagagtaacattttgaactttggggggatatttgttcatcacttgggtagaagaggagcaaaaatacctctgttttctcttgccaaagtaagatgaagctattccaggttgagggatttttctttgcacggggttgattaatttctgcacagggagtgagattattaaagtaacacacacacaaagtaaattgcaaaatgaaaaaaattagaagcaaatgagttttggaccaatattgttgataaatctaaattgttaagagagatcttataatgcaacatcaaattctttattcaattttactgaagtactggctctttcctgctctggacaagaattgagcaacttgtctgatgactgggaaaggaggacctgcaaccatctgacttggtctctgttaatgacgtctctccctctaaaccccattaaggactgggagaggcagagcaagcctcagagcccaggcctcagtggtcattaagatgttaagtcttttgcggcagattcctggtgatttgatcaataaagagtaatttcttgctaaataaataaaagaaaccttgttg

SEQ ID NO: 173421 - DNA, 1200 bp, Artificial Sequence
  derived and/or modified sequence
atggccgaggccagcgccaccggcgcctgcggcgaggccatggccgccgccgagggcagcagcggccccgccggcctgaccctgggcagactgaccggcttcagcggcatgaagggcctggtgggcggccaggaggaggccagccaggaggccggcctgcccgccggcgccggccccagccccaccttccccgccctgggcatcggcatggacagctgcgtgatccccctgagacacggcggcctgagcctggtgcagaccaccgacttcttctaccccctggtggaggacccctacatgatgggcagaatcgcctgcgccaacgtgctgagcgacctgtacgccatgggcatcaccgagtgcgacaacatgctgatgctgctgagcgtgagccagagcatgagcgaggaggagagagagaaggtgacccccctgatggtgaagggcttcagagacgccgccgaggagggcggcaccgccgtgaccggcggccagaccgtggtgaacccctggatcatcatcggcggcgtggccaccgtggtgtgccagcccaacgagttcatcatgcccgacagcgccgtggtgggcgacgtgctggtgctgaccaagcccctgggcacccaggtggccgtgaacgcccaccagtggctggacaaccccgagagatggaacaaggtgaagatggtggtgagcagagaggaggtggagctggcctaccaggaggccatgttcaacatggccaccctgaacagaaccgccgccggcctgatgcacaccttcaacgcccacgccgccaccgacatcaccggcttcggcatcctgggccacagccagaacctggccaagcagcagagaaacgaggtgagcttcgtgatccacaacctgcccatcatcgccaagatggccgccgtgagcaaggccagcggcagattcggcctgctgcagggcaccagcgccgagaccagcggcggcctgctgatctgcctgcccagagagcaggccgccagattctgcagcgagatcaagagcagcaagtacggcgagggccaccaggcctggatcgtgggcatcgtggagaagggcaacagaaccgccagaatcatcgacaagcccagagtgatcgaggtgctgcccagaggcgccaccgccgccgtgctggcccccgacagcagcaacgccagcagcgagcccagcagctag

SEQ ID NO: 173422 - DNA, 1452 bp, Artificial Sequence
  derived and/or modified sequence
atggccgaggccagcgccaccggcgcctgcggcgaggccatggccgccgccgagggcagcagcggccccgccggcctgaccctgggcagaagcttcagcaactacagacccttcgagccccaggccctgggcctgagccccagctggagactgaccggcttcagcggcatgaagggctgaggctgcaaggtgccccaggaggccctgctgaagctgctggccggcctgaccagacccgacgtgagaccccccctgggcagaggcctggtgggcggccaggaggaggccagccaggaggccggcctgcccgccggcgccggccccagccccaccttccccgccctgggcatcggcatggacagctgcgtgatccccctgagacacggcggcctgagcctggtgcagaccaccgacttcttctaccccctggtggaggacccctacatgatgggcagaatcgcctgcgccaacgtgctgagcgacctgtacgccatgggcatcaccgagtgcgacaacatgctgatgctgctgagcgtgagccagagcatgagcgaggaggagagagagaaggtgacccccctgatggtgaagggcttcagagacgccgccgaggagggcggcaccgccgtgaccggcggccagaccgtggtgaacccctggatcatcatcggcggcgtggccaccgtggtgtgccagcccaacgagttcatcatgcccgacagcgccgtggtgggcgacgtgctggtgctgaccaagcccctgggcacccaggtggccgtgaacgcccaccagtggctggacaaccccgagagatggaacaaggtgaagatggtggtgagcagagaggaggtggagctggcctaccaggaggccatgttcaacatggccaccctgaacagaaccgccgccggcctgatgcacaccttcaacgcccacgccgccaccgacatcaccggcttcggcatcctgggccacagccagaacctggccaagcagcagagaaacgaggtgagcttcgtgatccacaacctgcccatcatcgccaagatggccgccgtgagcaaggccagcggcagattcggcctgctgcagggcaccagcgccgagaccagcggcggcctgctgatctgcctgcccagagagcaggccgccagattctgcagcgagatcaagagcagcaagtacggcgagggccaccaggcctggatcgtgggcatcgtggagaagggcaacagaaccgccagaatcatcgacaagcccagagtgatcgaggtgctgcccagaggcgccaccgccgccgtgctggcccccgacagcagcaacgccagcagcgagcccagcagctgagacgagagaaccgaggtggtgtggaccctggagcccctgagcaccatcaccgacggcagccaggagctgatcgtgagaaacttccagagaagactgcccgcctag

SEQ ID NO: 173423 - DNA, 1347 bp, Artificial Sequence
  derived and/or modified sequence
atggccgaggccagcgccaccggcgcctgcggcgaggccatggccgccgccgagggcagcagcggccccgccggcctgaccctgggcagaagcttcagcaactacagacccttcgagccccaggccctgggcctgagccccagctggagactgaccggcttcagcggcatgaagggctgaggctgcaaggtgccccaggaggccctgctgaagctgctggccggcctgaccagacccgacgtgagaccccccctgggcagaggcctggtgggcggccaggaggaggccagccaggaggccggcctgcccgccggcgccggccccagccccaccttccccgccctgggcatcggcatggacagctgcgtgatccccctgagacacggcggcctgagcctggtgcagaccaccgacttcttctaccccctggtggaggacccctacatgatgggcagaatcgcctgcgccaacgtgctgagcgacctgtacgccatgggcatcaccgagtgcgacaacatgctgatgctgctgagcgtgagccagagcatgagcgaggaggagagagagaaggtgacccccctgatggtgaagggcttcagagacgccgccgaggagggcggcaccgccgtgaccggcggccagaccgtggtgaacccctggatcatcatcggcggcgtggccaccgtggtgtgccagcccaacgagttcatcatgcccgacagcgccgtggtgggcgacgtgctggtgctgaccaagcccctgggcacccaggtggccgtgaacgcccaccagtggctggacaaccccgagagatggaacaaggtgaagatggtggtgagcagagaggaggtggagctggcctaccaggaggccatgttcaacatggccaccctgaacagaaccgccgccggcctgatgcacaccttcaacgcccacgccgccaccgacatcaccggcttcggcatcctgggccacagccagaacctggccaagcagcagagaaacgaggtgagcttcgtgatccacaacctgcccatcatcgccaagatggccgccgtgagcaaggccagcggcagattcggcctgctgcagggcaccagcgccgagaccagcggcggcctgctgatctgcctgcccagagagcaggccgccagattctgcagcgagatcaagagcagcaagtacggcgagggccaccaggcctggatcgtgggcatcgtggagaagggcaacagaaccgccagaatcatcgacaagcccagagtgatcgaggtgctgcccagaggcgccaccgccgccgtgctggcccccgacagcagcaacgccagcagcgagcccagcagctag

SEQ ID NO: 173424 - DNA, 1176 bp, Artificial Sequence
  derived and/or modified sequence
atggccgaggccagcgccaccggcgcctgcggcgaggccatggccgccgccgagggcagcagcggccccgccggcctgaccctgggcagaagcttcagcaactacagacccttcgagccccaggaggccggcctgcccgccggcgccggccccagccccaccttccccgccctgggcatcggcatggacagctgcgtgatccccctgagacacggcggcctgagcctggtgcagaccaccgacttcttctaccccctggtggaggacccctacatgatgggcagaatcgcctgcgccaacgtgctgagcgacctgtacgccatgggcatcaccgagtgcgacaacatgctgatgctgctgagcgtgagccagagcatgagcgaggaggagagagagaaggtgacccccctgatggtgaagggcttcagagacgccgccgaggagggcggcaccgccgtgaccggcggccagaccgtggtgaacccctggatcatcatcggcggcgtggccaccgtggtgtgccagcccaacgagttcatcatgcccgacagcgccgtggtgggcgacgtgctggtgctgaccaagcccctgggcacccaggtggccgtgaacgcccaccagtggctggacaaccccgagagatggaacaaggtgaagatggtggtgagcagagaggaggtggagctggcctaccaggaggccatgttcaacatggccaccctgaacagaaccgccgccggcctgatgcacaccttcaacgcccacgccgccaccgacatcaccggcttcggcatcctgggccacagccagaacctggccaagcagcagagaaacgaggtgagcttcgtgatccacaacctgcccatcatcgccaagatggccgccgtgagcaaggccagcggcagattcggcctgctgcagggcaccagcgccgagaccagcggcggcctgctgatctgcctgcccagagagcaggccgccagattctgcagcgagatcaagagcagcaagtacggcgagggccaccaggcctggatcgtgggcatcgtggagaagggcaacagaaccgccagaatcatcgacaagcccagagtgatcgaggtgctgcccagaggcgccaccgccgccgtgctggcccccgacagcagcaacgccagcagcgagcccagcagctag

SEQ ID NO: 173425 - protein, 205 aa, Artificial Sequence
  derived and/or modified sequence
MAHGPGALMLKCVVVGDGAVGKTCLLMSYANDAFPEEYVPTVFDHYAVSVTVGGKQYLLGLYDTAGQEDYDRLRPLSYPMTDVFLICFSVVNPASFQNVKEEWVPELKEYAPNVPFLLIGTQIDLRDDPKTLARLNDMKEKPICVEQGQKLAKEIGACCYVECSALTQKGLKTVFDEAIIAILTPKKHTVKKRIGSRCINCCLIT

SEQ ID NO: 173426 - DNA, 618 bp, Artificial Sequence
  derived and/or modified sequence
atggcccacggccccggcgccctgatgctgaagtgcgtggtggtgggcgacggcgccgtgggcaagacctgcctgctgatgagctacgccaacgacgccttccccgaggagtacgtgcccaccgtgttcgaccactacgccgtgagcgtgaccgtgggcggcaagcagtacctgctgggcctgtacgacaccgccggccaggaggactacgacagactgagacccctgagctaccccatgaccgacgtgttcctgatctgcttcagcgtggtgaaccccgccagcttccagaacgtgaaggaggagtgggtgcccgagctgaaggagtacgcccccaacgtgcccttcctgctgatcggcacccagatcgacctgagagacgaccccaagaccctggccagactgaacgacatgaaggagaagcccatctgcgtggagcagggccagaagctggccaaggagatcggcgcctgctgctacgtggagtgcagcgccctgacccagaagggcctgaagaccgtgttcgacgaggccatcatcgccatcctgacccccaagaagcacaccgtgaagaagagaatcggcagcagatgcatcaactgctgcctgatcacctag

SEQ ID NO: 173427 - DNA, 618 bp, Artificial Sequence
  derived and/or modified sequence
atggcccatggcccaggggcactgatgctgaaatgtgtcgtggtcggcgatggcgcagtgggaaagacatgtctgttgatgtcctatgctaatgatgcatttcctgaggagtatgtccccacagtcttcgaccactatgcagtgtctgtcacagtgggcggtaagcagtatcttttgggactctacgatacagctgggcaggaagactatgatagattgagacctttgagctatcctatgactgatgtcttcttgatttgcttctccgtcgtcaatccagcgtcttttcagaacgtaaaggaggagtgggtgcccgagctcaaagagtacgctcctaacgtgcccttcctcctgattggaacccagatcgatctccgggatgaccctaagactctcgctagacttaacgatatgaaagagaagcccatatgcgttgagcagggccaaaaactggccaaagagattggcgcttgctgctatgttgaatgctcggcactcacccagaaaggactcaaaaccgttttcgacgaagcaattattgcaatcctcacccccaagaaacacaccgttaagaagagaataggttctaggtgtatcaactgctgtcttataacctag

SEQ ID NO: 173428 - DNA, 618 bp, Artificial Sequence
  derived and/or modified sequence
atggcccacggccctggggccctgatgctgaagtgtgtggtggtgggagatggagctgtgggcaagacctgcctgctgatgtcctatgccaatgatgccttccctgaggagtatgtgcccaccgtgtttgaccactatgctgtgtctgtgacagtgggcggcaagcagtacctgctgggcctgtatgacacagctggccaggaggactatgaccggctgcggcccctgagctaccccatgacagatgtgttcctgatctgcttctctgtggtgaacccagccagcttccagaatgtgaaggaggagtgggtgcctgagctgaaggagtatgccccaaatgtgcccttcctgctgattggcacccagattgacctgagagatgaccccaagaccctggcccggctgaatgacatgaaggagaagcccatctgtgtggagcagggccagaagctggccaaggagattggagcctgctgctacgtggagtgcagcgccctgacccagaagggcctgaagacagtgtttgatgaggccatcatcgccatcctgacccccaagaagcacacagtgaagaagagaattggcagccgctgcatcaactgctgcctgatcacctag

SEQ ID NO: 173429 - DNA, 618 bp, Artificial Sequence
  derived and/or modified sequence
atggcccacggccccggcgccctgatgctgaagtgcgtggtggtgggggacggagccgtgggtaagacgtgtcttctgatgtcatacgccaacgatgccttccctgaggagtatgtgccaaccgtgtttgatcattacgctgtttcagtgactgtgggaggcaagcagtatcttttaggcctgtacgacacggccggccaagaagactacgatcgcctacggcccctcagctatcccatgactgacgtattcttaatctgcttcagcgttgtgaatcccgcctccttccagaatgtaaaagaggaatgggtgccggaactaaaggagtacgccccaaacgtgccctttctgcttatcggcactcagatcgaccttagagatgatccaaagacacttgcccgtttgaatgacatgaaagaaaaacctatctgcgtggaacaagggcagaaactggcgaaggagatcggagcctgttgctacgttgagtgctcagctctgacccaaaagggactgaagacggtgttcgatgaggctattatcgctatcctgacacccaaaaagcatacagtgaagaaacgcatcggatcacgctgcattaactgttgtctgatcacctag

SEQ ID NO: 173430 - DNA, 618 bp, Artificial Sequence
  derived and/or modified sequence
atggcacatggccctggcgctctcatgctgaagtgtgttgtcgttggggacggggctgtcggaaagacctgtctactaatgtcttacgcaaatgacgcctttccagaggaatatgttcccaccgtattcgaccattatgccgtcagcgtcactgtgggcggtaagcagtatttattggggctatacgacactgccggtcaggaagattatgatcggctccggccactgagctaccctatgactgatgtctttctcatttgcttctctgtggtgaatccggcatctttccagaatgttaaagaagagtgggttcccgagctgaaggaatacgcgccaaacgtgccttttctgctgatcggtacccagatagaccttcgcgatgacccaaagaccttagccaggctgaatgatatgaaagaaaagcccatttgcgttgaacaggggcagaaacttgctaaggaaattggcgcatgctgttacgtggagtgctccgcgcttactcagaaaggtctaaagaccgtgttcgacgaagccattattgcgatactaacacccaaaaaacacacagttaagaagaggataggtagtaggtgcataaattgctgtttgatcacctag

SEQ ID NO: 173431 - DNA, 2975 bp, Artificial Sequence
  derived and/or modified sequence
ccggtcttatgatccggcggatcctcctggggaggccgggccggggagagggcgcgggcgccgagtggcgggggcagcgggcgggcgcggcgaccggggccggggcggggatccgggcggcgaccgcggcggcggcagcgccccgggcccgccgccccctcccctcctgcgaggggagccgctgcatggggccgggggggcggccctgcggcgcggagcggcggcgacggcggcggaccccccaggcgggctggggctgagcccggggccggggcgggggctccggggggaccatgcccggaggccggccggcagcagcatggctcacgggcccggcgcgctgatgctcaagtgcgtggtggtcggcgacggggcggtgggcaagacgtgcctactcatgagctatgccaacgacgccttcccggaggagtacgtgcccaccgtcttcgaccactacgcagtcagcgtcaccgtggggggcaagcagtacctcctaggactctatgacacggccggacaggaagactatgaccgtctgaggcctttatcttacccaatgaccgatgtcttccttatatgcttctcggtggtaaatccagcctcatttcaaaatgtgaaagaggagtgggtaccggaacttaaggaatacgcaccaaatgtaccctttttattaataggaactcagattgatctccgagatgaccccaaaactttagcaagactgaatgatatgaaagaaaaacctatatgtgtggaacaaggacagaaactagcaaaagagataggagcatgctgctatgtggaatgttcagctttaacccagaagggattgaagactgtttttgatgaggctatcatagccattttaactccaaagaaacacactgtaaaaaaaagaataggatcaagatgtataaactgttgtttaattacgtgagaaacatcttcagtggccaaggaaactgtccatttctctcagaaagcaaatgaaatgctacagctatacccagaccttttataggtaatgaagcagttcaaaacttgaaagaaaacaaaacctgtcctcagaattctataaagtgtattaagaatgttccttaaaggtttaagaagcagtaagcagcatctgaagccacaatctattataaatactttatttcaactagaaggtacaatctctcaggggtttcatagtttaaaaagctacaatcacatcatgttgtaactacgtaaaaaacagagctgtaaatggaactgcttggctttgaccatacacatttctgcccagcccttacagaatctgcacaaagaaatatctccctttgctccagttaattgttcttgtatgtaagttgctttctattccagtatatccagagtggtgaaataacaaggccagccacgtagccaaaggtcgctccaagcgtacaggagatgggccatacctgaggagagaatgtatgagatcaaaaaagaacaaatgttttattattacttgagcacaagtgtaacctaaatatttctatattaaagcttaatgtgctttcttaaagaatgccaaaagtgtaataaggtcataactgcatttatcatgaacactaaaaatgtacacattttagttaatgtgcattaaactgtaacaaggcttctggcaattgtagatttagtttgacgctccccaaagtgcatgagacacatgctaaaattacaaattaaaattttgggtcagactttgccataatgatagactcaatttagctctctgaactagttggtaattttttttttttaattcccactttggctgtgtacatcaaatgaaatgagaagtgtgtatgctgaccaaaccacaagaaactttctttaagttgtgttaaagaggaaagacctagaatccaagcgtgttacatgaaaattgtaacagagcagctgcttccacctttcagatatagatgttggaaccacagcagaagttatagagcgacaacttatatacacacctagaatgtaagttaaacaaaataccggcttccagagaccccttttctccagccatattacatcaggctagaagtaattaatgttgatttatttcatctacaagcagttggtccctaagtgaaaggctctgcttgaaaaaaaaaagaaaaaaaagttggaggaaaattttcatgttcttctgtgaagcttatttggtacactggagccatttctaatctttctctggggggaacaggccacagaactgtgttagaggtgaaccatcttaattactagttctattacctaattcagcttccttgtttggtctgctgtggatctgccttattgcatatgccatgcatcagataatggatgcatcagataatggtgttagacaaagcttcattgtgaacaacctaatgcattttagagaaacaatctcatcacattttttctagcctttcctacatttaaacttgctgttgcccaaattataattttttaaatgtctttggtgggcttctgttaattcacatgacttgagcttatagctatgtctactgcacagattgggtaatggaacactaaacttttatacttgaaaatgacagccttaaatgctcatatcagtcacaaatctaggatgtactgtcttgttgtatgtgagctttgtagagatttttaaaaatataagcatcaccttcccattgaagagtggagagagtctactggatgactggccaggaactttctctctgaatcggacatttggatgtcttctttcttccaagaaatggtggttcacattaaagtatcatggccttatgtatgctcaaatggaatcttatgtaactttcttatttaattttggtctgcttatttttagataaaattgaaaggaattgtataaatcaattaacatattagctgagttgtccaacacatggtataaacgaattacaacagtaaactattacacatttccaacttgc

SEQ ID NO: 173432 - protein, 204 aa, Artificial Sequence
  derived and/or modified sequence
MAAAGWRDGSGQEKYRLVVVGGGGVGKSALTIQFIQSYFVTDYDPTIEDSYTKQCVIDDRAARLDILDTAGQEEFGAMREQYMRTGEGFLLVFSVTDRGSFEEIYKFQRQILRVKDRDEFPMILIGNKADLDHQRQVTQEEGQQLARQLKVTYMEASAKIRMNVDQAFHELVRVIRKFQEQECPPSPEPTRKEKDKKGCHCVIF

SEQ ID NO: 173433 - protein, 127 aa, Artificial Sequence
  derived and/or modified sequence
MREQYMRTGEGFLLVFSVTDRGSFEEIYKFQRQILRVKDRDEFPMILIGNKADLDHQRQVTQEEGQQLARQLKVTYMEASAKIRMNVDQAFHELVRVIRKFQEQECPPSPEPTRKEKDKKGCHCVIF

SEQ ID NO: 173434 - protein, 210 aa, Artificial Sequence
  derived and/or modified sequence
MAAAGWRDGSGQEKYRLVVVGGGGVGKSALTIQFIQFFLFLQSYFVTDYDPTIEDSYTKQCVIDDRAARLDILDTAGQEEFGAMREQYMRTGEGFLLVFSVTDRGSFEEIYKFQRQILRVKDRDEFPMILIGNKADLDHQRQVTQEEGQQLARQLKVTYMEASAKIRMNVDQAFHELVRVIRKFQEQECPPSPEPTRKEKDKKGCHCVIF

SEQ ID NO: 173435 - DNA, 615 bp, Artificial Sequence
  derived and/or modified sequence
atggccgcggcgggatggcgagatgggagcggacaggagaaatacaggctggtcgtcgtcgggggaggtggcgttggaaagtcagccttaacgatccagttcatccagtcttattttgtcactgactacgaccccaccatcgaggattcctacacaaagcagtgcgtgatcgacgatcgcgcggcaagattggatattttggacaccgctggccaagaggaattcggcgcaatgagggagcagtacatgcggaccggggaaggctttctgctggtcttctctgtgaccgatcgaggctcgtttgaggaaatctataagtttcaacgccagatcctgagggtgaaagatagggatgagtttccaatgattttaattggcaataaggcagaccttgatcatcaaagacaagtaacacaggaagagggccagcagctggcaaggcagctcaaggtgacatacatggaggcttcggccaagatacgcatgaacgttgaccaggcttttcacgaattggtgagagttatccgtaagttccaagaacaggagtgtcccccatctccagaacccacccgcaaagagaaggataagaaaggatgccattgtgtgatcttctag

SEQ ID NO: 173436 - DNA, 633 bp, Artificial Sequence
  derived and/or modified sequence
atggctgcagcagggtggcgcgacggaagcgggcaggaaaagtaccgcctggtggtggtcggcggcggaggggtgggaaagagcgctcttaccatccaattcatccagttcttccttttcctgcaatcatactttgtgacagattatgacccgactatcgaggacagctacactaagcagtgtgtaatcgatgacagagccgcaagactcgatatcctggatacggccggacaggaggagttcggagccatgagagagcaatacatgcggaccggcgaaggtttcctcctggttttctctgtcaccgataggggctcatttgaagagatctacaaattccagcgacagatcctgagggttaaagacagggacgagttccccatgatactgatcgggaacaaggccgatcttgatcaccagagacaggtcacacaggaagagggccagcagctcgcccggcagctaaaagtcacgtacatggaagcttctgccaagatccggatgaacgtcgatcaggcgttccatgaattggtcagggtaattagaaagttccaggagcaggaatgcccccctagcccagagccaaccaggaaagaaaaagataaaaagggatgtcactgcgtaattttttag

SEQ ID NO: 173437 - DNA, 615 bp, Artificial Sequence
  derived and/or modified sequence
atggctgctgctggctggagagatggcagcggccaggagaagtaccgcctggtggtggtgggcggcggcggcgtgggcaagagcgccctgaccatccagttcatccagagctactttgtgacagattatgaccccaccatcgaggacagctacaccaagcagtgtgtgattgatgacagagctgcccggctggacatcctggacacagctggccaggaggagtttggagccatgagggagcagtacatgaggactggagagggcttcctgctggtgttttctgtgacagaccggggcagctttgaggagatctacaagttccagaggcagatcctgcgggtgaaggacagagatgagttccccatgatcctgattggcaacaaggctgacctggaccaccagaggcaggtgacccaggaggagggccagcagctggcccggcagctgaaggtgacctacatggaggccagcgccaagatccgcatgaatgtggaccaggccttccacgagctggtgcgggtcatcaggaagttccaggagcaggagtgcccccccagccctgagcccaccaggaaggagaaggacaagaagggctgccactgtgtgatcttctag

SEQ ID NO: 173438 - DNA, 633 bp, Artificial Sequence
  derived and/or modified sequence
atggctgctgctggctggagagatggcagcggccaggagaagtaccgcctggtggtggtgggcggcggcggcgtgggcaagagcgccctgaccatccagttcatccagttcttcctgttcctgcagagctactttgtgacagattatgaccccaccatcgaggacagctacaccaagcagtgtgtgattgatgacagagctgcccggctggacatcctggacacagctggccaggaggagtttggagccatgagggagcagtacatgaggactggagagggcttcctgctggtgttttctgtgacagaccggggcagctttgaggagatctacaagttccagaggcagatcctgcgggtgaaggacagagatgagttccccatgatcctgattggcaacaaggctgacctggaccaccagaggcaggtgacccaggaggagggccagcagctggcccggcagctgaaggtgacctacatggaggccagcgccaagatccgcatgaatgtggaccaggccttccacgagctggtgcgggtcatcaggaagttccaggagcaggagtgcccccccagccctgagcccaccaggaaggagaaggacaagaagggctgccactgtgtgatcttctag

SEQ ID NO: 173439 - DNA, 615 bp, Artificial Sequence
  derived and/or modified sequence
atggccgccgccggctggcgggacggcagcggccaggagaagtaccgcctcgtggttgttggaggtgggggcgttggaaagagcgcactaaccatacagtttatacagtcttatttcgtgacagattatgatccgactatcgaggactcatacactaaacaatgcgtgattgacgaccgcgctgcccgactggatattctggataccgctggccaggaggagttcggtgccatgcgtgagcagtatatgcggaccggggaggggtttctattggttttttccgttacagatcgcggttcctttgaagaaatctacaaattccaacgacagatcctcagagtgaaagaccgagatgagttcccaatgatacttattggaaacaaagctgacctcgaccatcagagacaggtcactcaagaggagggtcagcagctagcccggcagctgaaggtaacgtacatggaagccagcgcaaagattcgtatgaacgttgatcaggcctttcacgaacttgtaagagtgatccgcaaattccaagagcaagagtgccccccttctccggaacccactcggaaggaaaaagacaagaagggctgccactgcgtcattttttag

SEQ ID NO: 173440 - DNA, 633 bp, Artificial Sequence
  derived and/or modified sequence
atggccgccgccggctggcgggacggcagcggccaggagaagtaccgactcgttgtagtcggcggcggtggagtcggtaaatccgccctcaccatccagtttatccagttttttctcttcctccagtcatactttgtcaccgattacgacccaacgattgaggacagttacacaaaacagtgcgtgatagatgatcgggccgctcggctagacatattggacacggcagggcaggaggaattcggcgctatgcgcgagcagtacatgagaactggcgagggttttctcctggtcttcagcgtgaccgaccgaggatcctttgaagagatttacaagtttcagcgccaaatcctcagggtgaaggatcgggatgagtttcctatgatcctgattgggaataaggctgatctggaccaccaacgccaagtgactcaggaggaggggcaacagttggcacgacagctgaaagtgacctatatggaggccagcgctaagatccgcatgaacgtggaccaggccttccacgagctagtacgcgttataagaaaattccaagagcaggagtgtcccccttccccagagcctactcgtaaagagaaagataagaaaggatgtcactgcgtgatattctag

SEQ ID NO: 173441 - DNA, 615 bp, Artificial Sequence
  derived and/or modified sequence
atggcagccgcaggatggagagatggttcagggcaggaaaaataccgcctcgtggtcgtcggcggagggggagtggggaagtccgccctgacaatccagttcatccagtcttactttgtgacggactatgaccccacaatcgaagacagttacacaaagcaatgcgtgattgacgatagggcagccagactcgatatcctggacacagccggtcaagaagagtttggcgctatgcgagagcaatatatgcgcacgggcgaaggattcctgctggtgttctctgtgactgaccgcggatcctttgaagaaatctataagtttcagcggcaaatcctcagagtgaaagatcgtgacgaattcccaatgatattgattggaaataaggcggatctggatcaccaacgacaggtcacacaagaagagggccagcagttggctaggcaactgaaggtgacgtacatggaagcctctgctaaaatccgaatgaacgtcgaccaagccttccacgaactggtgcgggtaatccgaaagttccaggaacaggaatgccccccatcgcccgaaccaacacgaaaggaaaaggacaaaaagggatgccattgtgtcattttttag

SEQ ID NO: 173442 - DNA, 633 bp, Artificial Sequence
  derived and/or modified sequence
atggccgcagccggatggagggatggctccgggcaggaaaagtataggttggttgtcgttggtggagggggagtcggcaagagcgctttaacgatccagtttatccagttctttctgttcctgcagtcgtatttcgtcaccgattacgacccgacaattgaggattcttataccaaacagtgcgtgattgatgaccgtgctgcgagattggatattctggacaccgcgggtcaagaggagtttggtgctatgagggagcagtacatgcggacaggtgagggcttcctgctggtgttcagcgttacagacagggggagctttgaggaaatttataagttccaaagacagatcctgcgtgttaaggacagagacgagttcccaatgattctgattggaaataaggccgacctggatcatcagaggcaagtgacccaggaagaggggcagcagttggcaagacagctgaaggtgacttacatggaagctagcgccaagatccggatgaacgttgatcaggcattccacgagctggtccgggtcattcgcaagtttcaggagcaggagtgccccccaagtcctgagccaactcgcaaagaaaaggacaagaaagggtgccattgtgtgatcttctag

SEQ ID NO: 173443 - DNA, 1516 bp, Artificial Sequence
  derived and/or modified sequence
cagacggccatttgtggcggcgctggaggctgcgttcggcaggcgctgcggagacgcgtagaggagcgcgccccccggccgctgccgcccctggcccgtgccgtcaccccgcttctccgcgcctcgggcggtacccagccagtccccagcgccgcgctaccgcgctgaccggccctccagacgcctcccggtacccgggaccccagcccggccgctcgcccgcagcccgccggccgcacacgtccccggagccgggcctagggcgggcggcagcggcggctcggcgcagtcaggctgggctctgtagcgtccccatggccgcggccggctggcgggacggctccggccaggagaagtaccggctcgtggtggtcggcgggggcggcgtgggcaagtcggcgctcaccatccagttcatccagtcctattttgtaacggattatgatccaaccattgaagattcttacacaaagcagtgtgtgatagatgacagagcagcccggctagatattttggatacagcaggacaagaagagtttggagccatgagagaacagtatatgaggactggcgaaggcttcctgttggtcttttcagtcacagatagaggcagttttgaagaaatctataagtttcaaagacagattctcagagtaaaggatcgtgatgagttcccaatgattttaattggtaataaagcagatctggatcatcaaagacaggtaacacaggaagaaggacaacagttagcacggcagcttaaggtaacatacatggaggcatcagcaaagattaggatgaatgtagatcaagctttccatgaacttgtccgggttatcaggaaatttcaagagcaggaatgtcctccttcaccagaaccaacacggaaagaaaaagacaagaaaggctgccattgtgtcattttctagaatcccttcagttttagctaccaacggccaggaaaagccctcatcttctctttctctcctcagtttacatcttgttggtacctttctagccttagacaaatgatcaccatgttagccttagacgaagaagctggctagtcctttctgtgaagctaatacaatggtcatttccagacaaatttaaaggaaacactaaggctgcttcaaagattatctgattcctttaaaatatatgtctatatacacagacatgctctttttttaagtgcttacattttaatagagatgaatcagttttggaatctaagctgtttgccaagctgaagctacaggttgtgaaataatttttaacttttggaatcatactgcctactgttactctaaatagaaatatagggttttttttaatgtgaatttttgcctatctttaaacatttcaatgtcagcctttgttaaccttaaatacactgaattgaatctacaaaagtgaaccatctcagacctttactgatactacaacttttgttttctgatggccaaaataccaaatgcctgttgtatttatggattaaaaactgcttataaaa

SEQ ID NO: 173444 - DNA, 1884 bp, Artificial Sequence
  derived and/or modified sequence
gcagtcctattttgtaacggattatgatccaaccattgaagattcttacacaaagcagtgtgtgatagatgacagagcagcccggctagatattttggatacagcaggacaagaagagtttggagccatgagagaacagtatatgaggactggcgaaggcttcctgttggtcttttcagtcacagatagaggcagttttgaagaaatctataagtttcaaagacagattctcagagtaaaggatcgtgatgagttcccaatgattttaattggtaataaagcagatctggatcatcaaagacaggtaacacaggaagaaggacaacagttagcacggcagcttaaggtaacatacatggaggcatcagcaaagattaggatgaatgtagatcaagctttccatgaacttgtccgggttatcaggaaatttcaagagcaggaatgtcctccttcaccagaaccaacacggaaagaaaaagacaagaaaggctgccattgtgtcattttctagaatcccttcagttttagctaccaacggccaggaaaagccctcatcttctctttctctcctcagtttacatcttgttggtacctttctagccttagacaaatgatcaccatgttagccttagacgaagaagctggctagtcctttctgtgaagctaatacaatggtcatttccagacaaatttaaaggaaacactaaggctgcttcaaagattatctgattcctttaaaatatatgtctatatacacagacatgctctttttttaagtgcttacattttaatagagatgaatcagttttggaatctaagctgtttgccaagctgaagctacaggttgtgaaataatttttaacttttggaatcatactgcctactgttactctaaatagaaatatagggttttttttaatgtgaatttttgcctatctttaaacatttcaatgtcagcctttgttaaccttaaatacactgaattgaatctacaaaagtgaaccatctcagacctttactgatactacaacttttgttttctgatggccaaaataccaaatgcctgttgtatttatggattaaaaactgcttataaaaccctgtgttactactcctactcttggagatgataatattctatgtggtcaaatatttggactcatttaggacttagatatttcagtgtacttgattttttaatttaactctttttcacagccacgctaagggtaaaaaggaataatttccttctgtcttccttttcaagtatttctgggtaagggattcaaaaaactaaaactgtttttgtttgtaatataaaatatggaattgatctttccagggtcagagatgattaatgtttttgctatatacttttatacattattttcttatcaaactagttaacaagtatttttatatgtttgtaagcagatatgctttcatagcataccttgtgtatatgtaaagataagtatttaattctcactgttcacttttaactgacaaagaaaaacaagtggaaactacagaaactgtggtagaacttttacttgctggtctggtcttggttgtacccatctttggccagtcacataactactcaagaaaccttcccaatagagtacaacaggatgagactctgaaatcactttcagtattccctgctagatattgattgttatttcaagtattaagtgtaagcttttaatggataattagtataactgtggatggcatctgattttgtttttaattctgtggattgtgtttaagcaattcaatagtatgttcctgattttgagatgctaagtggtattgcacagttgtcactttatcaagtgtgtacaacagtcccatgaagtttatagagcatacccttgt

SEQ ID NO: 173445 - DNA, 970 bp, Artificial Sequence
  derived and/or modified sequence
attgctctggccgaggccagagacctccgggagaggctgggccaccgagccgggctttactgctccgagggtccgggcgtggggctggagctggagccccgcgcgctgcttttccagccgcctgcggccgcgccttcaccgtcggggcgatagcggtggcaacttggccgcggctccgcgtggtctccgggcttccccgcgccgcctgagccggagctgcccgcttcaatcctattttgtaacggattatgatccaaccattgaagattcttacacaaagcagtgtgtgatagatgacagagcagcccggctagatattttggatacagcaggacaagaagagtttggagccatgagagaacagtatatgaggactggcgaaggcttcctgttggtcttttcagtcacagatagaggcagttttgaagaaatctataagtttcaaagacagattctcagagtaaaggatcgtgatgagttcccaatgattttaattggtaataaagcagatctggatcatcaaagacaggtaacacaggaagaaggacaacagttagcacggcagcttaaggtaacatacatggaggcatcagcaaagattaggatgaatgtagatcaagctttccatgaacttgtccgggttatcaggaaatttcaagagcaggaatgtcctccttcaccagaaccaacacggaaagaaaaagacaagaaaggctgccattgtgtcattttctagaatcccttcagttttagctaccaacggccaggaaaagccctcatcttctctttctctcctcagtttacatcttgttggtacctttctagccttagacaaatgatcaccatgttagccttagacgaagaagctggctagtcctttctgtgaagctaatacaatggtcatttccagacaaatttaaaggaaacactaaggctgcttcaaagattatctgattcctttaaaatatat

SEQ ID NO: 173446 - DNA, 982 bp, Artificial Sequence
  derived and/or modified sequence
attgctctggccgaggccagagacctccgggagaggctgggccaccgagccgggctttactgctccgagggtccgggcgtggggctggagctggagccccgcgcgctgcttttccagccgcctgcggccgcgccttcaccgtcggggcgatagcggtggcaacttggccgcggctccgcgtggtctccgggcttccccgcgccgcctgagccggagctgcccgcttcaagtactgtgtatttctttgttcctattttgtaacggattatgatccaaccattgaagattcttacacaaagcagtgtgtgatagatgacagagcagcccggctagatattttggatacagcaggacaagaagagtttggagccatgagagaacagtatatgaggactggcgaaggcttcctgttggtcttttcagtcacagatagaggcagttttgaagaaatctataagtttcaaagacagattctcagagtaaaggatcgtgatgagttcccaatgattttaattggtaataaagcagatctggatcatcaaagacaggtaacacaggaagaaggacaacagttagcacggcagcttaaggtaacatacatggaggcatcagcaaagattaggatgaatgtagatcaagctttccatgaacttgtccgggttatcaggaaatttcaagagcaggaatgtcctccttcaccagaaccaacacggaaagaaaaagacaagaaaggctgccattgtgtcattttctagaatcccttcagttttagctaccaacggccaggaaaagccctcatcttctctttctctcctcagtttacatcttgttggtacctttctagccttagacaaatgatcaccatgttagccttagacgaagaagctggctagtcctttctgtgaagctaatacaatggtcatttccagacaaatttaaaggaaacactaaggctgcttcaaagattatctgattcctttaa

SEQ ID NO: 173447 - DNA, 2358 bp, Artificial Sequence
  derived and/or modified sequence
cagacggccatttgtggcggcgctggaggctgcgttcggcaggcgctgcggagacgcgtagaggagcgcgccccccggccgctgccgcccctggcccgtgccgtcaccccgcttctccgcgcctcgggcggtacccagccagtccccagcgccgcgctaccgcgctgaccggccctccagacgcctcccggtacccgggaccccagcccggccgctcgcccgcagcccgccggccgcacacgtccccggagccgggcctagggcgggcggcagcggcggctcggcgcagtcaggctgggctctgtagcgtccccatggccgcggccggctggcgggacggctccggccaggagaagtaccggctcgtggtggtcggcgggggcggcgtgggcaagtcggcgctcaccatccagttcatccagttttttcttttcttgcagtcctattttgtaacggattatgatccaaccattgaagattcttacacaaagcagtgtgtgatagatgacagagcagcccggctagatattttggatacagcaggacaagaagagtttggagccatgagagaacagtatatgaggactggcgaaggcttcctgttggtcttttcagtcacagatagaggcagttttgaagaaatctataagtttcaaagacagattctcagagtaaaggatcgtgatgagttcccaatgattttaattggtaataaagcagatctggatcatcaaagacaggtaacacaggaagaaggacaacagttagcacggcagcttaaggtaacatacatggaggcatcagcaaagattaggatgaatgtagatcaagctttccatgaacttgtccgggttatcaggaaatttcaagagcaggaatgtcctccttcaccagaaccaacacggaaagaaaaagacaagaaaggctgccattgtgtcattttctagaatcccttcagttttagctaccaacggccaggaaaagccctcatcttctctttctctcctcagtttacatcttgttggtacctttctagccttagacaaatgatcaccatgttagccttagacgaagaagctggctagtcctttctgtgaagctaatacaatggtcatttccagacaaatttaaaggaaacactaaggctgcttcaaagattatctgattcctttaaaatatatgtctatatacacagacatgctctttttttaagtgcttacattttaatagagatgaatcagttttggaatctaagctgtttgccaagctgaagctacaggttgtgaaataatttttaacttttggaatcatactgcctactgttactctaaatagaaatatagggttttttttaatgtgaatttttgcctatctttaaacatttcaatgtcagcctttgttaaccttaaatacactgaattgaatctacaaaagtgaaccatctcagacctttactgatactacaacttttgttttctgatggccaaaataccaaatgcctgttgtatttatggattaaaaactgcttataaaaccctgtgttactactcctactcttggagatgataatattctatgtggtcaaatatttggactcatttaggacttagatatttcagtgtacttgattttttaatttaactctttttcacagccacgctaagggtaaaaaggaataatttccttctgtcttccttttcaagtatttctgggtaagggattcaaaaaactaaaactgtttttgtttgtaatataaaatatggaattgatctttccagggtcagagatgattaatgtttttgctatatacttttatacattattttcttatcaaactagttaacaagtatttttatatgtttgtaagcagatatgctttcatagcataccttgtgtatatgtaaagataagtatttaattctcactgttcacttttaactgacaaagaaaaacaagtggaaactacagaaactgtggtagaacttttacttgctggtctggtcttggttgtacccatctttggccagtcacataactactcaagaaaccttcccaatagagtacaacaggatgagactctgaaatcactttcagtattccctgctagatattgattgttatttcaagtattaagtgtaagcttttaatggataattagtataactgtggatggcatctgattttgtttttaattctgtggattgtgtttaagcaattcaatagtatgttcctgattttgagatgctaagtggtattgcacagttgtcactttatcaagtgtgtacaacagtcccatgaagtttatagagcatacccttgtatagcttcaggtgctagaattaaaattgatctgttatc

SEQ ID NO: 173448 - DNA, 615 bp, Artificial Sequence
  derived and/or modified sequence
atggccgccgccggctggagagacggcagcggccaggagaagtacagactggtggtggtgggcggcggcggcgtgggcaagagcgccctgaccatccagttcatccagagctacttcgtgaccgactacgaccccaccatcgaggacagctacaccaagcagtgcgtgatcgacgacagagccgccagactggacatcctggacaccgccggccaggaggagttcggcgccatgagagagcagtacatgagaaccggcgagggcttcctgctggtgttcagcgtgaccgacagaggcagcttcgaggagatctacaagttccagagacagatcctgagagtgaaggacagagacgagttccccatgatcctgatcggcaacaaggccgacctggaccaccagagacaggtgacccaggaggagggccagcagctggccagacagctgaaggtgacctacatggaggccagcgccaagatcagaatgaacgtggaccaggccttccacgagctggtgagagtgatcagaaagttccaggagcaggagtgcccccccagccccgagcccaccagaaaggagaaggacaagaagggctgccactgcgtgatcttctag

SEQ ID NO: 173449 - DNA, 633 bp, Artificial Sequence
  derived and/or modified sequence
atggccgccgccggctggagagacggcagcggccaggagaagtacagactggtggtggtgggcggcggcggcgtgggcaagagcgccctgaccatccagttcatccagttcttcctgttcctgcagagctacttcgtgaccgactacgaccccaccatcgaggacagctacaccaagcagtgcgtgatcgacgacagagccgccagactggacatcctggacaccgccggccaggaggagttcggcgccatgagagagcagtacatgagaaccggcgagggcttcctgctggtgttcagcgtgaccgacagaggcagcttcgaggagatctacaagttccagagacagatcctgagagtgaaggacagagacgagttccccatgatcctgatcggcaacaaggccgacctggaccaccagagacaggtgacccaggaggagggccagcagctggccagacagctgaaggtgacctacatggaggccagcgccaagatcagaatgaacgtggaccaggccttccacgagctggtgagagtgatcagaaagttccaggagcaggagtgcccccccagccccgagcccaccagaaaggagaaggacaagaagggctgccactgcgtgatcttctag

SEQ ID NO: 173450 - DNA, 1044 bp, Artificial Sequence
  derived and/or modified sequence
atgaccctggaccaccagatcataaaccccacactcaaatggtctcaacctgcggttcccagcggcgggcccctggttcaacacgctcatacaaccttagacagtgatgcgggtttaaccgaaaaccctctgacgaagctgctggccatcggaaaggaggatgacaacgcccagtggcacatggaagatgttattgaggacattatcggtatggagtcttccttcaaggaggaaggtgctgactctccactgctcatgcagcggacactgagcggatcaatactggatgtgtattctggggaacagggtatatcacctatcaatatgggtctcacttcagcctcatgtccctcttccctcccaatgaaacgagagatcacagagacagatacaagagctctggccaaggagcgccaaaaaaaggataatcacaacctgatcgaacgccgtcggcgatacaatatcaattatcggattaaagagcttggaactttaataccgaagagtaatgacccagatatgcggtggaacaaagggactatactgaaggcaagcgtggagtacatcaagtggcttcaaaaagagcagcagcgagccagagagctggaacaccggcagaagaagctggagcaagcaaatcgcagactcttgcttcgtatacaggaactcgagatccaggctcgcactcatggattacccacactggccagccttgggaccgtagatctgggcgcacacgtgaccaagcagcaatctcaccctgaacaaaactcagtggactattgtcagcagcttacagtgtcccaaggtcctagtccggagttatgcgatcaggctatcgcgttttctgaccccctcagttatttcactgatttatcattcagtgctgccttaaaagaagagcagagattggatgggatgttgctcgacgacaccatcagtcctttcggcactgatcccctcctgtccgcaacatcaccggctgtctcaaaagagagttctcggcgttcttcgttcagcagcgatgatggcgacgaattgtag

SEQ ID NO: 173451 - DNA, 1044 bp, Artificial Sequence
  derived and/or modified sequence
atgaccctggaccaccagatcatcaaccccaccctgaagtggagccagcctgctgtgcccagcggcggccccctggtgcagcacgcccacaccaccctggacagtgatgctggcctgacagagaaccccctgaccaagctgctggccatcggcaaggaggatgacaatgcccagtggcacatggaggatgtgattgaggacatcatcggcatggagagcagcttcaaggaggagggcgctgacagccccctgctgatgcagaggaccctgagcggcagcatcctggatgtgtacagcggggagcagggcatcagccccatcaacatgggcctgaccagcgccagctgccccagcagcctgcccatgaagcgggagatcacagaaacagacacccgggccctggccaaggagcggcagaagaaggacaaccacaacctgattgaaagaagaagacgctacaacatcaactaccgcatcaaggagctgggcaccctcatccccaagagcaatgaccctgacatgcgctggaacaagggcaccatcctgaaggcctctgtggagtacatcaagtggctgcagaaggagcagcagagggcccgggagctggagcaccggcagaagaagctggagcaggccaacagaaggctgctgctgcgcatccaggagctggagatccaggcccggacccacggcctgcccaccctggccagcctgggcaccgtggacctgggcgcccacgtgaccaagcagcagagccaccctgagcagaacagcgtggactactgccagcagctgactgtgtcccagggccccagccctgagctgtgtgaccaggccatcgccttcagtgaccccctgagctacttcacagacctgtccttctctgctgccctgaaggaggagcagaggctggatggcatgctgctggatgacaccatcagccccttcggcacagaccccctgctgagcgccaccagccctgctgtgtccaaggagagcagcagaagaagcagcttcagcagtgatgatggagatgagctgtag

SEQ ID NO: 173452 - DNA, 1044 bp, Artificial Sequence
  derived and/or modified sequence
atgaccctggaccaccagatcatcaaccccaccctgaagtggagccagcccgccgtgccaagtggagggcccctcgtacagcacgctcacacgactttagatagcgatgctgggttgacagagaaccctcttaccaagctgctggccatcggaaaggaagatgataatgctcaatggcacatggaggatgtgattgaagatattatcggaatggagtcaagttttaaggaggaaggcgctgacagtcccctgctgatgcaacgaacactttctggatcaatcctggacgtatacagtggcgaacaggggataagtccaatcaacatgggccttacctctgcgagctgcccatccagtctgcccatgaaacgggagatcaccgaaaccgacactagggcgctcgccaaggaacgccagaagaaagataaccataatttaatcgaaagacgtcgcagatataatattaactaccgcattaaggagttaggaacgttgatccctaagagcaatgacccagatatgcgatggaacaagggaaccatcctaaaggccagcgtggagtacatcaagtggctgcaaaaggaacaacagcgggcaagggagctggagcacaggcagaagaagttggaacaggcgaacagacgcctgctcttacggatccaagagctcgaaatacaggctaggacccacggcctgcccacccttgcatcgctggggaccgtggacttaggcgcccatgtgacaaagcagcagagccatcctgaacagaatagcgtggactattgccagcagttaacagtctctcagggaccgagccctgagctgtgcgaccaggcgatcgctttctcagatcctttatcttacttcacagacctcagtttttccgcagctctcaaagaagaacagcggttggacggtatgctccttgacgacaccatttcaccctttgggacagaccctcttctctccgctacttctcccgccgtaagtaaagaatcgtccaggcggagttctttcagcagcgatgacggggacgagttgtag

SEQ ID NO: 173453 - DNA, 1044 bp, Artificial Sequence
  derived and/or modified sequence
atgaccctggaccaccagattatcaatcctacacttaaatggagtcagcctgccgtgccctctgggggacccctggtacaacatgcgcacactactctcgattcagacgctggccttacagaaaacccgttgaccaaactcctggccataggcaaagaggacgacaatgctcagtggcacatggaggatgtgatagaagatatcatcgggatggagtcatcttttaaagaggaaggagccgacagtccattactaatgcaacgcaccctgtccggtagcattctagacgtttattctggggagcagggtatatccccgattaacatgggtctgacaagcgcctcttgcccgagttccctgccaatgaagagggagattaccgagactgatacacgggctttagccaaggaacgtcagaaaaaagataaccacaacctaattgagcgtaggcgtaggtataacataaattacagaatcaaggaactcgggacattaatacccaaatccaacgacccagatatgcgatggaataagggcaccatcttgaaagcgagcgtagaatatattaagtggttgcagaaggaacagcagcgtgcacgggagctggagcacagacagaaaaagctcgagcaggctaaccggaggctgctgctgcgcatccaggagctggaaatccaggcaaggacccacggactgcccactctggcctcgctgggcaccgtggatctaggagcacacgtgaccaagcagcaatcccaccccgaacagaacagcgttgactactgccagcagctcacagtgtcccagggaccatctcctgaactttgcgatcaggccatagccttttccgacccactctcttacttcacagaccttagtttctccgccgctctgaaggaagaacagcgcctggacgggatgttgctggacgatacaatcagccctttcggaacagaccccctgctcagtgccacgagccccgcagtgagcaaagaaagttcaaggcgatcatcattctcttcagatgatggcgacgagctctag

SEQ ID NO: 173454 - DNA, 1044 bp, Artificial Sequence
  derived and/or modified sequence
atgaccctggaccaccagatcatcaaccccaccctgaagtggagccagcccgccgtgcccagcggcggccccctggtgcagcacgcccacaccaccctggacagcgacgccggcctgaccgagaaccccctgaccaagctgctggccatcggcaaggaggacgacaacgcccagtggcacatggaggacgtgatcgaggacatcatcggcatggagagcagcttcaaggaggagggcgccgacagccccctgctgatgcagagaaccctgagcggcagcatcctggacgtgtacagcggcgagcagggcatcagccccatcaacatgggcctgaccagcgccagctgccccagcagcctgcccatgaagagagagatcaccgagaccgacaccagagccctggccaaggagagacagaagaaggacaaccacaacctgatcgagagaagaagaagatacaacatcaactacagaatcaaggagctgggcaccctgatccccaagagcaacgaccccgacatgagatggaacaagggcaccatcctgaaggccagcgtggagtacatcaagtggctgcagaaggagcagcagagagccagagagctggagcacagacagaagaagctggagcaggccaacagaagactgctgctgagaatccaggagctggagatccaggccagaacccacggcctgcccaccctggccagcctgggcaccgtggacctgggcgcccacgtgaccaagcagcagagccaccccgagcagaacagcgtggactactgccagcagctgaccgtgagccagggccccagccccgagctgtgcgaccaggccatcgccttcagcgaccccctgagctacttcaccgacctgagcttcagcgccgccctgaaggaggagcagagactggacggcatgctgctggacgacaccatcagccccttcggcaccgaccccctgctgagcgccaccagccccgccgtgagcaaggagagcagcagaagaagcagcttcagcagcgacgacggcgacgagctgtag

SEQ ID NO: 173455 - protein, 596 aa, Artificial Sequence
  derived and/or modified sequence
MADAEARAEFPEEARPDRGTLQVLQDMASRLRIHSIRATCSTSSGHPTSCSSSSEIMSVLFFYIMRYKQSDPENPDNDRFVLAKRLSFVDVATGWLGQGLGVACGMAYTGKYFDRASYRVFCLMSDGESSEGSVWEAMAFASYYSLDNLVAIFDVNRLGHSGALPAEHCINIYQRRCEAFGWNTYVVDGRDVEALCQVFWQASQVKHKPTAVVAKTFKGRGTPSIEDAESWHAKPMPRERADAIIKLIESQIQTSRNLDPQPPIEDSPEVNITDVRMTSPPDYRVGDKIATRKACGLALAKLGYANNRVVVLDGDTRYSTFSEIFNKEYPERFIECFMAEQNMVSVALGCASRGRTIAFASTFAAFLTRAFDHIRIGGLAESNINIIGSHCGVSVGDDGASQMALEDIAMFRTIPKCTIFYPTDAVSTEHAVALAANAKGMCFIRTTRPETMVIYTPQERFEIGQAKVLRHCVSDKVTVIGAGITVYEALAAADELSKQDIFIRVIDLFTIKPLDVATIVSSAKATEGRIITVEDHYPQGGIGEAVCAAVSMDPDIQVHSLAVSGVPQSGKSEELLDMYGISARHIIVAVKCMLLN

SEQ ID NO: 173456 - protein, 540 aa, Artificial Sequence
  derived and/or modified sequence
MSVLFFYIMRYKQSDPENPDNDRFVLAKRLSFVDVATGWLGQGLGVACGMAYTGKYFDRASYRVFCLMSDGESSEGSVWEAMAFASYYSLDNLVAIFDVNRLGHSGALPAEHCINIYQRRCEAFGWNTYVVDGRDVEALCQVFWQASQVKHKPTAVVAKTFKGRGTPSIEDAESWHAKPMPRERADAIIKLIESQIQTSRNLDPQPPIEDSPEVNITDVRMTSPPDYRVGDKIATRKACGLALAKLGYANNRVVVLDGDTRYSTFSEIFNKEYPERFIECFMAEQNMVSVALGCASRGRTIAFASTFAAFLTRAFDHIRIGGLAESNINIIGSHCGVSVGDDGASQMALEDIAMFRTIPKCTIFYPTDAVSTEHAVALAANAKGMCFIRTTRPETMVIYTPQERFEIGQAKVLRHCVSDKVTVIGAGITVYEALAAADELSKQDIFIRVIDLFTIKPLDVATIVSSAKATEGRIITVEDHYPQGGIGEAVCAAVSMDPDIQVHSLAVSGVPQSGKSEELLDMYGISARHIIVAVKCMLLN

SEQ ID NO: 173457 - DNA, 1791 bp, Artificial Sequence
  derived and/or modified sequence
atggccgacgccgaggccagagccgagttccccgaggaggccagacccgacagaggcaccctgcaggtgctgcaggacatggccagcagactgagaatccacagcatcagagccacctgcagcaccagcagcggccaccccaccagctgcagcagcagcagcgagatcatgagcgtgctgttcttctacatcatgagatacaagcagagcgaccccgagaaccccgacaacgacagattcgtgctggccaagagactgagcttcgtggacgtggccaccggctggctgggccagggcctgggcgtggcctgcggcatggcctacaccggcaagtacttcgacagagccagctacagagtgttctgcctgatgagcgacggcgagagcagcgagggcagcgtgtgggaggccatggccttcgccagctactacagcctggacaacctggtggccatcttcgacgtgaacagactgggccacagcggcgccctgcccgccgagcactgcatcaacatctaccagagaagatgcgaggccttcggctggaacacctacgtggtggacggcagagacgtggaggccctgtgccaggtgttctggcaggccagccaggtgaagcacaagcccaccgccgtggtggccaagaccttcaagggcagaggcacccccagcatcgaggacgccgagagctggcacgccaagcccatgcccagagagagagccgacgccatcatcaagctgatcgagagccagatccagaccagcagaaacctggacccccagccccccatcgaggacagccccgaggtgaacatcaccgacgtgagaatgaccagcccccccgactacagagtgggcgacaagatcgccaccagaaaggcctgcggcctggccctggccaagctgggctacgccaacaacagagtggtggtgctggacggcgacaccagatacagcaccttcagcgagatcttcaacaaggagtaccccgagagattcatcgagtgcttcatggccgagcagaacatggtgagcgtggccctgggctgcgccagcagaggcagaaccatcgccttcgccagcaccttcgccgccttcctgaccagagccttcgaccacatcagaatcggcggcctggccgagagcaacatcaacatcatcggcagccactgcggcgtgagcgtgggcgacgacggcgccagccagatggccctggaggacatcgccatgttcagaaccatccccaagtgcaccatcttctaccccaccgacgccgtgagcaccgagcacgccgtggccctggccgccaacgccaagggcatgtgcttcatcagaaccaccagacccgagaccatggtgatctacaccccccaggagagattcgagatcggccaggccaaggtgctgagacactgcgtgagcgacaaggtgaccgtgatcggcgccggcatcaccgtgtacgaggccctggccgccgccgacgagctgagcaagcaggacatcttcatcagagtgatcgacctgttcaccatcaagcccctggacgtggccaccatcgtgagcagcgccaaggccaccgagggcagaatcatcaccgtggaggaccactacccccagggcggcatcggcgaggccgtgtgcgccgccgtgagcatggaccccgacatccaggtgcacagcctggccgtgagcggcgtgccccagagcggcaagagcgaggagctgctggacatgtacggcatcagcgccagacacatcatcgtggccgtgaagtgcatgctgctgaactag

SEQ ID NO: 173458 - DNA, 1791 bp, Artificial Sequence
  derived and/or modified sequence
atggctgacgcagaggccagggcagaatttccggaagaagcgaggccagaccgcggtacactgcaggtcctgcaggacatggcctccagattaagaatacacagtatccgggccacatgcagcacaagcagcggccacccaacctcctgttcatcttcctctgaaattatgtctgtgttatttttttatataatgcggtacaaacagtcagatcccgagaaccctgataacgacagatttgtcctcgcgaagcgcctgtccttcgttgacgtagccacaggctggctaggacagggactgggagtggcttgtggaatggcgtatacgggtaagtatttcgaccgagcctcctatcgggtgttctgcctgatgagtgacggtgaatcctcggagggatccgtttgggaagccatggctttcgcctcctactactctctggataatctagtggccattttcgacgtgaatagactagggcactcaggggccctccctgccgaacattgcatcaatatctaccagaggcgctgcgaggcatttggatggaatacttatgttgtagatgggcgcgatgtcgaagccctatgtcaagtattctggcaggcttctcaggtcaagcataaaccaacagccgtggtggccaagacttttaagggccgcggcaccccttccatcgaagacgcagaatcttggcatgccaagcctatgccaagggagcgagccgacgccatcatcaaactgattgagtcgcaaatccagacttcgagaaacctggacccgcaaccaccgatcgaagacagccctgaagtcaatattacggatgtaaggatgactagtccccctgactaccgcgtcggtgacaaaatcgcaaccagaaaagcctgcggactggcgctggccaaacttgggtacgccaacaaccgagtggtagttctcgatggagatactcggtattcaaccttcagcgagatattcaacaaggaatatccagaacgcttcatcgagtgctttatggcagaacagaacatggtcagtgtcgccttaggctgcgctagcagagggagaacgatagccttcgcgagcaccttcgctgccttcctgacccgggctttcgaccacatcaggatcggtggcctggccgagtctaacatcaatatcatcggatcccattgtggtgtgtcagtgggggacgacggagcatcgcagatggccctcgaagatattgctatgttcaggacaatccccaagtgtacaattttttacccgaccgatgctgtgtctacagaacatgcagttgccctggctgccaatgccaagggcatgtgtttcatccgtaccacacggcctgaaacgatggtcatttacacgccacaggagcggttcgaaataggacaggctaaagtgctccgtcattgtgtctccgacaaagtcactgtgatcggcgccggcattaccgtatacgaagcactcgccgccgccgacgaactcagtaagcaagacatctttattcgcgttatcgacctttttaccataaaacccctggacgttgccacaatcgtttctagtgctaaagcaacggagggtcgaataattaccgtcgaagatcactatccccaaggaggtatcggcgaggccgtctgtgccgcagtttccatggatcctgacatccaggtgcacagcctggccgtgtcaggcgtgccccagtcgggcaagtcggaggagctgctggatatgtatggcatctctgcccggcacatcattgttgctgtcaagtgcatgctgctgaactag

SEQ ID NO: 173459 - DNA, 1791 bp, Artificial Sequence
  derived and/or modified sequence
atggctgatgctgaggcccgggcagagttccctgaggaggcccggccagaccggggcaccctgcaggtgctgcaggacatggccagccggctgcgcatccacagcatccgggccacctgcagcaccagcagcggccaccccaccagctgcagcagcagcagcgagatcatgtctgtgctcttcttctacatcatgagatacaagcagagcgaccctgaaaatccagacaatgacagatttgtgctggccaagaggctgagctttgtggatgtggccaccggctggctgggccagggcctgggcgtggcctgtggcatggcctacacaggcaagtactttgaccgggccagctacagagtcttctgcctgatgtctgatggagagagcagcgagggctctgtgtgggaggccatggcctttgccagctactacagcctggacaacctggtggccatctttgatgtgaaccggctgggccacagcggggccctgcctgctgagcactgcatcaacatctaccagaggcgctgtgaggccttcggctggaacacctacgtggtggatggaagagatgtggaggccctgtgccaggtgttctggcaggccagccaggtgaagcacaagcccacagctgtggtggccaagaccttcaagggccggggcacccccagcattgaagatgctgagagctggcacgccaagcccatgccccgggagcgggcagatgccatcatcaagctgattgagagccagatccagaccagcaggaacctggacccccagccccccatcgaggacagccctgaggtgaacatcacagatgtgaggatgaccagccccccagactacagagtgggggacaagatcgccaccaggaaggcctgtggcctggccctggccaagctgggctacgccaacaacagagtggtggtgctggatggagacacccgctacagcaccttcagcgagatcttcaacaaggagtacccagagcgcttcatcgagtgcttcatggccgagcagaacatggtgtctgtggccctgggctgtgccagccggggccgcaccatcgcctttgccagcacctttgctgccttcctgacccgggcctttgaccacatccgcatcggcggcctggccgagagcaacatcaacatcatcggcagccactgcggcgtgtctgtgggagatgatggagccagccagatggccctggaggacatcgccatgttccgcaccatccccaagtgcaccatcttctaccccacagatgctgtgtccacagagcacgctgtggccctggccgccaatgccaagggcatgtgcttcatccgcaccaccaggcctgagaccatggtgatctacaccccccaggagagatttgaaattggccaggccaaggtgctgcggcactgtgtgtctgacaaggtgaccgtcatcggggccggcatcaccgtgtatgaggccctggccgctgctgatgagctgagcaagcaggacatcttcatccgggtcatcgacctcttcaccatcaagcccctggatgtggccaccatcgtgagcagcgccaaggccacagagggccgcatcatcaccgtggaggaccactacccccagggcggcatcggggaggccgtgtgtgccgctgtgtccatggaccctgacatccaggtgcacagcctggccgtgtctggagtgccccagagcggcaagtctgaggagctgctggacatgtatggcatcagcgcccggcacatcatcgtggccgtgaagtgcatgctgctgaactag

SEQ ID NO: 173460 - DNA, 1791 bp, Artificial Sequence
  derived and/or modified sequence
atggccgacgccgaggcccgggccgagttccccgaggaggcccggcctgaccggggtacgcttcaggttctgcaggacatggcatcaaggctccggattcattcaatccgcgctacttgctccacatcaagtggccacccaactagttgctcctctagtagtgaaattatgtcagtcctgttcttctatattatgagatacaagcagtcggacccagagaaccctgacaacgaccgtttcgtcctggcaaaaaggctctccttcgtcgacgttgccaccgggtggttgggacagggcctgggtgtcgcttgcggcatggcctatacagggaagtactttgaccgcgcctcgtatagagtgttttgtttgatgtccgatggtgagtcttctgagggctctgtatgggaagcaatggccttcgcctcatactatagcctcgataatctggtggccattttcgacgtgaataggctcggtcattcaggcgctctgcctgctgagcattgcattaacatctatcagcggcggtgcgaggcatttggttggaacacctatgttgttgacggcagggatgtggaggctctctgccaggtgttttggcaggcctcccaggtgaaacacaaacccacagcagtggtggctaagacttttaaaggtaggggcacacccagtattgaggacgcagaatcctggcatgctaagcctatgccccgagagagggctgacgccattatcaagcttatcgagagccagattcaaaccagtagaaatctagatcctcagccacccatagaggactcgcctgaagtcaacattactgacgttaggatgacaagccccccggactaccgcgtgggcgataagatcgccactcgcaaagcctgcggactcgcccttgccaaactcggatatgcgaacaacagggtcgttgtgctggatggggatacgcggtatagcacattctcagagatattcaacaaggagtatcctgagcgattcatcgaatgctttatggctgagcagaatatggtcagcgtcgctttgggctgcgcttcacgcggccgcaccattgctttcgccagtacttttgcagcgttcctgaccagggccttcgatcatatacgaatcggcggccttgccgaaagcaacattaacatcataggctcacattgcggtgtctctgtgggcgatgacggggccagccagatggccctggaggatattgccatgttcaggaccatcccaaagtgcacaatattttatccaacagacgctgtgagtacagaacacgctgtagccttggctgccaatgccaaaggcatgtgctttattcgaaccactaggcctgagaccatggtgatctacactccacaggagcggtttgagattggacaagccaaagttctgaggcattgcgtttctgacaaagttacagtcattggggcagggattacagtctatgaggcactggcggctgcagatgaactcagtaagcaggacatctttattagagttatagacttgttcaccatcaaacccctcgatgttgctaccattgtgagcagcgccaaagctactgaggggcgaattatcacggtagaagatcattacccacagggcgggatcggggaagccgtgtgtgccgctgtttctatggacccagacatccaggtgcactccctggcggtctccggggtaccacagtcggggaaatccgaagaactgctggatatgtatgggatcagcgcaaggcatattatcgttgcagtcaaatgcatgcttcttaactag

SEQ ID NO: 173461 - DNA, 1791 bp, Artificial Sequence
  derived and/or modified sequence
atggcagacgcggaggcaagggctgagttccccgaggaagcgaggcccgatcggggaacactacaggtcctgcaggatatggcttccaggctgcggatacattcgatcagggcaacctgcagcacttctagcgggcaccctacttcatgcagcagctcttctgagattatgtccgtgctgttcttttacatcatgcgatacaaacagagtgaccccgagaatcccgacaatgacaggtttgtgcttgcaaaaaggctctcgttcgtagatgtggcaactggatggttgggacagggcctaggagtggcttgcggcatggcgtataccggtaagtacttcgatagagccagctaccgtgtcttttgcctgatgtctgatggggagtcaagtgaggggagtgtttgggaagccatggcgtttgcttcttattatagtctggacaatctggtagctatcttcgatgtgaacagacttggacatagtggggcattgcccgctgagcattgcatcaatatctaccagcggaggtgtgaagctttcgggtggaacacttacgtcgtggacggaagagatgtcgaggcactgtgtcaggtgttttggcaggcaagccaggtgaaacataagcccacggctgtcgttgccaagacattcaagggccgtggcacacctagcatcgaagatgccgagagttggcacgctaaacctatgcctagagaacgagccgacgccatcattaaattgatcgaatctcagattcaaacttctcggaatttggatcctcagccccctatcgaagacagccccgaggttaatattaccgacgtcagaatgactagtcctccagactacagagtgggggataaaattgctacacgtaaagcgtgcggcctcgcactcgccaagctggggtacgctaataaccgagtggtcgtgctggatggcgacacccgatacagtactttctcggagatcttcaataaagagtatcctgagaggttcattgagtgtttcatggcggaacagaatatggtgtcggttgccctggggtgtgcatcgagagggaggactattgctttcgcctccacgtttgcggcatttctaaccagagccttcgatcatattagaattggagggctggctgagagtaatattaacattatcggctcccactgcggcgtctcagttggggacgatggcgcttctcagatggcactggaggatatagcaatgttcagaactataccaaagtgcacgatcttctatcccactgacgccgtatccaccgagcacgctgtggcactggccgctaacgccaaggggatgtgcttcatacgaactactcggccagagactatggtcatttatacaccacaggagaggttcgagataggccaggctaaagtgttgagacattgcgttagcgataaagtaacagtgatcggcgctgggattaccgtttacgaagcgctcgcggctgctgacgaactgagcaagcaggacatttttattcgcgtgatcgacctgtttactattaaaccactcgacgtcgccactatcgtttcgagtgccaaggcaacagaggggagaattataacagttgaggatcattatccacaggggggtatcggggaagcagtttgtgcagctgtatccatggatccggatatccaagtgcacagtttggccgtgtcaggcgtgccccagtcaggcaaatctgaggagctgctcgatatgtatggaatttccgcccgacacattatcgtcgctgtaaagtgtatgctactgaattag

SEQ ID NO: 173462 - DNA, 2642 bp, Artificial Sequence
  derived and/or modified sequence
agatcccttgacttgcttgcggagggagcggccggcggagggagcggcaggtggagggagtggcacgaggcatgcggagggagctgcaccgacatcacataaacgcactgggcagctcgcaggcgccattcgctcttcagacgccggagacgtaggagtgggtcttcagactccaaaggggttggactaatggcggatgctgaggcgagggctgagttcccggaggaggccagacctgacaggggcaccttgcaggtgttgcaagatatggccagccgcttgcgaatccattccatcagggccacatgctccacgagctccggccaccctacatcatgtagcagttcttctgagatcatgtctgtgctgttcttctacatcatgaggtacaagcagtcagatccagagaatccggacaacgaccgatttgtcctcgcaaagagactgtcgtttgtggatgtggcaacaggatggctcggacaaggactgggagttgcatgtggaatggcatatactggcaagtacttcgacagggccagctaccgggtgttctgcctcatgagtgatggcgagtcctcagaaggctctgtctgggaggcaatggcctttgcttcctactacagtctggacaatcttgtggcaatctttgatgtgaaccgcctgggacacagtggtgcattgcccgccgagcactgcataaacatctatcagaggcgctgcgaagcctttgggtggaacacttatgtggtggacggccgggacgtggaggcactgtgccaggtattctggcaggcttctcaggtgaagcacaagcccactgctgtggtggccaagaccttcaagggccggggcaccccaagtattgaggatgcagaaagttggcatgcaaagccaatgccgagagaaagagcagatgccattatcaaattaattgagagccagatacagaccagcaggaatcttgacccacagccccccattgaggactcacctgaagtcaacatcacagatgtaaggatgacctctccacctgattacagagttggtgacaagatagctactcggaaagcatgcggtctggctctggctaagctgggctacgcgaacaacagagtcgttgtgctggatggtgacaccaggtactctactttctctgagatattcaacaaggagtaccctgagcgcttcatcgagtgctttatggctgaacaaaacatggtgagcgtggctctgggctgtgcctcccgtggacggaccattgcttttgctagcacctttgctgcctttctgactcgagcatttgatcacatccggataggaggcctcgctgagagcaacatcaacattattggttcccactgtggggtatctgttggtgacgatggtgcttcccagatggccctggaggatatagccatgttccgaaccattcccaagtgcacgatcttctacccaactgatgccgtctccacggagcatgctgttgctctggcagccaatgccaaggggatgtgcttcattcggaccacccgaccagaaactatggttatttacaccccacaagaacgctttgagatcggacaggccaaggtcctccgccactgtgtcagtgacaaggtcacagttattggagctggaattactgtgtatgaagccttagcagctgctgatgagctttcgaaacaagatatttttatccgtgtcatcgacctgtttaccattaaacctctggatgtcgccaccatcgtctccagtgcaaaagccacagagggccggatcattacagtggaggatcactacccgcaaggtggcatcggggaagctgtctgcgcagccgtctccatggatcctgacattcaggttcattcgctggcagtgtcgggagtgccccagagtgggaagtccgaggaattgctggatatgtatggaattagtgccagacatatcatagtggccgtgaaatgcatgttgctgaactaaaatagctgttagctttggtcttttggcctctttaccctgtgtttatgtttgttccaaaaccatcatttaaatctctactgtcacattttgtttcttaaaagcaaagccagctaacaccttcattcatccctagttcggaaattcaagctaactacttaccctttaaactgtcactgcatatgcaagtaccgctctaatttttggatcattaaagggagttacacaacttttaagtgaaaaaaataggtaacaaaacaaccacctgatagtaagttttctgataagactatagataagtggtagaggtaatcaattcttccgaagtgtttccttcgtgaataactggtagaggtaatagttttttcaatgtatttccttcatgagtaaagaaaatgtggattgaagtatagattccagtagcctagtttccacagcacgataacaccatgacgcctactgctgttcccaccttgggattctgtgtgctgccatcccacctgcagctgccctggaattcccttcgctgtttgccttcatctccctccacgtttgagaggctgtcaggcagcagcgaaagcttgttaggatgtcctgtgctgcttgtgatgagagcctccacactgtactgttcaagtcaatgttaataaagcatttcaaaacca

SEQ ID NO: 173463 - DNA, 1791 bp, Artificial Sequence
  derived and/or modified sequence
atggccgatgcagaggccagggccgagtttcccgaggaggccagacctgaccgtggaaccttacaggtgctgcaggacatggcgtctagactcaggattcatagtattagggcgacgtgctctacttcatcaggtcacccaacctcctgttcatctagtagtgagattatgagcgttctgtttttctatattatgagatacaagcaaagcgaccctgagaaccctgacaacgaccggtttgtgttagctaagcgtctatccttcgttgatgtcgccacaggatggttggggcaagggcttggggtggcatgcggcatggcctatacagggaaatattttgaccgcgctagctatcgagttttctgtctgatgagtgacggagaatcaagcgaagggtccgtctgggaggctatggcgttcgccagctactacagtctggacaatctggtggctattttcgacgtgaataggctagggcactcaggggccttgccagccgaacactgtattaacatctaccagcggcgctgcgaggcctttggttggaatacttatgtcgtcgacggcagagatgttgaagctctatgccaggttttctggcaggcttctcaggtgaaacacaagccaactgctgtggtagcgaagacctttaaaggacgcggaaccccgagtatcgaggatgccgaatcctggcatgccaagcctatgcctcgagagagggctgacgcaatcatcaaattgattgagtcgcaaattcaaacgagtcggaaccttgacccccagccgcccatcgaggacagtcccgaggtaaacataaccgacgttcgtatgacctccccccccgattacagagtgggggataaaattgcgacaaggaaagcttgtggcctcgcactagcgaagctcggttacgctaataatcgtgtcgtggtgttggatggcgacacgcgttactcaacattttctgaaatctttaacaaggagtaccctgagagatttatagagtgctttatggccgagcagaatatggtcagcgtcgccttggggtgcgcttccagaggccgcaccatcgcattcgcatccacttttgctgcgtttttgacaagggcttttgaccatatccgcattggaggtttggcagaatccaacatcaatattattggatcacattgtggcgtgagtgtcggcgacgatggggctagccagatggctttggaggacattgctatgttccgcacaatacctaagtgcactatcttctaccctactgatgcggtcagcactgaacatgcagtggcactcgccgcgaatgcaaagggaatgtgtttcataagaaccactcggccagaaacgatggtgatttatacaccccaggagcggttcgaaatcgggcaagctaaagtgctccggcactgcgttagcgacaaggtgaccgtgattggagctggcatcacggtgtacgaggcactggccgccgcggacgagctttccaagcaggatatctttattagagttatcgatctgtttaccatcaaaccacttgacgttgccactatcgtgtcaagcgctaaagcaacagagggacggatcattacggtcgaggatcattatccccagggaggcattggcgaagccgtctgcgcagcagtgtccatggacccagatatccaagtccattcgctggctgtgtcaggcgttccccagagcgggaagtctgaggaacttctagacatgtatgggatctcggcgagacatattatcgttgcggtgaagtgcatgctgctaaactag

SEQ ID NO: 173464 - DNA, 1791 bp, Artificial Sequence
  derived and/or modified sequence
atggccgacgccgaggcccgggccgagttccccgaggaggcccggccggataggggaaccctgcaggtattacaggacatggcatcacgattgaggattcattccattagagcgacatgctccaccagcagcgggcaccctacttcctgttctagctcttcagagatcatgagtgtgttgttcttttatataatgcgatacaaacagagtgacccagagaaccccgataatgacagattcgtgctggccaaacggctgagttttgttgatgtggcaaccggctggctgggacaggggctgggggttgcgtgcgggatggcatacaccggaaagtattttgacagagcaagctatagagtattctgtcttatgtcagatggggaaagctctgaggggtcagtgtgggaggccatggctttcgcaagttattattcactcgataatctcgtggcgattttcgacgtaaatagactgggacatagcggagccctccctgcagaacactgtataaacatctatcagagaagatgcgaggcttttggatggaatacttacgtggttgatggtcgcgatgttgaggccctttgtcaagttttttggcaagcttcccaagtcaagcataagccaactgcagtggtggccaagacatttaaggggcgcggaacgccaagcatagaagacgctgagtcctggcacgccaaaccgatgccacgtgagagggccgatgccatcatcaaactgatagaaagccagattcagactagcaggaacctggacccacagccccccatcgaagactcccccgaagtgaatatcacagacgtgcgtatgacgagcccccccgactacagagtgggcgacaagattgccacccgcaaagcgtgcgggctcgcattggcaaagttgggttacgccaataatcgcgtcgtagtgctcgatggcgatacccgctattcaacgttcagcgagatcttcaacaaagagtacccagagagatttatcgagtgttttatggcggagcaaaatatggtgtccgtggccctgggctgcgcatcccggggacgcacaattgcctttgctagcacgttcgcagcctttctaacacgggcttttgaccacattagaattgggggactggcggaaagcaacatcaacatcatcggatctcactgcggcgtgagcgtgggcgacgatggagcttcacagatggcactggaggacatcgctatgttccgcacaataccaaagtgcactatcttctatcctaccgacgccgtctctactgaacacgctgtcgctctagccgccaatgctaagggaatgtgttttattcggaccactcggcctgagacaatggtgatttacaccccccaggagaggttcgaaattggacaagcaaaggtcctaaggcactgcgtgtccgataaggtcacggtgattggggctggcatcacagtgtatgaggctctcgccgccgcagacgaactctccaagcaagacatcttcattagagtcatcgacttgttcacaatcaaaccactggacgttgcaactatcgtttccagcgctaaagccaccgaggggcggattatcacagtggaggaccactaccctcaaggaggcatcggagaggctgtatgtgctgcagtgtctatggacccagatattcaagtccactcactggcagtctctggcgttccacaatccggcaagagcgaagaactgctggacatgtacggaatttctgcaagacatattatagtggcagtaaaatgcatgctgttgaattag

SEQ ID NO: 173465 - DNA, 1791 bp, Artificial Sequence
  derived and/or modified sequence
atggcggatgccgaagccagagctgagtttcctgaggaggcaaggccagaccggggaactctccaggttcttcaggatatggcgagtcgcctgcgaattcacagtattcgagccacatgttccacttcatctggccacccaacctcctgctcctccagcagcgaaatcatgagtgtcctcttcttttatatcatgaggtataaacagtctgatcccgagaaccctgataacgaccggtttgtccttgcaaaacggctctcctttgtggatgtagctactggatggcttggtcagggactaggagtggcatgcggtatggcctacacagggaaatattttgacagagcatcttacagagtcttctgcctgatgtcagatggtgagagcagcgagggatctgtgtgggaggccatggctttcgcatcctactattcactcgataaccttgtggccatattcgatgtaaataggttaggccacagcggcgctctgcccgcagaacattgtatcaatatctatcaaagaagatgcgaggcctttggctggaatacatatgtggtagatggcagagacgtcgaagccttgtgccaggtcttctggcaagcgtcacaggtcaaacacaaaccaactgcagtcgtggccaaaaccttcaaggggagaggcactccttcaatcgaggacgcagagagctggcacgcaaagcctatgccacgcgagcgtgcagacgccatcataaaattgattgagagccagatacagacctcccggaatcttgatccacagcctcccatagaagacagcccagaagttaacataacggacgtcaggatgacttcgcctccggattatagagtgggcgacaaaattgccactcgaaaggcttgcggactagccctagcgaaattgggttacgcaaataatagggtggttgtcctggatggcgacaccagatacagtacctttagcgaaattttcaataaggagtacccagagcggttcatcgagtgtttcatggcagaacagaatatggtaagcgtcgctctcggttgtgcgtctcggggaaggacaatagcgttcgcctccacctttgcagcatttttaacacgggcattcgatcatattcgtattgggggacttgccgaatcaaacatcaatattatcggatctcactgcggtgtgtcagtaggcgatgacggagcctcccagatggccctcgaggatatagctatgtttaggacgataccaaagtgtaccatcttctatcccaccgatgccgtgagcacagagcatgcagtggccctcgccgctaatgcaaaaggtatgtgctttatccgcactacccggccagaaaccatggttatttatacaccccaggaaaggttcgagattgggcaggccaaagtcctccgccattgcgtcagcgacaaggtgaccgtgatcggagccggtattacagtgtacgaagctctcgccgcagccgacgaattgtctaagcaggatatcttcattagagtcatcgatctgtttaccatcaagccactcgatgtggcgacaatcgtttcaagcgccaaggccacagaaggtcgtatcatcactgtggaggatcattacccacaagggggaattggtgaagccgtctgcgctgcggtaagcatggaccccgatatccaagtgcactccctggccgttagcggagttccacaaagtggaaagtccgaggagctgcttgacatgtacggaatatctgcgaggcacattatcgtggcggttaagtgtatgctcttgaactag

SEQ ID NO: 173466 - DNA, 2703 bp, Artificial Sequence
  derived and/or modified sequence
tcccttgacttgcttgcggagggagcggccggcggagggagcggcaggtggagggagtggcacgaggcatgcggagggagctgcaccgacatcacataaacgcactgggcagctcgcaggcgccattcgctcttcagacgccggagacgtaggagtgggtcttcagactccaaaggggttggactaatggcggatgctgaggcgagggctgagttcccggaggaggccagacctgacaggggcaccttgcaggtgttgcaagatatggccagccgcttgcgaatccattccatcagggccacatgctccacgagctccggccaccctacatcatgtagcagttcttctgagatcatgtctgtgctgttcttctacatcatgaggtacaagcagtcagatccagagaatccggacaacgaccgatttgtcctcgcaaagagactgtcgtttgtggatgtggcaacaggatggctcggacaaggactgggagttgcatgtggaatggcatatactggcaagtacttcgacagggccagctaccgggtgttctgcctcatgagtgatggcgagtcctcagaaggctctgtctgggaggcaatggcctttgcttcctactacagtctggacaatcttgtggcaatctttgatgtgaaccgcctgggacacagtggtgcattgcccgccgagcactgcataaacatctatcagaggcgctgcgaagcctttgggtggaacacttatgtggtggacggccgggacgtggaggcactgtgccaggtattctggcaggcttctcaggtgaagcacaagcccactgctgtggtggccaagaccttcaagggccggggcaccccaagtattgaggatgcagaaagttggcatgcaaagccaatgccgagagaaagagcagatgccattatcaaattaattgagagccagatacagaccagcaggaatcttgacccacagccccccattgaggactcacctgaagtcaacatcacagatgtaaggatgacctctccacctgattacagagttggtgacaagatagctactcggaaagcatgcggtctggctctggctaagctgggctacgcgaacaacagagtcgttgtgctggatggtgacaccaggtactctactttctctgagatattcaacaaggagtaccctgagcgcttcatcgagtgctttatggctgaacaaaacatggtgagcgtggctctgggctgtgcctcccgtggacggaccattgcttttgctagcacctttgctgcctttctgactcgagcatttgatcacatccggataggaggcctcgctgagagcaacatcaacattattggttcccactgtggggtatctgttggtgacgatggtgcttcccagatggccctggaggatatagccatgttccgaaccattcccaagtgcacgatcttctacccaactgatgccgtctccacggagcatgctgttgctctggcagccaatgccaaggggatgtgcttcattcggaccacccgaccagaaactatggttatttacaccccacaagaacgctttgagatcggacaggccaagggcgtatccatgctccaggacagctggagcagtgtaatttcctatcaaaaagtcctccgccactgtgtcagtgacaaggtcacagttattggagctggaattactgtgtatgaagccttagcagctgctgatgagctttcgaaacaagatatttttatccgtgtcatcgacctgtttaccattaaacctctggatgtcgccaccatcgtctccagtgcaaaagccacagagggccggatcattacagtggaggatcactacccgcaaggtggcatcggggaagctgtctgcgcagccgtctccatggatcctgacattcaggttcattcgctggcagtgtcgggagtgccccagagtgggaagtccgaggaattgctggatatgtatggaattagtgccagacatatcatagtggccgtgaaatgcatgttgctgaactaaaatagctgttagctttggtcttttggcctctttaccctgtgtttatgtttgttccaaaaccatcatttaaatctctactgtcacattttgtttcttaaaagcaaagccagctaacaccttcattcatccctagttcggaaattcaagctaactacttaccctttaaactgtcactgcatatgcaagtaccgctctaatttttggatcattaaagggagttacacaacttttaagtgaaaaaaataggtaacaaaacaaccacctgatagtaagttttctgataagactatagataagtggtagaggtaatcaattcttccgaagtgtttccttcgtgaataactggtagaggtaatagttttttcaatgtatttccttcatgagtaaagaaaatgtggattgaagtatagattccagtagcctagtttccacagcacgataacaccatgacgcctactgctgttcccaccttgggattctgtgtgctgccatcccacctgcagctgccctggaattcccttcgctgtttgccttcatctccctccacgtttgagaggctgtcaggcagcagcgaaagcttgttaggatgtcctgtgctgcttgtgatgagagcctccacactgtactgttcaagtcaatgttaataaagcatttcaaaaccagctgctttattca

SEQ ID NO: 173467 - protein, 690 aa, Artificial Sequence
  derived and/or modified sequence
MGVRQQLALLLLLLLLLWGLGQPVWPVAVALTLRWLLGDPTCCVLLGLAMLARPWLGPWVPHGLSLAAAALALTLLPARLPPGLRWLPADVIFLAKILHLGLKIRGCLSRQPPDTFVDAFERRARAQPGRALLVWTGPGAGSVTFGELDARACQAAWALKAELGDPASLCAGEPTALLVLASQAVPALCMWLGLAKLGCPTAWINPHGRGMPLAHSVLSSGARVLVVDPDLRESLEEILPKLQAENIRCFYLSHTSPTPGVGALGAALDAAPSHPVPADLRAGITWRSPALFIYTSGTTGLPKPAILTHERVLQMSKMLSLSGATADDVVYTVLPLYHVMGLVVGILGCLDLGATCVLAPKFSTSCFWDDCRQHGVTVILYVGELLRYLCNIPQQPEDRTHTVRLAMGNGLRADVWETFQQRFGPIRIWEVYGSTEGNMGLVNYVGRCGALGKMSCLLRMLSPFELVQFDMEAAEPVRDNQGFCIPVGLGEPGLLLTKVVSQQPFVGYRGPRELSERKLVRNVRQSGDVYYNTGDVLAMDREGFLYFRDRLGDTFRWKGENVSTHEVEGVLSQVDFLQQVNVYGVCVPGCEGKVGMAAVQLAPGQTFDGEKLYQHVRAWLPAYATPHFIRIQDAMEVTSTFKLMKTRLVREGFNVGIVVDPLFVLDNRAQSFRPLTAEMYQAVCEGTWRL

SEQ ID NO: 173468 - DNA, 2073 bp, Artificial Sequence
  derived and/or modified sequence
atgggtgttaggcaacaactggcactcctgctcttactgctgctattgctatggggactcggccaacccgtgtggcctgtcgctgtcgccctcaccctgcgctggttgctgggcgaccccacttgttgtgtgctgttaggtctagccatgctcgctcgcccttggttgggcccttgggtgccccacggactgtcgctcgccgccgcagcactggcattgacattgctccctgcacggctccccccagggcttcgatggctgccggcagacgtaatctttctcgcaaagatccttcatctaggccttaaaatacgaggctgcctgtcccggcagcctcctgatacattcgttgacgcctttgagaggcgggccagggctcagcccggacgagccttactcgtgtggactgggcctggagccggttccgttacttttggtgaattagacgcgagagcctgccaagcagcctgggcgctgaaggcggagttgggcgacccagccagcctgtgcgctggagagcccaccgctctgctggtattggcatcccaggctgttccagcactgtgcatgtggcttggtcttgccaagctggggtgccccaccgcctggattaatccacatggccgcggaatgccactcgctcacagcgtgctgagttcaggcgctcgggtgctggtagttgaccctgacctaagggaatcactggaggagatactccccaagctacaggcagagaacatcagatgcttttatctctcccataccagccctacacctggggttggagccctcggcgccgcccttgatgcagcaccctcccaccctgtccccgctgacctccgagcaggtatcacttggcgttctccggctctgttcatctacacatccgggaccacaggactgcctaaacctgcaatcctgacacacgagcgagtgctacaaatgtccaaaatgctgtcgttaagtggtgccactgctgatgatgtcgtctacacagtgctccctctctatcatgtaatgggcctggttgtcggaatactcggctgcctggacttgggcgccacctgcgtgctggcgcccaaattctctacctcctgtttttgggacgattgccgccagcacggcgtgacggtcatattatatgtcggagagctgctcagatacctgtgcaatatccctcagcagccagaagacagaacacatactgtcagattggctatggggaatggactgagggccgatgtgtgggagacatttcagcagcggtttggccctattagaatttgggaagtgtatggctcaaccgaaggtaacatggggcttgtcaactacgtaggacgctgcggggcccttgggaagatgtcatgcctgttgcgaatgttaagtccctttgaattggttcagttcgacatggaggcagctgaaccagtgagagacaaccaggggttctgcataccagtcgggctgggagaacctggtctgttattgaccaaagtggtatcgcagcagccatttgtggggtaccggggcccgagagagctgagtgaacggaaactggtgaggaacgttagacaatcaggggatgtgtattacaatactggcgacgtcctggccatggatagagagggatttctttacttcagagatcggctgggggacacttttcgatggaagggcgagaacgtgagcactcacgaagtcgaaggcgtgcttagccaggtcgattttctgcagcaggttaacgtgtatggagtgtgcgttcctggctgcgaggggaaggtgggaatggcagccgtacagctcgctcctgggcaaacttttgacggcgagaagctgtaccaacacgtgcgagcttggctacctgcttatgcaacacctcatttcatcaggatccaagatgccatggaggtcaccagtacgttcaagctgatgaagacccgacttgtgagagagggttttaatgtaggcatcgtggttgatccactcttcgtgttggacaacagggctcaatcgtttcgccccttaacagctgagatgtaccaagcggtgtgtgagggaacctggaggctgtag

SEQ ID NO: 173469 - DNA, 2073 bp, Artificial Sequence
  derived and/or modified sequence
atgggcgtgcggcagcagctggccctgctgctgctgctgctgctgctgctgtggggcctgggccagcctgtgtggcctgtggccgtggccctgaccctgcgctggctgctgggggaccccacctgctgcgtgctgctgggcctggccatgctggcccggccctggctgggcccctgggtgccccacggcctgagcctggccgctgctgccctggccctgaccctgctgcctgcccggctgcccccaggcctgcgctggctgcctgcagatgtgatcttcctggccaagatcctgcacctgggcctgaagatccggggctgcctgagccggcagcccccagacacctttgtggatgcctttgagcggcgggcccgggcccagcccggccgggccctgctggtgtggacaggccctggggccggctctgtgacctttggagagctggatgcccgggcctgccaggccgcctgggccctgaaggccgagctgggggaccctgccagcctgtgtgccggggagcccacagccctgctggtgctggccagccaggccgtgcctgccctgtgcatgtggctgggcctggccaagctgggctgccccacagcctggatcaacccccacggccggggcatgcccctggcccacagcgtgctgagcagcggggcccgggtgctggtggtggaccctgacctgcgggagagcctggaggagatcctgcccaagctgcaggccgagaacatccgctgcttctacctgagccacaccagccccaccccaggagtgggcgccctgggcgccgccctggatgctgcccccagccaccctgtgcctgctgacctgcgggccggcatcacctggaggagccctgccctcttcatctacaccagcggcaccaccggcctgcccaagccagccatcctgacccatgagcgggtgctgcagatgagcaagatgctgagcctgagcggggccacagcagatgatgtggtgtacacagtgctgcccctgtaccacgtgatgggcctggtggtgggcatcctgggctgcctggacctgggcgccacctgtgtgctggcccccaagttcagcaccagctgcttctgggatgactgccggcagcacggcgtgaccgtcatcctgtatgtgggggagctgctgcgctacctgtgcaacatcccccagcagcctgaggacaggacccacacagtgcggctggccatgggaaatggcctgcgggcagatgtgtgggagaccttccagcagagatttggccccatccgcatctgggaggtgtatggcagcacagagggcaacatgggcctggtgaactacgtgggccgctgtggggccctgggcaagatgagctgcctgctgaggatgctgagcccctttgagctggtgcagtttgacatggaggccgctgagcctgtgcgggacaaccagggcttctgcatccctgtgggcctgggggagcccggcctgctgctgaccaaggtggtgtcccagcagccctttgtgggctaccggggcccccgggagctgtctgagaggaagctggtgagaaatgtgcggcagagcggagatgtgtactacaacacaggagatgtgctggccatggaccgggagggcttcctgtacttccgggaccggctgggggacaccttccgctggaagggggagaatgtgtccacccatgaggtggagggcgtgctgagccaggtggacttcctgcagcaggtgaatgtgtatggagtgtgtgtgcccggctgtgagggcaaggtgggcatggctgctgtgcagctggcccctggccagacctttgatggagagaagctgtaccagcacgtgcgggcctggctgcctgcctatgccaccccccacttcatccgcatccaggatgccatggaggtgaccagcaccttcaagctgatgaagacccggctggtgcgggagggcttcaacgtgggcatcgtggtggaccccctgtttgtgctggacaacagagcccagagcttccggcccctgacagctgagatgtaccaggccgtgtgtgagggcacctggaggctgtag

SEQ ID NO: 173470 - DNA, 2073 bp, Artificial Sequence
  derived and/or modified sequence
atgggcgtgcggcagcagctggccctgctgctgctgctgctgctgcttctgtgggggctcggtcagccagtctggcccgtcgctgtcgctctcactctgaggtggctgctgggggaccccacctgttgcgtcctgctggggctcgcaatgctcgcaaggccctggctagggccttgggtaccccacggcctgtccctagccgccgctgccctggctctcaccctgctgcccgcccggctacctccgggcctgcggtggcttcccgcagacgtgattttccttgccaagatcctacatttgggactcaaaattagaggatgtttgtcaagacagccgccggacacgtttgttgatgccttcgagaggcgcgcccgcgcacagcccggaagagccctgctggtatggaccggtccaggggccggcagtgttacattcggagaactcgacgctagggcatgtcaggcggcatgggctctgaaggctgagctgggcgatccagcgtccctgtgtgccggagagcccaccgccttactggttctggcatctcaggctgtccccgctttatgtatgtggctcggcttggccaaattgggatgtcctaccgcttggatcaatccacacggtcggggcatgccccttgcgcactctgtcctgtctagcggcgcacgagtcttagttgtcgatcccgacctgcgggaaagcctggaggagattcttcctaaactgcaagccgaaaatattaggtgtttctacctgagccacactagccccacaccaggcgtgggcgcgctcggtgccgccctggatgctgcaccatcccatcccgttcctgccgatctaagggcaggtattacatggcggtcaccagcactcttcatctatacctccgggacaactggcctgccgaagcccgctatcctcactcatgagcgtgtactgcagatgtccaagatgttaagtctgagcggcgcaacggcagacgatgtggtctatacggtcttgcccctttaccatgtgatggggctcgtggtgggcatcctcgggtgcctggatctcggcgctacctgcgtgctcgctcctaagtttagtacctcttgcttctgggatgactgcaggcaacacggtgtgactgtgatcctttatgtcggggaactgctgaggtacctctgcaatatacctcaacagccggaagatcgcacccataccgtgcggttagcaatgggtaatgggcttcgggccgatgtttgggagacatttcaacagagatttgggccaattaggatctgggaggtgtacgggagtaccgagggaaatatgggactcgtgaactatgttgggagatgcggggcccttggcaaaatgagctgcctgcttcggatgctcagcccattcgagctggttcagttcgacatggaggccgctgagcctgttagggacaatcagggcttttgtattcctgtagggctgggtgaacctggcctcctgctcactaaagtagtctcccaacagcccttcgtgggctacagagggccccgagaactcagcgaaagaaagctggtcagaaacgtgagacagagcggcgatgtgtattacaacaccggcgacgtcctcgctatggatagagaaggctttctctatttcagagacaggctgggcgataccttccgctggaaaggcgagaacgtgtccacacatgaggtggaaggcgtgttatctcaggtggacttcctgcagcaggtgaatgtctatggcgtttgcgtccccggatgcgaaggaaaagtgggcatggcagccgtacagctcgcccccgggcagacattcgacggtgaaaagctctatcagcacgtgagagcttggctacccgcttatgcgaccccacatttcatccggatacaggacgccatggaagtcacatcgacattcaagctgatgaagactaggctcgtgagagaggggtttaatgtgggaattgttgtcgaccctttgttcgttctggataatcgagcccagagctttcgtcctctcactgcagagatgtaccaggctgtgtgcgagggcacctggcgactgtag

SEQ ID NO: 173471 - DNA, 2073 bp, Artificial Sequence
  derived and/or modified sequence
atgggcgttcggcaacagctggctttactgctgttgttgctcctactgctctggggattagggcagcccgtgtggcccgtcgcagtggcactcactctccggtggctcctcggggacccaacatgttgtgtgctgcttggtctggctatgctggctcgcccttggctgggaccttgggtccctcacggattatcactggccgcagctgctctggcactgacactgttgcccgcacgcctgcccccaggactgagatggcttccagccgacgtaatcttcctggctaagatcctacatctgggcctaaagatccgaggctgcctctctcgccaaccaccagacaccttcgttgatgcgttcgaacgccgagcccgagcccaaccaggccgtgccctgcttgtttggacgggcccaggtgccggtagcgtcacttttggagagctggatgcgcgagcatgtcaggccgcttgggcgctgaaagcagaactgggagaccctgcaagtctatgcgccggagagcccaccgctttactggttttagctagccaggcggtccctgcactgtgtatgtggctaggactcgctaagttgggctgtcctaccgcttggattaatccccacggacgagggatgcctctggctcactccgtactgtcaagcggtgcgagagtgttagtggtggatcctgatctgcgagaatcattagaggaaattctcccgaaactccaggccgagaatattagatgtttctacctttcccacaccagccctacaccaggcgtgggcgctctgggagctgcactggatgcagcaccatcacatcccgtccctgcagacctccgtgccggtatcacatggcgcagtcctgcgctgtttatctacaccagtgggacgacgggcttgcccaagccagcgattctcacccacgagcgcgtcctccagatgagcaagatgttatctctctcaggcgctacagcagatgacgtggtctatactgtgctgccattgtatcatgtgatgggactggtagtcgggatcctggggtgcttagatttaggagctacctgcgtcctggccccaaaattcagtacgagctgtttctgggacgactgcagacaacatggagttacggtgatcctgtatgtgggcgagcttttaaggtacctatgcaatatccctcagcagccggaggatcgcacccacaccgtgcggctggcgatgggtaatggtctgcgggctgatgtctgggaaaccttccaacaacgctttggcccaatccgcatctgggaggtgtacggctctactgagggtaatatgggtctggtgaactacgtaggtaggtgcggagcattagggaagatgtcctgcctgctcagaatgctcagccctttcgaacttgttcagtttgatatggaggccgcagagccagtgcgagacaaccaggggttttgtatccctgtcgggctgggagaacctggcctgcttctgacaaaggtcgtctctcagcagccttttgttgggtatcgaggacctcgggaattgtccgaacgcaaattggtgagaaatgtgcggcagtcaggcgacgtttactataacaccggagatgtccttgcaatggacagagaagggtttctttactttcgcgaccgcttgggggacacgtttagatggaaaggcgagaatgtgtccacccatgaggtggaaggcgtcctgagccaggtggacttcctgcaacaagtgaacgtgtacggcgtctgcgtgcctgggtgtgagggtaaggtgggcatggccgctgtgcagctcgctcctgggcagacttttgatggagaaaaactttatcagcatgtcagagcatggttgcccgcatatgcaactccacacttcatccgtatccaggacgccatggaagtcacgtccacatttaaactgatgaaaacacgccttgttcgggagggctttaacgtgggcatcgtagtggatccacttttcgtcttagacaatcgggctcagtcattcagaccccttacggccgagatgtatcaagccgtgtgtgaaggaacctggcgattgtag

SEQ ID NO: 173472 - DNA, 2361 bp, Artificial Sequence
  derived and/or modified sequence
agcagtgccagggccaccacccctggggaggagccattgggctactcttgaggggccagaggtgagcctgaacactccacagctgctgctcctagggaggagctggtaccatgggtgtcaggcaacagttggccttgctgctgctgctgctgctcctgctctggggcctggggcagccagtgtggccagtcgctgtggccttgaccctgcgctggctcctgggggatcccacatgttgcgtgctacttgggctggccatgttagcacggccctggctcggcccctgggtgccccatgggctgagcctggcagctgcggccctggcactaaccctcctgccagcacggctgcccccaggactacgctggctgccggctgatgtgatcttcttggccaagatcctccacctgggcctgaagatcaggggatgcttgagccggcagccgcctgacacctttgtagatgccttcgagcggcgagcacgagcgcagcctggcagggcactcttggtgtggacggggcctggggccggctcagtcacctttggtgagctggatgcccgggcctgccaggcggcatgggccctgaaggctgagctgggtgaccctgcgagcctgtgtgccggggagcctactgccctccttgtgctggcttcccaggccgttccagccctgtgtatgtggctggggctggccaagctgggctgcccaacagcctggatcaacccgcatggccgggggatgcccctggcgcactctgtgctgagctctggggcccgggtgctggtggtggacccagacctccgggagagcctggaggagatccttcccaagctgcaggctgagaacatccgctgcttctacctcagccatacctcccctacaccaggggtgggggctctgggggctgccctggatgcagcgccctcccacccagtgcctgctgacctgcgtgctgggatcacatggagaagccctgccctcttcatctatacctcggggaccactggcctcccgaagccagccatcctcacgcatgagcgggtactgcagatgagcaagatgctgtccttatctggggccacagctgatgatgtggtttacacggtcctgcctctgtaccacgtgatgggacttgtcgttgggatcctcggctgcttagatctcggagccacctgtgttctggcccccaagttctctacttcctgcttctgggatgactgtcggcagcatggcgtgacagtgatcctgtatgtgggcgagctcctgcggtacttgtgtaacattccccagcaaccagaggaccggacacatacagtccgcctggcaatgggcaatggactacgggctgatgtgtgggagaccttccagcagcgcttcggtcctattcggatctgggaagtctacggctccacagaaggcaacatgggcttagtcaactatgtggggcgctgcggggccctgggcaagatgagctgcctcctccgaatgctgtccccctttgagctggtgcagttcgacatggaggcggcggagcctgtgagggacaatcagggcttctgcatccctgtagggctaggggagccggggctgctgctgaccaaggtggtaagccagcaacccttcgtgggctaccgcggcccccgagagctgtcggaacggaagctggtgcgcaacgtgcggcaatcgggcgacgtttactacaacaccggggacgtactggccatggaccgcgaaggcttcctctacttccgcgaccgcctcggggacaccttccgatggaagggcgagaacgtgtccacgcacgaggtggagggcgtgttgtcgcaggtggacttcttgcaacaggttaacgtgtatggcgtgtgcgtgccaggttgtgagggtaaggtgggcatggctgctgtgcagctagcccccggccagactttcgacggggagaagttgtaccagcacgttcgcgcttggctccctgcctacgctaccccccatttcatccgcatccaggacgccatggaggtcaccagcacgttcaaactgatgaagacccggttggtgcgtgagggcttcaatgtggggatcgtggttgaccctctgtttgtactggacaaccgggcccagtccttccggcccctgacggcagaaatgtaccaggctgtgtgtgagggaacctggaggctctgatcacctggccaacccactggggtagggatcaaagccagccacccccaccccaacacactcggtgtccctttcatcctgggcctgtgtgaatcccagcctggccataccctcaacctcagtgggctggaaatgacagtgggccctgtagcagtggcagaataaactcagatgtgttcac

SEQ ID NO: 173473 - DNA, 2073 bp, Artificial Sequence
  derived and/or modified sequence
atgggcgtgagacagcagctggccctgctgctgctgctgctgctgctgctgtggggcctgggccagcccgtgtggcccgtggccgtggccctgaccctgagatggctgctgggcgaccccacctgctgcgtgctgctgggcctggccatgctggccagaccctggctgggcccctgggtgccccacggcctgagcctggccgccgccgccctggccctgaccctgctgcccgccagactgccccccggcctgagatggctgcccgccgacgtgatcttcctggccaagatcctgcacctgggcctgaagatcagaggctgcctgagcagacagccccccgacaccttcgtggacgccttcgagagaagagccagagcccagcccggcagagccctgctggtgtggaccggccccggcgccggcagcgtgaccttcggcgagctggacgccagagcctgccaggccgcctgggccctgaaggccgagctgggcgaccccgccagcctgtgcgccggcgagcccaccgccctgctggtgctggccagccaggccgtgcccgccctgtgcatgtggctgggcctggccaagctgggctgccccaccgcctggatcaacccccacggcagaggcatgcccctggcccacagcgtgctgagcagcggcgccagagtgctggtggtggaccccgacctgagagagagcctggaggagatcctgcccaagctgcaggccgagaacatcagatgcttctacctgagccacaccagccccacccccggcgtgggcgccctgggcgccgccctggacgccgcccccagccaccccgtgcccgccgacctgagagccggcatcacctggagaagccccgccctgttcatctacaccagcggcaccaccggcctgcccaagcccgccatcctgacccacgagagagtgctgcagatgagcaagatgctgagcctgagcggcgccaccgccgacgacgtggtgtacaccgtgctgcccctgtaccacgtgatgggcctggtggtgggcatcctgggctgcctggacctgggcgccacctgcgtgctggcccccaagttcagcaccagctgcttctgggacgactgcagacagcacggcgtgaccgtgatcctgtacgtgggcgagctgctgagatacctgtgcaacatcccccagcagcccgaggacagaacccacaccgtgagactggccatgggcaacggcctgagagccgacgtgtgggagaccttccagcagagattcggccccatcagaatctgggaggtgtacggcagcaccgagggcaacatgggcctggtgaactacgtgggcagatgcggcgccctgggcaagatgagctgcctgctgagaatgctgagccccttcgagctggtgcagttcgacatggaggccgccgagcccgtgagagacaaccagggcttctgcatccccgtgggcctgggcgagcccggcctgctgctgaccaaggtggtgagccagcagcccttcgtgggctacagaggccccagagagctgagcgagagaaagctggtgagaaacgtgagacagagcggcgacgtgtactacaacaccggcgacgtgctggccatggacagagagggcttcctgtacttcagagacagactgggcgacaccttcagatggaagggcgagaacgtgagcacccacgaggtggagggcgtgctgagccaggtggacttcctgcagcaggtgaacgtgtacggcgtgtgcgtgcccggctgcgagggcaaggtgggcatggccgccgtgcagctggcccccggccagaccttcgacggcgagaagctgtaccagcacgtgagagcctggctgcccgcctacgccaccccccacttcatcagaatccaggacgccatggaggtgaccagcaccttcaagctgatgaagaccagactggtgagagagggcttcaacgtgggcatcgtggtggaccccctgttcgtgctggacaacagagcccagagcttcagacccctgaccgccgagatgtaccaggccgtgtgcgagggcacctggagactgtag

SEQ ID NO: 173474 - protein, 950 aa, Artificial Sequence
  derived and/or modified sequence
MGVPAFFRWLSRKYPSIIVNCVEEKPKECNGVKIPVDASKPNPNDVEFDNLYLDMNGIIHPCTHPEDKPAPKNEDEMMVAIFEYIDRLFSIVRPRRLLYMAIDGVAPRAKMNQQRSRRFRASKEGMEAAVEKQRVREEILAKGGFLPPEEIKERFDSNCITPGTEFMDNLAKCLRYYIADRLNNDPGWKNLTVILSDASAPGEGEHKIMDYIRRQRAQPNHDPNTHHCLCGADADLIMLGLATHEPNFTIIREEFKPNKPKPCGLCNQFGHEVKDCEGLPREKKGKHDELADSLPCAEGEFIFLRLNVLREYLERELTMASLPFTFDVERSIDDWVFMCFFVGNDFLPHLPSLEIRENAIDRLVNIYKNVVHKTGGYLTESGYVNLQRVQMIMLAVGEVEDSIFKKRKDDEDSFRRRQKEKRKRMKRDQPAFTPSGILTPHALGSRNSPGSQVASNPRQAAYEMRMQNNSSPSISPNTSFTSDGSPSPLGGIKRKAEDSDSEPEPEDNVRLWEAGWKQRYYKNKFDVDAADEKFRRKVVQSYVEGLCWVLRYYYQGCASWKWYYPFHYAPFASDFEGIADMPSDFEKGTKPFKPLEQLMGVFPAASGNFLPPSWRKLMSDPDSSIIDFYPEDFAIDLNGKKYAWQGVALLPFVDERRLRAALEEVYPDLTPEETRRNSLGGDVLFVGKHHPLHDFILELYQTGSTEPVEVPPELCHGIQGKFSLDEEAILPDQIVCSPVPMLRDLTQNTVVSINFKDPQFAEDYIFKAVMLPGARKPAAVLKPSDWEKSSNGRQWKPQLGFNRDRRPVHLDQAAFRTLGHVMPRGSGTGIYSNAAPPPVTYQGNLYRPLLRGQAQIPKLMSNMRPQDSWRGPPPLFQQQRFDRGVGAEPLLPWNRMLQTQNAAFQPNQYQMLAGPGGYPPRRDDRGGRQGYPREGRKYPLPPPSGRYNWN

SEQ ID NO: 173475 - protein, 874 aa, Artificial Sequence
  derived and/or modified sequence
MMVAIFEYIDRLFSIVRPRRLLYMAIDGVAPRAKMNQQRSRRFRASKEGMEAAVEKQRVREEILAKGGFLPPEEIKERFDSNCITPGTEFMDNLAKCLRYYIADRLNNDPGWKNLTVILSDASAPGEGEHKIMDYIRRQRAQPNHDPNTHHCLCGADADLIMLGLATHEPNFTIIREEFKPNKPKPCGLCNQFGHEVKDCEGLPREKKGKHDELADSLPCAEGEFIFLRLNVLREYLERELTMASLPFTFDVERSIDDWVFMCFFVGNDFLPHLPSLEIRENAIDRLVNIYKNVVHKTGGYLTESGYVNLQRVQMIMLAVGEVEDSIFKKRKDDEDSFRRRQKEKRKRMKRDQPAFTPSGILTPHALGSRNSPGSQVASNPRQAAYEMRMQNNSSPSISPNTSFTSDGSPSPLGGIKRKAEDSDSEPEPEDNVRLWEAGWKQRYYKNKFDVDAADEKFRRKVVQSYVEGLCWVLRYYYQGCASWKWYYPFHYAPFASDFEGIADMPSDFEKGTKPFKPLEQLMGVFPAASGNFLPPSWRKLMSDPDSSIIDFYPEDFAIDLNGKKYAWQGVALLPFVDERRLRAALEEVYPDLTPEETRRNSLGGDVLFVGKHHPLHDFILELYQTGSTEPVEVPPELCHGIQGKFSLDEEAILPDQIVCSPVPMLRDLTQNTVVSINFKDPQFAEDYIFKAVMLPGARKPAAVLKPSDWEKSSNGRQWKPQLGFNRDRRPVHLDQAAFRTLGHVMPRGSGTGIYSNAAPPPVTYQGNLYRPLLRGQAQIPKLMSNMRPQDSWRGPPPLFQQQRFDRGVGAEPLLPWNRMLQTQNAAFQPNQYQMLAGPGGYPPRRDDRGGRQGYPREGRKYPLPPPSGRYNWN

SEQ ID NO: 173476 - DNA, 2853 bp, Artificial Sequence
  derived and/or modified sequence
atgggcgtgcccgctttcttccgatggctctcccgcaaatacccatccattatcgtaaattgtgtggaggagaagccaaaggagtgcaatggcgtaaagattcccgtggacgccagtaagccaaatccaaatgacgtggagttcgataatttatatctggacatgaatggtattatccacccctgtacccaccctgaagacaaaccagcacctaaaaatgaagacgagatgatggtcgccatattcgagtacattgatcggttgttttccatcgtccgcccacgccgactcctttatatggcaatcgatggggttgcccctagggcaaaaatgaaccagcaaaggtccaggagattccgggcatctaaggaaggcatggaggccgccgtggagaaacagcgtgtgcgcgaagagatactcgcaaagggcgggttcctcccgcctgaggagattaaagaaagatttgattccaattgtattacccccggcaccgaatttatggataatctggccaagtgccttcggtactatattgccgacagattaaataacgacccggggtggaaaaacttaactgttattctctcagacgcctccgccccaggcgagggcgaacataagattatggactatatacggcgtcagcgggcccagccgaaccatgatcctaacactcatcattgcctgtgcggtgcggacgccgatctgataatgttgggactggctactcatgaacccaattttaccataatccgggaggagttcaaacctaacaagcccaagccttgcggactctgcaatcagttcggccacgaggttaaagattgcgaagggctaccacgggaaaagaaaggaaagcacgatgaactggcagatagtttgccctgcgcggagggcgagtttattttcctacgcttgaacgtcctgagagagtatcttgagcgtgagctgacaatggccagcctcccattcactttcgacgttgaaaggagcatagatgactgggtctttatgtgctttttcgtgggaaacgatttcctcccgcacctcccttcgttggaaattcgagaaaacgcgatagacaggttggtcaacatatacaagaacgttgttcacaaaaccggaggatacttgaccgagtccggatacgtgaatctgcagcgcgtgcagatgattatgcttgcagttggggaagtggaggattccatcttcaaaaagcgaaaagacgacgaggactcttttcggaggaggcagaaagaaaaaagaaaacgcatgaaacgcgaccagcccgcgttcactccaagcggcatcctcacaccacacgcccttggcagccggaacagccccggaagtcaggtggcatccaatccacgacaggctgcctacgaaatgaggatgcagaacaattctagtccttccatcagcccaaatacatcatttacctctgacggctcacccagccctttgggggggattaaacggaaagccgaggatagtgacagcgagcccgaacccgaggacaatgtgaggctatgggaggccggctggaaacagagatactataaaaataaattcgacgtggacgccgccgacgagaagtttcgacgcaaggttgttcagtcttacgttgaagggctgtgttgggtattgcgatattattatcagggctgtgcatcctggaaatggtactaccctttccactatgcaccattcgccagcgactttgagggaatcgccgatatgccctctgattttgaaaagggcacaaaacctttcaagcccctggaacagttgatgggagtttttcccgccgcctctggaaacttcctccccccttcctggagaaagttgatgtccgatccagattcttcaatcattgacttttacccagaggacttcgctatagacttgaatggcaagaagtacgcctggcagggtgtcgcgctcctgccatttgttgacgagaggcggttgcgagcagccctggaagaggtgtacccagatttgactcctgaggaaactcgacggaactcccttgggggggacgttctgttcgtggggaaacaccatccactacacgacttcattctcgaactttaccagacaggcagtactgagcccgtggaagtacctccggagctatgccacggcatccaaggtaaattttcccttgatgaagaagccatcttaccagaccaaatcgtgtgttcccctgttcccatgctgcgggacctcacccagaacactgtcgtgagcattaacttcaaggacccacagttcgcagaagattatatctttaaagcagtgatgctccccggcgctcgcaagcctgcagccgtccttaagccctccgattgggaaaaatctagcaatggccgccagtggaagcctcagcttggctttaatagggaccggagaccagttcacctcgatcaggccgccttcaggacgcttggacacgttatgccgaggggaagcggaactggtatttactcgaacgctgcacctcccccagtgacctaccagggcaacctttacaggccgctgctgagaggccaggcgcagatcccgaagttgatgtccaacatgaggcctcaggacagctggaggggcccacctcccctgtttcagcagcagcgttttgatagaggggtcggagctgagcctctgcttccttggaaccgcatgctccaaacgcaaaatgccgcctttcagccgaatcaatatcaaatgctggccggacctgggggttaccctccccgccgagatgacaggggtgggagacaaggctacccacgggaaggaagaaaatatcccctaccacctcctagcggacggtataattggaattag

SEQ ID NO: 173477 - DNA, 2625 bp, Artificial Sequence
  derived and/or modified sequence
atgatggtggcaatcttcgagtacattgaccgtctgttcagcattgtgcggccgagaagactattgtatatggctatcgatggcgttgcaccaagggccaagatgaaccagcagaggagccggcgattccgtgcctcaaaggaggggatggaagccgctgtagagaagcagagggtgagggaagagatcctggctaagggggggttccttccacctgaggaaattaaagaacgcttcgattccaactgtattacaccgggaaccgaattcatggacaacctggctaagtgcctccgctactacatcgcagatagactgaacaacgacccgggttggaaaaatctgactgtgatactgtctgacgcatctgctcctggcgaaggagaacacaagattatggattatatacgtcgccagagggcgcagcctaatcatgacccgaacacccatcactgcctatgtggcgcggatgcagacctgataatgttagggctagccacccatgagccaaacttcacaattatccgcgaggaatttaaaccaaacaagcccaaaccatgcggcctctgcaaccagttcggtcacgaggtgaaggattgcgagggcctcccaagggagaagaagggtaagcatgatgagttggctgattccctcccttgtgccgaaggggagttcatcttcctgcgcctgaatgtgctgcgtgaatacctagagcgtgaactgaccatggctagcttgccctttacttttgatgtggaacgctctatcgatgattgggtcttcatgtgcttcttcgtgggtaatgactttttgcctcacctgcccagtttggagatcagagagaacgccatcgacaggctggtcaatatctacaagaacgtcgtacacaagactggcggatatctcacggagtctggctatgtgaatctgcaacgcgtccaaatgattatgcttgctgttggggaggtcgaggatagtatattcaaaaaaaggaaggacgacgaagactccttcaggagacgacagaaggaaaaacgcaaacgaatgaagcgtgatcaacccgcatttacccctagcggcatcttgacgccccatgcactaggaagccgtaattcccctggttcacaggtcgcctccaaccccaggcaggcagcttacgagatgagaatgcaaaataattcatcacccagtatctcacctaacacatcatttacaagtgacgggtctccttcgcctctgggggggatcaagagaaaggcggaggattcggactccgagccagagcctgaggacaatgtccgtctgtgggaggcgggctggaagcagcggtactacaagaataagttcgacgttgatgcggctgacgaaaaattcaggagaaaggtcgttcaatcttatgtggaaggcctatgttgggttctgcgatactactaccagggctgcgcatcttggaagtggtattatccttttcattacgctcccttcgccagcgatttcgagggcatcgcagatatgcccagcgattttgagaagggcactaagccgttcaaaccactggagcaactcatgggggttttcccagccgcatctggaaacttccttcctccctcttggagaaagttaatgtctgaccccgattcttccattatcgatttctatcctgaagattttgcgatcgatctgaatggtaagaaatacgcttggcaaggcgtggcgttgctgccttttgttgatgagcgtcgtctgagagccgcccttgaagaagtgtatccagacttgacccctgaggaaacccggagaaattccctgggcggcgacgtcctgttcgtgggcaagcaccatcctctgcacgactttatcctggagctctaccagactggcagcactgagccagtcgaagtacctcccgagttgtgccacggaattcagggcaagttctcactcgatgaagaagctatcctccccgaccagatcgtttgcagccccgtgccaatgttacgcgaccttacccaaaacacagtggtgtccattaatttcaaggacccgcaattcgctgaggactatatctttaaggccgtcatgctgccaggcgctcgcaagcctgcagctgtgctgaagccgagtgactgggagaaatcttctaatggccggcagtggaagccccagctgggcttcaatagagataggagacccgtgcacctcgaccaagctgccttcaggacgctggggcatgttatgccgcgcggcagtgggacgggtatatacagcaatgccgcacccccacctgtcacgtatcagggcaacctctacagaccactgctccgcggtcaggcacagatccccaagcttatgtcgaacatgcggccacaggactcctggagaggtcccccacctctcttccagcagcagcgcttcgatcggggggtgggcgccgaaccactgttgccgtggaataggatgcttcaaactcagaacgcagcattccagccaaatcagtaccaaatgttagcggggccaggtggatacccaccgcgtagagatgacaggggtggccgccagggatatcctagagagggccggaaataccccctgccacctccttcaggccgctacaactggaactag

SEQ ID NO: 173478 - DNA, 2691 bp, Artificial Sequence
  derived and/or modified sequence
atgaatggaatcattcatccctgcactcatccggaggacaagccagctcccaaaaatgaagatgagatgatggtggcaatcttcgaatatatcgatagacttttctccattgtccgcccacgtcgcctgctttatatggccatcgacggcgtggccccccgcgccaaaatgaaccagcaacggtcaagacgctttcgcgcctcgaaggagggcatggaagcagctgtggaaaaacagcgtgttcgggaagagatcttggctaagggtgggttcctgccccccgaagaaattaaggaacgcttcgattctaactgtataacgcccggtaccgaattcatggataacctggccaaatgccttcgttattacatcgcggaccgccttaacaacgaccccggatggaagaacctcaccgttattctgtctgatgcctctgccccaggtgaaggggaacataagatcatggactacattcggagacaacgtgcacagcctaaccacgaccctaatacccaccactgcctctgtggtgctgatgccgatctgatcatgctgggtctggccacccacgagccaaattttacaataattcgtgaggaattcaaacccaataaaccgaaaccatgtggactgtgcaaccaatttggccatgaggtaaaggactgcgagggcctcccaagggagaagaagggaaaacacgacgagctagccgacagtctgccctgcgcagagggagagttcatttttctgagactgaacgtgttacgcgaatacctggagagggaattaacaatggcctcactcccatttactttcgatgtagagcgatctattgatgattgggtctttatgtgcttttttgtgggtaacgactttctcccccaccttccaagtttggagatcagagaaaatgctattgacagactggttaatatttacaaaaatgtcgtgcacaagaccgggggataccttactgagtccggttatgttaatcttcaacgggtgcaaatgatcatgcttgccgtgggtgaggtggaggactccatttttaaaaagaggaaggatgacgaagatagcttccgccgaagacagaaggaaaagaggaagaggatgaagcgtgatcagcctgccttcaccccaagtgggattcttacaccacatgcgttggggtcacggaatagtcccggaagccaggtagcctccaaccctcgtcaggcagcatatgaaatgcgcatgcaaaacaactcgtctccatccatttctccaaataccagtttcacctccgacggctcaccttccccgctgggcggaattaagagaaaggcagaagactcagactccgagccagaaccggaagacaacgtccgtctctgggaagcgggctggaagcagaggtactacaaaaataagttcgacgtggatgctgctgatgaaaagtttcggcgcaaggtggtgcaaagctacgttgaaggactgtgttgggtcctcaggtattattatcaggggtgtgcaagctggaaatggtactaccctttccattacgctccgttcgccagcgacttcgaaggaatagccgatatgccttccgatttcgagaaggggaccaaacccttcaagcccctcgagcagctcatgggtgtcttccccgctgcctctggaaatttcctgcctccaagctggcgcaagttgatgagcgacccggattcttccatcatagatttctatcccgaggatttcgctatagatctgaatggcaaaaaatacgcttggcagggggtggccctgctgccttttgttgacgagcggcgcctccgcgctgctctagaggaagtgtatcctgacttgaccccggaagaaacccggaggaacagcctcggcggagacgttctttttgtgggtaagcaccacccactgcatgacttcatcttagaactctatcagaccggtagtactgaacctgtcgaggtccccccagagctgtgccacgggatccagggcaagttctctcttgatgaagaggcgattctgccggaccagatagtctgttcccccgttcctatgcttcgcgacctcacccagaacactgtcgtcagtatcaactttaaagacccccagtttgctgaggattatatctttaaagctgtgatgctgccaggtgccagaaagcccgcagccgtgctcaagccaagcgattgggaaaaatcatccaatgggcggcagtggaagccgcagcttggcttcaatagagacaggaggcctgtgcacctggaccaggctgcatttcgaacactggggcacgttatgccgagggggtccgggactggcatatacagtaacgccgccccacctcccgtcacttatcaaggaaacctctatcgacctctcctgagaggacaggctcagatccccaagttaatgtcaaacatgaggccacaggatagctggcggggcccacctccacttttccagcagcagcgcttcgaccgcggggtgggagccgagcctctattaccctggaatcgtatgctccagacccaaaacgctgcattccaacccaatcagtaccagatgctcgcaggaccgggaggttacccaccacgacgcgatgaccgcggtggtcggcaaggttatccacgggagggacggaagtaccctcttcccccaccatccggccgttacaattggaactag

SEQ ID NO: 173479 - DNA, 2853 bp, Artificial Sequence
  derived and/or modified sequence
atgggcgtgcctgccttcttccgctggctgagcaggaagtaccccagcatcatcgtgaactgtgtggaggagaagcccaaggagtgcaatggagtgaagatccctgtggatgccagcaagcccaaccccaatgatgtggagtttgacaacctgtacctggacatgaatggcatcatccacccctgcacccaccctgaggacaagccagcccccaagaatgaagatgagatgatggtggccatctttgagtacatcgacaggctcttcagcatcgtgcggccccggcggctgctgtacatggccattgatggagtggccccccgggccaagatgaaccagcagaggagccgccgcttccgggccagcaaggagggcatggaggccgctgtggagaagcagagggtgcgggaggagatcctggccaagggcggcttcctgcccccagaggagatcaaggagagatttgacagcaactgcatcaccccaggcacagagttcatggacaacctggccaagtgcctgcgctactacatcgctgaccggctgaacaatgaccccggctggaagaacctgaccgtcatcctgagtgatgccagcgcccctggagagggggagcacaagatcatggactacatccggcggcagagggcccagcccaaccacgaccccaacacccaccactgcctgtgtggggctgatgctgacctgatcatgctgggcctggccacccatgagcccaacttcaccatcatccgggaggagttcaagcccaacaagcccaagccctgtggcctgtgcaaccagtttggacatgaggtgaaggactgtgagggcctgccccgggagaagaagggcaagcatgatgagctggccgacagcctgccctgtgccgagggggagttcatcttcctgcggctgaatgtgctgcgggagtacctggagcgggagctgaccatggccagcctgcccttcacctttgatgtggagaggagcattgatgactgggtgttcatgtgcttctttgtgggcaatgacttcctgccccacctgcccagcctggagatcagagaaaatgccatcgaccggctggtgaacatctacaagaatgtggtgcacaagacaggaggctacctgacagaaagtggctacgtgaacctgcagagggtgcagatgatcatgctggccgtgggggaggtggaggacagcatcttcaagaagaggaaggatgatgaagattccttcagaagacggcagaaggagaagaggaagaggatgaagagggaccagcctgccttcaccccatctggcatcctgacccctcatgccctgggcagcaggaacagccctggcagccaggtggccagcaacccccggcaggccgcctatgagatgaggatgcagaacaacagcagccccagcatcagccccaacaccagcttcaccagtgatggcagccccagccccctgggcggcatcaagaggaaggcagaagattctgattctgagcctgagcctgaggacaacgtgcggctgtgggaggccggctggaagcagcgctactacaagaacaagtttgatgtggatgctgctgatgagaagttccggaggaaggtggtgcagagctatgtggagggcctgtgctgggtgctgcgctactactaccagggctgtgcctcctggaagtggtactaccccttccactacgccccctttgccagtgactttgagggcattgctgacatgcccagcgactttgagaagggcaccaagcccttcaagcccctggagcagctgatgggcgtcttccctgctgccagcggcaacttcctgcccccatcctggaggaagctgatgtctgaccctgacagcagcatcatcgacttctacccagaagattttgccatcgacctgaatggcaagaagtatgcctggcagggcgtggccctgctgccctttgtggatgagcggcggctgcgggccgccctggaggaggtgtacccagacctgaccccagaggagaccaggaggaacagcctgggcggagatgtgctgtttgtgggcaagcaccaccccctgcatgacttcatcctggagctgtaccagacaggcagcacagagcctgtggaggtgcccccagagctgtgccacggcatccagggcaagttcagcctggatgaggaggccatcctgcctgaccagatcgtgtgcagccctgtgcccatgctgcgggacctgacccagaacacagtggtgtccatcaacttcaaggacccccagtttgctgaggactacatcttcaaggctgtgatgctgcccggggccaggaagccagctgctgtgctgaagcccagcgactgggagaagagcagcaatggccggcagtggaagccccagctgggcttcaacagagacagaagacctgtgcacctggaccaggccgccttccgcaccctgggccacgtgatgccccggggcagcggcaccggcatctacagcaatgctgcccctcctcctgtgacctaccagggcaacctgtaccggcccctgctgcggggccaggcccagatccccaagctgatgagcaacatgaggccccaggacagctggaggggccccccacccctcttccagcagcagagatttgaccggggcgtgggcgctgagcccctgctgccctggaacaggatgctgcagacccagaatgctgccttccagcccaaccagtaccagatgctggccggccctgggggctaccccccaagaagagatgaccggggcggccggcagggctacccccgggagggcaggaagtaccccctgcccccacccagcggccgctacaactggaactag

SEQ ID NO: 173480 - DNA, 2625 bp, Artificial Sequence
  derived and/or modified sequence
atgatggtggccatctttgagtacatcgacaggctcttcagcatcgtgcggccccggcggctgctgtacatggccattgatggagtggccccccgggccaagatgaaccagcagaggagccgccgcttccgggccagcaaggagggcatggaggccgctgtggagaagcagagggtgcgggaggagatcctggccaagggcggcttcctgcccccagaggagatcaaggagagatttgacagcaactgcatcaccccaggcacagagttcatggacaacctggccaagtgcctgcgctactacatcgctgaccggctgaacaatgaccccggctggaagaacctgaccgtcatcctgagtgatgccagcgcccctggagagggggagcacaagatcatggactacatccggcggcagagggcccagcccaaccacgaccccaacacccaccactgcctgtgtggggctgatgctgacctgatcatgctgggcctggccacccatgagcccaacttcaccatcatccgggaggagttcaagcccaacaagcccaagccctgtggcctgtgcaaccagtttggacatgaggtgaaggactgtgagggcctgccccgggagaagaagggcaagcatgatgagctggccgacagcctgccctgtgccgagggggagttcatcttcctgcggctgaatgtgctgcgggagtacctggagcgggagctgaccatggccagcctgcccttcacctttgatgtggagaggagcattgatgactgggtgttcatgtgcttctttgtgggcaatgacttcctgccccacctgcccagcctggagatcagagaaaatgccatcgaccggctggtgaacatctacaagaatgtggtgcacaagacaggaggctacctgacagaaagtggctacgtgaacctgcagagggtgcagatgatcatgctggccgtgggggaggtggaggacagcatcttcaagaagaggaaggatgatgaagattccttcagaagacggcagaaggagaagaggaagaggatgaagagggaccagcctgccttcaccccatctggcatcctgacccctcatgccctgggcagcaggaacagccctggcagccaggtggccagcaacccccggcaggccgcctatgagatgaggatgcagaacaacagcagccccagcatcagccccaacaccagcttcaccagtgatggcagccccagccccctgggcggcatcaagaggaaggcagaagattctgattctgagcctgagcctgaggacaacgtgcggctgtgggaggccggctggaagcagcgctactacaagaacaagtttgatgtggatgctgctgatgagaagttccggaggaaggtggtgcagagctatgtggagggcctgtgctgggtgctgcgctactactaccagggctgtgcctcctggaagtggtactaccccttccactacgccccctttgccagtgactttgagggcattgctgacatgcccagcgactttgagaagggcaccaagcccttcaagcccctggagcagctgatgggcgtcttccctgctgccagcggcaacttcctgcccccatcctggaggaagctgatgtctgaccctgacagcagcatcatcgacttctacccagaagattttgccatcgacctgaatggcaagaagtatgcctggcagggcgtggccctgctgccctttgtggatgagcggcggctgcgggccgccctggaggaggtgtacccagacctgaccccagaggagaccaggaggaacagcctgggcggagatgtgctgtttgtgggcaagcaccaccccctgcatgacttcatcctggagctgtaccagacaggcagcacagagcctgtggaggtgcccccagagctgtgccacggcatccagggcaagttcagcctggatgaggaggccatcctgcctgaccagatcgtgtgcagccctgtgcccatgctgcgggacctgacccagaacacagtggtgtccatcaacttcaaggacccccagtttgctgaggactacatcttcaaggctgtgatgctgcccggggccaggaagccagctgctgtgctgaagcccagcgactgggagaagagcagcaatggccggcagtggaagccccagctgggcttcaacagagacagaagacctgtgcacctggaccaggccgccttccgcaccctgggccacgtgatgccccggggcagcggcaccggcatctacagcaatgctgcccctcctcctgtgacctaccagggcaacctgtaccggcccctgctgcggggccaggcccagatccccaagctgatgagcaacatgaggccccaggacagctggaggggccccccacccctcttccagcagcagagatttgaccggggcgtgggcgctgagcccctgctgccctggaacaggatgctgcagacccagaatgctgccttccagcccaaccagtaccagatgctggccggccctgggggctaccccccaagaagagatgaccggggcggccggcagggctacccccgggagggcaggaagtaccccctgcccccacccagcggccgctacaactggaactag

SEQ ID NO: 173481 - DNA, 2691 bp, Artificial Sequence
  derived and/or modified sequence
atgaatggcatcatccacccctgcacccaccctgaggacaagccagcccccaagaatgaagatgagatgatggtggccatctttgagtacatcgacaggctcttcagcatcgtgcggccccggcggctgctgtacatggccattgatggagtggccccccgggccaagatgaaccagcagaggagccgccgcttccgggccagcaaggagggcatggaggccgctgtggagaagcagagggtgcgggaggagatcctggccaagggcggcttcctgcccccagaggagatcaaggagagatttgacagcaactgcatcaccccaggcacagagttcatggacaacctggccaagtgcctgcgctactacatcgctgaccggctgaacaatgaccccggctggaagaacctgaccgtcatcctgagtgatgccagcgcccctggagagggggagcacaagatcatggactacatccggcggcagagggcccagcccaaccacgaccccaacacccaccactgcctgtgtggggctgatgctgacctgatcatgctgggcctggccacccatgagcccaacttcaccatcatccgggaggagttcaagcccaacaagcccaagccctgtggcctgtgcaaccagtttggacatgaggtgaaggactgtgagggcctgccccgggagaagaagggcaagcatgatgagctggccgacagcctgccctgtgccgagggggagttcatcttcctgcggctgaatgtgctgcgggagtacctggagcgggagctgaccatggccagcctgcccttcacctttgatgtggagaggagcattgatgactgggtgttcatgtgcttctttgtgggcaatgacttcctgccccacctgcccagcctggagatcagagaaaatgccatcgaccggctggtgaacatctacaagaatgtggtgcacaagacaggaggctacctgacagaaagtggctacgtgaacctgcagagggtgcagatgatcatgctggccgtgggggaggtggaggacagcatcttcaagaagaggaaggatgatgaagattccttcagaagacggcagaaggagaagaggaagaggatgaagagggaccagcctgccttcaccccatctggcatcctgacccctcatgccctgggcagcaggaacagccctggcagccaggtggccagcaacccccggcaggccgcctatgagatgaggatgcagaacaacagcagccccagcatcagccccaacaccagcttcaccagtgatggcagccccagccccctgggcggcatcaagaggaaggcagaagattctgattctgagcctgagcctgaggacaacgtgcggctgtgggaggccggctggaagcagcgctactacaagaacaagtttgatgtggatgctgctgatgagaagttccggaggaaggtggtgcagagctatgtggagggcctgtgctgggtgctgcgctactactaccagggctgtgcctcctggaagtggtactaccccttccactacgccccctttgccagtgactttgagggcattgctgacatgcccagcgactttgagaagggcaccaagcccttcaagcccctggagcagctgatgggcgtcttccctgctgccagcggcaacttcctgcccccatcctggaggaagctgatgtctgaccctgacagcagcatcatcgacttctacccagaagattttgccatcgacctgaatggcaagaagtatgcctggcagggcgtggccctgctgccctttgtggatgagcggcggctgcgggccgccctggaggaggtgtacccagacctgaccccagaggagaccaggaggaacagcctgggcggagatgtgctgtttgtgggcaagcaccaccccctgcatgacttcatcctggagctgtaccagacaggcagcacagagcctgtggaggtgcccccagagctgtgccacggcatccagggcaagttcagcctggatgaggaggccatcctgcctgaccagatcgtgtgcagccctgtgcccatgctgcgggacctgacccagaacacagtggtgtccatcaacttcaaggacccccagtttgctgaggactacatcttcaaggctgtgatgctgcccggggccaggaagccagctgctgtgctgaagcccagcgactgggagaagagcagcaatggccggcagtggaagccccagctgggcttcaacagagacagaagacctgtgcacctggaccaggccgccttccgcaccctgggccacgtgatgccccggggcagcggcaccggcatctacagcaatgctgcccctcctcctgtgacctaccagggcaacctgtaccggcccctgctgcggggccaggcccagatccccaagctgatgagcaacatgaggccccaggacagctggaggggccccccacccctcttccagcagcagagatttgaccggggcgtgggcgctgagcccctgctgccctggaacaggatgctgcagacccagaatgctgccttccagcccaaccagtaccagatgctggccggccctgggggctaccccccaagaagagatgaccggggcggccggcagggctacccccgggagggcaggaagtaccccctgcccccacccagcggccgctacaactggaactag

SEQ ID NO: 173482 - DNA, 2853 bp, Artificial Sequence
  derived and/or modified sequence
atgggcgtgcccgccttcttccggtggctgagccggaagtacccctctatcattgttaactgtgtcgaggagaaaccgaaggagtgcaatggcgtgaaaatccccgtggatgcttcaaagcccaaccccaatgatgtcgagtttgacaatctctatctggacatgaatggcatcattcacccctgcacgcaccccgaagacaagcctgcgccaaagaatgaagatgagatgatggtcgcaatcttcgaatacatcgaccggcttttttccatagtcaggccaaggcgcctgctgtatatggcgattgacggcgtggctccgcgggctaagatgaaccagcagagaagcaggagatttcgcgcctctaaagaggggatggaagcagccgtggaaaaacagcgagtcagagaggaaattctggcaaaaggtgggtttctgccacctgaggaaattaaagagagatttgacagtaactgcattaccccaggaacagagtttatggacaatctcgctaagtgcctgagatattacatcgctgaccgcttaaacaacgaccccgggtggaagaatttaactgttattctgtctgacgccagcgctcctggagagggcgaacataagatcatggactatatcagacgacagcgggcccaaccaaaccacgaccccaatacccatcactgcctttgcggagctgacgcagacctgataatgctgggactggcgactcacgaaccgaatttcaccataattcgcgaagagttcaaacctaacaagcctaagccttgcggtctctgcaaccagtttgggcatgaagtgaaggattgcgaaggactccctagggagaagaaaggcaagcacgatgaattggcggattcactgccttgcgccgagggcgaattcatatttttgcgtcttaatgtcttacgcgagtatcttgagcgtgaactgaccatggcctctctgcctttcacattcgatgtggaacgcagtattgatgattgggtctttatgtgcttttttgtcgggaacgattttctcccacacctgccgagtttagaaatcagagagaacgccatagatcgcctggttaacatttacaagaacgtggtgcacaagaccggagggtatctgacagaatcaggatatgtgaatctccagcgggtgcagatgatcatgctggcagttggggaagtggaggactctatattcaaaaagagaaaggacgacgaagatagttttaggcgtcgacagaaagagaagcgaaaacggatgaagagggatcagcccgccttcacaccatcaggcattctgacgcctcacgcgctcggctcccgcaattcaccggggtcacaggtcgcgagtaaccccaggcaggctgcttacgagatgcggatgcagaataactcaagcccatccatttcgcctaacaccagttttacctcggatggaagcccctctcccctgggcggcatcaagcgcaaggcggaagattctgattctgagccagagcctgaagataacgtgcgcctatgggaggccggatggaagcagcggtactataaaaacaaattcgacgtggatgccgccgatgagaagtttagaaggaaggtggtgcagagctatgtggaagggttatgttgggtgctacgctattattatcaggggtgcgccagctggaaatggtattacccttttcattatgcgccgttcgccagcgacttcgagggcattgcggacatgccatccgatttcgagaaaggcaccaaaccttttaaacccctcgagcagctgatgggcgtgtttcccgcagcctctggtaactttctgcctccttcctggcggaaattaatgtctgacccagattcctcaatcattgacttctatccagaagattttgccatagatttaaacggaaaaaaatacgcttggcaaggtgtggcactgttaccatttgtggatgaacgtcgcttgcgcgccgcactcgaggaagtgtaccccgacctgacgccagaggaaacccgaaggaattctctgggcggcgacgttctatttgtggggaagcaccaccccctgcacgattttatcctcgaactataccaaaccgggagcaccgagccagtggaggtgccaccagagctctgtcacggcatccagggaaagttcagtctggacgaagaggcaattcttcccgatcagattgtgtgctctcctgtaccaatgctgcgggatctcacacaaaacaccgtggtgagcataaacttcaaggaccctcagtttgccgaagattatattttcaaggctgtgatgctgcctggtgcacgaaaacccgctgcagtcctgaagccaagcgactgggaaaagtcatctaacggacggcagtggaaaccacagctaggctttaacagggatcgaagacccgtccacctagatcaggccgccttccgaacactggggcacgtgatgcccagggggtccggtaccggaatctattccaacgccgctccgcctcctgttacttatcaggggaacctgtaccgacccctgctgcgaggtcaggctcagatcccaaagctcatgagcaacatgagacctcaagattcatggagaggtcccccccccttattccagcaacaaaggtttgataggggcgtgggtgctgaaccactgctgccatggaatcgcatgctgcagactcagaacgccgccttccaacctaaccagtaccaaatgctcgctggtccaggtggttatccccctagaagggatgatcgaggtggcagacaggggtacccccgggagggaaggaaataccccctacctccaccttcaggtcggtacaactggaactag

SEQ ID NO: 173483 - DNA, 2625 bp, Artificial Sequence
  derived and/or modified sequence
atgatggtggccatcttcgagtacatcgaccggctgttcagcatcgttcgaccaagacgtcttttgtacatggccatagacggagtagcaccaagagctaaaatgaaccagcagcgcagcagaaggttccgtgcatccaaagaggggatggaagcggcagtggagaaacagagagtgcgcgaagagatcttggcgaaaggtggttttctcccaccagaggagattaaagagaggttcgattctaactgtataacacccgggaccgaattcatggacaacctggcaaaatgtctgagatactatatcgcagacaggctcaacaatgacccaggctggaaaaacctgaccgtaatactatccgacgcctctgcacccggggaaggcgaacacaagatcatggattacattcggaggcaaagagctcagcccaatcatgacccgaacactcatcactgcttgtgcggagcggacgccgatctcatcatgctggggcttgctactcacgagcccaattttaccatcattcgggaagaattcaagccaaataagcctaagccttgcggcttgtgcaaccagtttggccacgaagtgaaagactgcgaggggctgccgagggagaaaaagggcaagcatgatgagctggccgattcactaccatgcgccgaaggtgagtttatcttcctgagactgaacgtcctcagggaatacctggagcgggagctcaccatggcctccttgccattcacattcgacgtggagcgctctattgatgattgggtcttcatgtgcttctttgtgggaaacgatttccttccacatctgccttcactggagattcgagaaaacgcgattgacaggctggtgaacatatacaagaacgttgttcacaaaactggcggttaccttacagaatctgggtacgtcaacttacagagagtgcagatgattatgttagcagtgggcgaagttgaagattctatattcaaaaagcgtaaggacgatgaggactcttttaggcgaaggcagaaagaaaagcgcaagaggatgaaacgggatcagccagcctttaccccatcgggcattttaacacctcacgctctcggatcccgcaactccccaggaagtcaagtggcttctaatccaaggcaggccgcttacgagatgaggatgcagaataacagctcacccagtataagccccaacacaagttttaccagcgatggatcccccagccctctgggtgggataaaacggaaggccgaagattcggatagcgagccagagcctgaggacaacgtgagactctgggaagcaggctggaaacaacgttactacaaaaacaaatttgacgtggatgccgcggatgagaagttccgaaggaaagtggtgcaaagctacgtcgaagggctatgctgggttctgcggtactactaccagggttgcgcctcttggaagtggtattacccctttcactacgctccttttgcaagcgacttcgagggcatcgccgacatgccaagtgactttgagaaaggaacaaaaccgttcaaaccccttgagcagctgatgggcgtgtttcccgctgcgtctggtaacttcctgccaccctcttggaggaagctcatgtctgaccccgactcctctatcatagacttctatccagaggatttcgctatcgatctcaacggaaaaaagtatgcttggcaaggcgttgctctgctgcctttcgtcgacgagcgacggctgagagccgctctcgaggaggtgtatcctgacctgactcccgaggagactcggcgaaactcactgggaggagatgttctgtttgtggggaagcatcatccgctgcacgactttatacttgagctttaccagacaggatctaccgagccggtcgaggttcctcccgagctgtgccatgggatccagggcaagttttcgctggacgaagaggctattctgcctgaccagattgtctgttctccggtccctatgctcagagaccttactcagaataccgtcgtaagcatcaactttaaggacccgcaattcgccgaagactatatctttaaggccgtgatgctgcccggcgcccggaaaccagctgcagtccttaagcctagcgattgggaaaaatcttctaacggccgacagtggaaaccccaactcgggttcaatcgagacagaagaccagtgcacctggatcaagcagcttttaggactttggggcacgtgatgcctcgaggctcgggtaccggaatctactctaacgctgcgcctcctcctgtgacgtaccaaggtaacctctatcggcctctgcttagagggcaggcgcagatacctaaacttatgagcaacatgaggccccaggacagttggcgaggcccacccccactgtttcagcaacagcgctttgaccggggcgtcggagctgagccactactaccttggaatcgcatgttgcagacacaaaatgccgcctttcagcccaatcagtatcagatgttggcagggccgggcggatatcctccccgacgtgacgatcgcgggggtagacagggctacccccgcgaggggcggaaatacccactcccccctccaagtggacgttacaactggaactag

SEQ ID NO: 173484 - DNA, 2691 bp, Artificial Sequence
  derived and/or modified sequence
atgaacggcatcatccacccctgcacccaccccgaggacaagcccgccccaaaaaatgaagatgaaatgatggtcgcgattttcgagtatattgatcggttattttcaatcgtgagacccagaaggctgctgtacatggcaatcgacggggttgcaccaagggcgaagatgaatcaacagcgatccaggcgctttcgagcctctaaagaaggaatggaagccgccgtggaaaagcagcgtgtgagggaggaaattctggcaaaaggcggttttctgccccctgaagagataaaggaaagattcgatagcaactgtatcacgcctggtactgaatttatggataacctggccaaatgtctgagatattatatcgctgaccggttgaacaatgaccccgggtggaagaaccttaccgttatactaagcgatgctagtgctcccggggagggagagcataagataatggactatattcgccggcagcgggctcagccaaaccatgatcccaatactcaccactgtctatgtggagctgacgcagacctaatcatgttaggacttgccacacatgagcctaactttacgatcatccgagaggagtttaagcccaacaaacccaagccctgcggcctctgtaatcaattcggccatgaggtcaaagattgcgaaggacttcctagggaaaagaaaggtaagcacgacgagcttgccgacagtttgccctgtgctgagggggagttcatcttcctacggctgaatgttctgcgcgagtatctggagagagaattaacgatggccagtcttccgttcacttttgacgttgagcgctcaattgatgattgggtattcatgtgttttttcgttgggaatgactttcttcctcatttaccttctctcgagatcagggaaaacgccatcgatcgtctggtgaatatctataagaacgtagtacataagactggcggatatctgaccgagtccggttatgtgaatttacagagggtccagatgatcatgctggctgtgggagaggtcgaggatagtattttcaaaaaacgcaaggacgatgaggatagttttaggcgccgccagaaggaaaaaagaaagaggatgaagcgggatcagccggcattcactcccagtggcatcctaacgccccacgccttgggcagcaggaatagtcccggaagccaagtggcaagtaacccgcggcaggctgcctacgagatgagaatgcaaaacaattctagtcctagcatttccccgaacacttcatttacatccgatggctcaccctcaccgctgggcgggatcaaaaggaaggccgaagacagcgacagcgagccggagccagaagacaatgtaagactttgggaagccgggtggaaacaacgatattataagaataagtttgacgtcgacgcggctgacgagaagttccggcggaaggtcgtgcagagctatgttgagggattgtgctgggtcttgaggtactattaccagggatgcgcgtcttggaaatggtattacccgttccactatgctccgtttgctagcgacttcgaagggatagctgacatgccatccgattttgaaaaagggactaagccctttaagcccctggaacaattaatgggcgtgtttcccgccgcctccgggaactttctgcctcctagctggcggaaattgatgtccgatcctgacagttccattattgacttctatccagaggactttgctatagatctgaatgggaagaaatatgcatggcagggcgtcgcactgctgccattcgtggatgagcgtagactgagagcggccctggaggaagtgtatccagatctcacccccgaggagacacgacgcaactcgcttggcggggatgtcttgtttgttgggaaacatcaccccctgcatgatttcattctcgaactgtaccagacaggaagcacagagcccgtggaggtaccacccgaactttgccatggtattcagggaaagttttccctcgatgaggaagctatcctgcctgaccagatcgtttgttctcctgtccccatgttgagagacttaacacagaacacggtcgtgtctatcaactttaaggatccccagttcgcagaagactatatcttcaaggcagtgatgttgcccggagctagaaagcctgcagctgtgcttaaaccctccgattgggaaaaatccagcaatggtaggcagtggaagccccagttgggtttcaatcgggatcgcaggccagtgcatcttgaccaggcagctttccgcaccctgggacatgtgatgccgagggggagtggcacagggatttattcgaatgccgcccccccacccgtaacataccagggaaacctatacaggcccctgctccgtggtcaagctcagatccccaagctgatgtcaaatatgaggccccaggactcttggagagggcctccgcctctgtttcagcaacagagatttgacagaggcgtaggggccgagcctctactgccttggaataggatgctccagacccagaatgccgccttccagccaaaccagtatcagatgctggccggccccggtggctatcccccccgccgtgacgacaggggcggtcggcagggttacccacgagagggaaggaaatacccgctgccccccccgtccggccgctacaattggaactag

SEQ ID NO: 173485 - DNA, 2853 bp, Artificial Sequence
  derived and/or modified sequence
atgggcgtcccagcatttttcaggtggcttagcagaaagtacccttcaatcatcgtgaactgcgtggaggaaaaaccgaaggaatgcaatggtgtgaaaatccctgtggacgcctcaaaacccaatcccaacgacgtggagtttgacaatctatacctagatatgaatggaattatccatccatgtacacaccctgaagataagccagctcccaagaacgaagatgaaatgatggtggccatttttgagtatatcgaccgcttgttcagcatcgttcgtccacgcagactgctctatatggcaattgatggcgtggcccctagagccaaaatgaatcagcaacggtctaggcgcttccgtgcttcaaaggaggggatggaggcagccgtggaaaagcagcgcgtgcgggaggagatactcgcgaaagggggttttctgccgcctgaggaaattaaagaacggtttgattccaactgtataacgcccggaacggaatttatggacaacttggccaagtgcctgcgttattatattgcagaccgccttaataatgatcccggatggaagaatcttacagtcatcttatccgacgctagcgctccaggggaaggggaacacaagatcatggactatatccgacgacagcgcgctcaacctaatcatgatcctaacactcaccattgcctttgcggtgcagatgcagacctgatcatgctggggctggccactcacgaacccaactttacgatcattagagaggaattcaaacccaataaacccaagccttgcggactgtgtaaccagttcggccatgaggtgaaggattgcgaggggctgcccagggaaaagaaagggaagcacgatgagctcgccgatagcctaccatgtgctgagggagagttcatcttcctgcggctgaacgtgctgagggaatacctggaacgggaactcactatggcctccctgcctttcacctttgatgtggagagaagtatcgacgactgggttttcatgtgctttttcgtgggaaacgatttcctgccccacctcccaagcttggaaatcagagaaaatgctatcgaccggctggtgaatatctacaagaacgtggtacataaaaccggcggatacctaactgagagcggctatgtcaatctccagcgagtgcaaatgatcatgttagccgtgggcgaagtggaggacagtatattcaaaaaacgtaaagacgatgaggacagtttccggcgaagacagaaggagaagcggaaaagaatgaaacgagatcagcccgcatttaccccatccgggatattaaccccgcacgccctgggctcaagaaactcacctggctctcaagttgccagtaatcctcggcaggctgcctatgagatgagaatgcagaacaattcatccccaagcatttcaccaaacacctccttcacctcggacggttccccctcccccctcggcggtattaagcggaaggctgaggactccgacagtgagccagagcctgaagacaacgtgcggctgtgggaggccggatggaaacaacgctactacaaaaacaaattcgacgtggatgctgctgacgagaaattccggaggaaagtggttcagagttatgtggaggggctctgttgggtcttgcgatactactatcagggctgtgcatcatggaagtggtattacccgtttcactatgctccattcgcttcagacttcgagggcattgccgacatgccctcagattttgaaaagggcacgaaaccatttaaaccactagagcagcttatgggtgtatttcccgctgcaagcggtaattttctgcctccgtcctggcggaagctgatgtcggaccccgacagctcaataattgatttctatccagaggactttgccatagacctgaacggcaaaaagtatgcctggcagggagtcgcattactcccattcgtggatgaaaggcggcttcgcgcagccctcgaggaagtttacccagacctgacccccgaggaaacacggcgtaattccctcgggggagatgtcctctttgtcgggaagcatcatcctctccacgactttattctggaactataccagaccggcagcactgaaccagttgaggtgcctcccgagctgtgccatggcattcagggaaagttcagtctggatgaagaggctattctgccagatcaaattgtctgtagccccgtgcccatgctgagagacctgacacagaacacagtggtgagtatcaatttcaaagatcctcagttcgccgaggactacatcttcaaagctgtcatgctgcctggtgctcggaaaccggctgcagtgctgaagccctctgattgggaaaaatcatcaaatggtagacagtggaagcctcagttgggatttaaccgcgatcgtaggcccgtacatttagaccaggctgcctttcgtacattgggacacgttatgcctaggggttctggaactgggatctacagtaacgctgctccaccacccgtcacctaccagggaaatctttaccggcctctgttacggggacaagctcaaatccctaagttaatgtcaaacatgcgtccgcaagattcttggagaggacctccacccttatttcagcaacagcggtttgaccgcggtgtcggggcagagcccctcctgccatggaaccgaatgctccagacccagaacgctgcttttcaacctaatcaatatcagatgctggctgggcctgggggttacccccctagacgtgatgaccgaggaggaaggcagggctaccccagagagggtaggaaataccccctgccccctcctagcgggaggtataattggaactag

SEQ ID NO: 173486 - DNA, 2625 bp, Artificial Sequence
  derived and/or modified sequence
atgatggtggctatcttcgaatatattgatcggctgttttccatagtcagaccaagaagactattgtacatggctatcgacggcgtcgcccctcgggctaagatgaaccaacagcggtctcggagatttagagcttcaaaagaagggatggaagctgccgtggaaaagcagagggtcagggaagagatactcgccaagggtgggtttctccctccagaagaaataaaggagaggttcgacagcaattgtatcaccccgggaacggagttcatggacaacctggccaagtgccttagatattatatcgctgatcggctcaataacgaccccggatggaagaacctcaccgtaattctgagcgacgccagtgctcctggagaaggggagcataagattatggattatatccggagacagagagcccaacctaatcacgatcccaacactcatcattgtctctgtggcgctgacgccgacctgatcatgctgggcctagccacacacgaaccgaacttcactattattcgtgaagagttcaagcctaataagcctaagccctgtggattgtgcaaccagtttgggcatgaggtgaaggactgtgaaggcctgcccagagagaaaaaagggaagcacgacgaattagccgactccttgccttgcgccgaaggtgaattcatattcctgcggctcaatgtcctgcgggaatatttagaaagagagctcaccatggcttctctacccttcacgtttgatgtggaaagaagcatcgacgactgggtgttcatgtgttttttcgtgggcaacgatttcctacctcacttgccatctcttgaaatcagggaaaacgcaatagatcgtctagtcaacatctacaaaaacgtcgttcacaagaccgggggatacctgaccgagtcaggctatgtgaacctccagagagtccagatgataatgctggccgtcggcgaggtcgaagactccatctttaaaaagaggaaagacgatgaagactccttcagaaggaggcagaaggaaaaacgcaagcggatgaaacgcgaccaacctgccttcactcctagcggcattctaaccccgcacgctctgggaagtaggaacagtcccggtagtcaggttgcaagtaatccgaggcaggctgcgtatgaaatgcggatgcagaacaattcctctccgagcatctcacccaacacttctttcacaagcgacggaagcccatcgccgctgggcggtatcaagaggaaggctgaggactccgactcagagcccgaaccagaggataatgtaagactctgggaagcaggatggaagcagcggtactacaaaaacaagttcgacgtggatgcagccgacgaaaagttccgtcgcaaagtggtccagagctatgtcgaaggattgtgctgggttttacgctattactaccaaggctgcgccagctggaagtggtattatcctttccattatgcccctttcgcctcagacttcgagggtatcgccgatatgccatctgattttgaaaaaggtacaaaacctttcaagcccctggaacaattgatgggggtatttccggctgcctccggcaatttcctcccacccagctggcggaagttaatgtctgaccccgatagttctatcattgacttttatcctgaggactttgcaatcgacctcaatggcaagaagtatgcgtggcagggcgtggctctgctgcctttcgttgacgaaagaagactacgcgcagcattagaagaagtgtatccagacttgacgcccgaagagacacgacggaactcactgggaggcgatgtcctgtttgtgggaaaacatcatcccttgcatgactttatcttggaactgtaccaaacaggcagcacagagcccgtcgaggtaccccctgagctctgccacggcatacagggcaaatttagtcttgacgaagaagctatattaccggaccaaattgtgtgctcacctgtgccaatgttgcgtgacctgactcaaaacactgtcgtgtccattaattttaaagatcctcaattcgccgaggattatatcttcaaagcggtgatgctgcctggagcaagaaagcccgctgctgtgcttaagccatctgattgggaaaaatcctccaacggacgccagtggaagccccagcttggcttcaaccgtgaccgtaggccggtgcacctggaccaggccgctttcagaactctcgggcacgttatgccaagaggctccgggacagggatttactcaaatgccgcaccaccacctgtcacttaccagggtaacctgtacagaccgcttctgcggggtcaagcacagatacctaagcttatgtcaaacatgagaccgcaggacagctggagggggccaccccctctgttccaacagcagcggtttgacaggggagtgggtgcagaacccctgcttccctggaatcgaatgctgcagactcaaaacgccgcattccagccaaaccagtaccagatgctcgccggaccaggcggatacccacctaggcgcgatgataggggaggccgacaagggtatcctagggagggacgaaaatatcctctccctcccccttccggccgatacaattggaattag

SEQ ID NO: 173487 - DNA, 2691 bp, Artificial Sequence
  derived and/or modified sequence
atgaacgggattatccatccatgcacacacccggaggacaaacccgctccaaagaatgaagacgagatgatggtcgcaatatttgagtatatcgatcgcctgttctctatcgtacgaccgcgacgcctgttgtatatggcaatcgacggggttgccccacgcgctaaaatgaaccagcagcggtcccgccgatttagagcctctaaggaaggcatggaggcagcggtcgagaaacagcgggtacgggaggagatcttagcaaagggcggtttcctgcctccggaagagatcaaagaacgtttcgactcaaattgcatcactccgggaacagaatttatggacaatctggcaaagtgcctgcgatactatatcgccgaccgactgaataatgatccaggctggaagaatctcacagtgatattgtctgacgcctcggcccctggcgagggggaacataagattatggattatatccgtaggcagcgagctcagcccaaccacgatcctaacacacatcactgcttatgcggtgccgacgcggaccttatcatgctggggctcgccacgcatgaaccaaacttcaccatcattagagaggagttcaagcccaataaacctaaaccctgcggcctgtgcaaccaatttggccacgaagtcaaagattgtgagggactaccacgggaaaaaaaagggaagcatgatgaacttgctgacagcctcccctgtgccgaaggggagttcatatttctgcgactgaatgttctgcgagagtacctggaacgggagctgacgatggctagcctccccttcacctttgatgtcgagcgcagcatcgacgactgggtctttatgtgtttttttgtcggcaatgacttcctcccgcatctaccatctctagagatccgagaaaacgctatcgatcgccttgtgaacatctataaaaatgtggttcacaagacaggtggttacctgacagaatctgggtacgttaatctccaaagggtgcagatgatcatgctggctgttggagaagtggaggacagcatcttcaagaagcgcaaggatgatgaggactcgtttaggaggcgtcagaaagaaaaacgcaaacgcatgaagcgcgaccaaccagctttcaccccatcagggatactgactccgcatgcgctgggctccaggaactctcctggatcgcaggttgccagcaacccacgtcaggccgcttatgagatgaggatgcaaaataatagctctccctccatctctccaaacacttcattcacaagcgacggctcgcctagccctttgggcggaatcaagcggaaggcagaggactccgactcggaacccgagccagaagacaatgttcgcctctgggaggccggttggaagcagagatattataaaaacaaatttgacgtggacgccgctgacgaaaagttccgcaggaaggttgtgcagagctatgtggaaggcctctgttgggtattgaggtactactatcagggatgtgcgagctggaagtggtattacccgtttcactatgctcctttcgcaagcgacttcgaaggaattgccgatatgcccagcgacttcgagaaagggaccaagccgtttaaacctctggaacagttgatgggtgtttttcctgcagcatcgggcaactttctcccaccttcttggaggaaacttatgtcagaccccgattcaagcatcatagatttttacccagaggactttgccattgatctaaacgggaagaagtatgcttggcagggcgtggctctcctgcccttcgtcgacgaacggagactccgggctgcactggaagaagtgtacccggatctcactccagaagagacaagacggaacagcctgggtggtgatgtgcttttcgtgggaaaacaccaccccctacatgattttatcctggaactgtatcaaacaggatcaactgagcccgtggaagtaccccctgagctgtgtcatgggatccaagggaagttttctttggacgaggaggccattctgcctgaccaaattgtgtgttcgccagtgccaatgttgagggatcttacacagaacaccgtggtctctatcaatttcaaggatccccagtttgccgaagattatatttttaaagctgtcatgctgcctggcgctcgcaaacccgcagctgttttaaaacccagcgattgggaaaagtcctccaacggaagacagtggaaacctcagttgggtttcaatagggaccgtaggcctgtacatttggatcaggccgcattccgcactcttgggcacgttatgccccgtggttctggcactggcatttacagcaacgcagcaccccctccagtaacctaccaagggaacctgtatagaccacttctaagggggcaagcccagatcccaaagctgatgtcaaacatgaggccgcaggactcctggcggggtcccccacctctgttccagcagcagaggttcgaccgaggagtgggagcagagccactgctgccctggaatcggatgttgcagacgcagaacgccgcttttcaacccaatcagtatcagatgctcgcaggtcctgggggatacccaccacggagagacgatcggggagggagacagggatacccgagggagggtagaaagtaccctctgcctcctccctcggggaggtacaactggaattag

SEQ ID NO: 173488 - DNA, 3435 bp, Artificial Sequence
  derived and/or modified sequence
acgtgggaggaagtgctggtgccctctgccgctgctcccgtctctttggttacgctcgtcagccggtcggccgccgcctccagccgtgtgccgctatgggagtcccggcgttcttccgctggctcagccgcaagtacccgtccatcatagtcaactgcgtggaagagaagccaaaagaatgcaatggtgtaaagattccagttgatgccagtaaacctaatccaaatgatgtggagtttgataatctgtatttggatatgaatggaatcatccatccctgtactcatcctgaagacaaaccagcaccaaaaaatgaagatgaaatgatggttgcaatttttgagtacattgacagacttttcagtattgtaagaccaagaagacttctctacatggcaatagatggagtggcaccacgtgctaaaatgaaccagcagcgttcaaggaggttcagggcatcaaaagaaggaatggaagcagcagtcgagaagcagcgagtcagggaagaaatattggcaaaaggtggctttcttcctccagaagaaataaaagaaagatttgacagcaactgtattacaccaggaactgaattcatggacaatcttgctaaatgccttcgctattacatagctgatcgtttaaataatgaccctgggtggaaaaatttgacagttattttatctgatgctagtgctcctggtgaaggagaacataaaatcatggattacattagaaggcaaagagcccagcctaaccatgacccaaatactcatcattgtttatgtggagcagatgctgatctcattatgcttggccttgccacacatgaaccgaactttaccattattagagaagaattcaaaccaaacaagcccaaaccatgtggtctttgtaatcagtttggacatgaggtcaaagattgtgaaggtttgccaagagaaaagaagggaaagcatgatgaacttgccgatagtcttccttgtgcagaaggagagtttatcttccttcggcttaatgttcttcgtgagtatttggaaagagaactcacaatggccagcctaccattcacatttgatgttgagaggagcattgatgactgggttttcatgtgcttctttgtgggaaatgacttcctccctcatttgccatcgttagagattagggaaaatgcaattgaccgtttggttaacatatacaaaaatgtggtacacaaaactgggggttaccttacagaaagtggttatgtcaatctgcaaagagtacagatgatcatgttagcagttggtgaagttgaggatagcatttttaaaaagagaaaggatgatgaggacagttttagaagacgacagaaagaaaaaagaaagagaatgaagagagatcaaccagctttcactcctagtggaatattaactcctcatgccttgggttcaagaaattcaccaggttctcaagtagccagtaatccgagacaagcagcctatgaaatgaggatgcagaataactctagtccttcgatatctcctaatacgagtttcacatctgatggctccccgtctccattaggaggaattaagcgaaaagcagaagacagtgacagtgaacctgagccagaggataatgtcaggttatgggaagctggctggaagcagcggtactacaagaacaaatttgatgtggatgcagctgatgagaaattccgtcggaaagttgtgcagtcgtacgttgaaggactttgctgggttcttagatattattaccagggctgtgcttcctggaagtggtattatccatttcattatgcaccatttgcttcagactttgaaggcattgcagacatgccatctgattttgagaagggtacgaaaccgtttaaaccactagaacaacttatgggggtatttccagctgcaagtggtaattttctacctccatcatggcggaagctcatgagtgatcctgattctagtataattgacttctatcctgaagattttgctattgatttgaatgggaagaaatatgcatggcaaggtgttgctctcttgccattcgtggatgagcgaaggctacgagctgccctagaagaggtatacccagacctcactccagaagagaccagaagaaacagccttggaggtgatgtcttatttgtggggaaacatcacccactccatgacttcattttagagctgtaccagacaggttccacagagccagtggaggtaccccctgaactatgtcatgggattcaaggaaagttttctttggatgaagaagccattcttccagatcaaatagtatgttctcctgttcctatgttaagggatctgacacagaacactgtagtcagtattaattttaaagacccacagtttgctgaagattacatttttaaagctgtaatgcttccaggagcaagaaagccagcagcagtactgaaacctagtgactgggaaaaatccagcaatggacggcagtggaagcctcagcttggctttaaccgtgaccggaggcctgtgcacctggatcaggcagccttcaggactttgggccatgtgatgccaagaggctcaggaactggcatttacagcaatgctgcaccaccacctgtgacttaccagggaaacttatacaggccgcttttgagaggacaagcccagattccaaaacttatgtcaaatatgaggccccaggattcctggcgaggtcctcctccccttttccagcagcaaaggtttgacagaggcgttggggctgaacctctgctcccatggaaccggatgctgcaaacccagaatgcagccttccagccaaaccagtaccagatgctagctgggcctggtgggtatccacccagacgagatgatcgtggagggagacagggatatcccagagaaggaaggaaataccctttgccaccaccctcaggaagatacaattggaattaagcttttgtaaagctttcccaaatcctttcatcattctacagttttatgctatttgtggaaagatttctttctcaagtagtagtttttaataaaactacagtactttgtgtatttcttttaactgtgtatatttctactgatctgatctcactgtttatgttgctttccaaagatgtatgttgcataatacagtggatctgaatttattattgcttataaaacacatttgatggaataggagtactggtttttcataatggttaaaaatgaaaccagctgtggatttcaaaacacagtgtattctagatcatctaagatccatgctgatttttattgcacaagaattaggtttgaactcgagctggaacctcagcaaactagagtatatattgttcagtatttctttggaaacatttcattaatgtacttgtcttacagaaatttctgaactttagtaaaaaaaaataaagttaaacttttaaaactc

SEQ ID NO: 173489 - DNA, 3066 bp, Artificial Sequence
  derived and/or modified sequence
ctctttggttacgctcgtcagccggtcggccgccgcctccagccgtgtgccgctatgggagtcccggcgttcttccgctggctcagccgcaagtacccgtccatcatagtcaactgcgtggaagagaagaccagcaccaaaaaatgaagatgaaatgatggttgcaatttttgagtacattgacagacttttcagtattgtaagaccaagaagacttctctacatggcaatagatggagtggcaccacgtgctaaaatgaaccagcagcgttcaaggaggttcagggcatcaaaagaaggaatggaagcagcagtcgagaagcagcgagtcagggaagaaatattggcaaaaggtggctttcttcctccagaagaaataaaagaaagatttgacagcaactgtattacaccaggaactgaattcatggacaatcttgctaaatgccttcgctattacatagctgatcgtttaaataatgaccctgggtggaaaaatttgacagttattttatctgatgctagtgctcctggtgaaggagaacataaaatcatggattacattagaaggcaaagagcccagcctaaccatgacccaaatactcatcattgtttatgtggagcagatgctgatctcattatgcttggccttgccacacatgaaccgaactttaccattattagagaagaattcaaaccaaacaagcccaaaccatgtggtctttgtaatcagtttggacatgaggtcaaagattgtgaaggtttgccaagagaaaagaagggaaagcatgatgaacttgccgatagtcttccttgtgcagaaggagagtttatcttccttcggcttaatgttcttcgtgagtatttggaaagagaactcacaatggccagcctaccattcacatttgatgttgagaggagcattgatgactgggttttcatgtgcttctttgtgggaaatgacttcctccctcatttgccatcgttagagattagggaaaatgcaattgaccgtttggttaacatatacaaaaatgtggtacacaaaactgggggttaccttacagaaagtggttatgtcaatctgcaaagagtacagatgatcatgttagcagttggtgaagttgaggatagcatttttaaaaagagaaaggatgatgaggacagttttagaagacgacagaaagaaaaaagaaagagaatgaagagagatcaaccagctttcactcctagtggaatattaactcctcatgccttgggttcaagaaattcaccaggttctcaagtagccagtaatccgagacaagcagcctatgaaatgaggatgcagaataactctagtccttcgatatctcctaatacgagtttcacatctgatggctccccgtctccattaggaggaattaagcgaaaagcagaagacagtgacagtgaacctgagccagaggataatgtcaggttatgggaagctggctggaagcagcggtactacaagaacaaatttgatgtggatgcagctgatgagaaattccgtcggaaagttgtgcagtcgtacgttgaaggactttgctgggttcttagatattattaccagggctgtgcttcctggaagtggtattatccatttcattatgcaccatttgcttcagactttgaaggcattgcagacatgccatctgattttgagaagggtacgaaaccgtttaaaccactagaacaacttatgggggtatttccagctgcaagtggtaattttctacctccatcatggcggaagctcatgagtgatcctgattctagtataattgacttctatcctgaagattttgctattgatttgaatgggaagaaatatgcatggcaaggtgttgctctcttgccattcgtggatgagcgaaggctacgagctgccctagaagaggtatacccagacctcactccagaagagaccagaagaaacagccttggaggtgatgtcttatttgtggggaaacatcacccactccatgacttcattttagagctgtaccagacaggttccacagagccagtggaggtaccccctgaactatgtcatgggattcaaggaaagttttctttggatgaagaagccattcttccagatcaaatagtatgttctcctgttcctatgttaagggatctgacacagaacactgtagtcagtattaattttaaagacccacagtttgctgaagattacatttttaaagctgtaatgcttccaggagcaagaaagccagcagcagtactgaaacctagtgactgggaaaaatccagcaatggacggcagtggaagcctcagcttggctttaaccgtgaccggaggcctgtgcacctggatcaggcagccttcaggactttgggccatgtgatgccaagaggctcaggaactggcatttacagcaatgctgcaccaccacctgtgacttaccagggaaacttatacaggccgcttttgagaggacaagcccagattccaaaacttatgtcaaatatgaggccccaggattcctggcgaggtcctcctccccttttccagcagcaaaggtttgacagaggcgttggggctgaacctctgctcccatggaaccggatgctgcaaacccagaatgcagccttccagccaaaccagtaccagatgctagctgggcctggtgggtatccacccagacgagatgatcgtggagggagacagggatatcccagagaaggaaggaaataccctttgccaccaccctcaggaagatacaattggaattaagcttttgtaaagctttcccaaatcctttcatcattctacagttttatgctatttgtggaaagatttctttctcaagtagtagtttttaataaaactacagtactttgtgtatttcttttaactgtgtatatttctactgatctgatctcactgtttatgttgctttccaaagatgtatgttgcataatacagtggatctgaatttattattgcttataaaacacatttgatggaataggagtactggtttttcataatggttaaaaatgaaaccagctgtggatttc

SEQ ID NO: 173490 - DNA, 2853 bp, Artificial Sequence
  derived and/or modified sequence
atgggcgtgcccgccttcttcagatggctgagcagaaagtaccccagcatcatcgtgaactgcgtggaggagaagcccaaggagtgcaacggcgtgaagatccccgtggacgccagcaagcccaaccccaacgacgtggagttcgacaacctgtacctggacatgaacggcatcatccacccctgcacccaccccgaggacaagcccgcccccaagaacgaggacgagatgatggtggccatcttcgagtacatcgacagactgttcagcatcgtgagacccagaagactgctgtacatggccatcgacggcgtggcccccagagccaagatgaaccagcagagaagcagaagattcagagccagcaaggagggcatggaggccgccgtggagaagcagagagtgagagaggagatcctggccaagggcggcttcctgccccccgaggagatcaaggagagattcgacagcaactgcatcacccccggcaccgagttcatggacaacctggccaagtgcctgagatactacatcgccgacagactgaacaacgaccccggctggaagaacctgaccgtgatcctgagcgacgccagcgcccccggcgagggcgagcacaagatcatggactacatcagaagacagagagcccagcccaaccacgaccccaacacccaccactgcctgtgcggcgccgacgccgacctgatcatgctgggcctggccacccacgagcccaacttcaccatcatcagagaggagttcaagcccaacaagcccaagccctgcggcctgtgcaaccagttcggccacgaggtgaaggactgcgagggcctgcccagagagaagaagggcaagcacgacgagctggccgacagcctgccctgcgccgagggcgagttcatcttcctgagactgaacgtgctgagagagtacctggagagagagctgaccatggccagcctgcccttcaccttcgacgtggagagaagcatcgacgactgggtgttcatgtgcttcttcgtgggcaacgacttcctgccccacctgcccagcctggagatcagagagaacgccatcgacagactggtgaacatctacaagaacgtggtgcacaagaccggcggctacctgaccgagagcggctacgtgaacctgcagagagtgcagatgatcatgctggccgtgggcgaggtggaggacagcatcttcaagaagagaaaggacgacgaggacagcttcagaagaagacagaaggagaagagaaagagaatgaagagagaccagcccgccttcacccccagcggcatcctgaccccccacgccctgggcagcagaaacagccccggcagccaggtggccagcaaccccagacaggccgcctacgagatgagaatgcagaacaacagcagccccagcatcagccccaacaccagcttcaccagcgacggcagccccagccccctgggcggcatcaagagaaaggccgaggacagcgacagcgagcccgagcccgaggacaacgtgagactgtgggaggccggctggaagcagagatactacaagaacaagttcgacgtggacgccgccgacgagaagttcagaagaaaggtggtgcagagctacgtggagggcctgtgctgggtgctgagatactactaccagggctgcgccagctggaagtggtactaccccttccactacgcccccttcgccagcgacttcgagggcatcgccgacatgcccagcgacttcgagaagggcaccaagcccttcaagcccctggagcagctgatgggcgtgttccccgccgccagcggcaacttcctgccccccagctggagaaagctgatgagcgaccccgacagcagcatcatcgacttctaccccgaggacttcgccatcgacctgaacggcaagaagtacgcctggcagggcgtggccctgctgcccttcgtggacgagagaagactgagagccgccctggaggaggtgtaccccgacctgacccccgaggagaccagaagaaacagcctgggcggcgacgtgctgttcgtgggcaagcaccaccccctgcacgacttcatcctggagctgtaccagaccggcagcaccgagcccgtggaggtgccccccgagctgtgccacggcatccagggcaagttcagcctggacgaggaggccatcctgcccgaccagatcgtgtgcagccccgtgcccatgctgagagacctgacccagaacaccgtggtgagcatcaacttcaaggacccccagttcgccgaggactacatcttcaaggccgtgatgctgcccggcgccagaaagcccgccgccgtgctgaagcccagcgactgggagaagagcagcaacggcagacagtggaagccccagctgggcttcaacagagacagaagacccgtgcacctggaccaggccgccttcagaaccctgggccacgtgatgcccagaggcagcggcaccggcatctacagcaacgccgcccccccccccgtgacctaccagggcaacctgtacagacccctgctgagaggccaggcccagatccccaagctgatgagcaacatgagaccccaggacagctggagaggccccccccccctgttccagcagcagagattcgacagaggcgtgggcgccgagcccctgctgccctggaacagaatgctgcagacccagaacgccgccttccagcccaaccagtaccagatgctggccggccccggcggctacccccccagaagagacgacagaggcggcagacagggctaccccagagagggcagaaagtaccccctgcccccccccagcggcagatacaactggaactag

SEQ ID NO: 173491 - DNA, 2625 bp, Artificial Sequence
  derived and/or modified sequence
atgatggtggccatcttcgagtacatcgacagactgttcagcatcgtgagacccagaagactgctgtacatggccatcgacggcgtggcccccagagccaagatgaaccagcagagaagcagaagattcagagccagcaaggagggcatggaggccgccgtggagaagcagagagtgagagaggagatcctggccaagggcggcttcctgccccccgaggagatcaaggagagattcgacagcaactgcatcacccccggcaccgagttcatggacaacctggccaagtgcctgagatactacatcgccgacagactgaacaacgaccccggctggaagaacctgaccgtgatcctgagcgacgccagcgcccccggcgagggcgagcacaagatcatggactacatcagaagacagagagcccagcccaaccacgaccccaacacccaccactgcctgtgcggcgccgacgccgacctgatcatgctgggcctggccacccacgagcccaacttcaccatcatcagagaggagttcaagcccaacaagcccaagccctgcggcctgtgcaaccagttcggccacgaggtgaaggactgcgagggcctgcccagagagaagaagggcaagcacgacgagctggccgacagcctgccctgcgccgagggcgagttcatcttcctgagactgaacgtgctgagagagtacctggagagagagctgaccatggccagcctgcccttcaccttcgacgtggagagaagcatcgacgactgggtgttcatgtgcttcttcgtgggcaacgacttcctgccccacctgcccagcctggagatcagagagaacgccatcgacagactggtgaacatctacaagaacgtggtgcacaagaccggcggctacctgaccgagagcggctacgtgaacctgcagagagtgcagatgatcatgctggccgtgggcgaggtggaggacagcatcttcaagaagagaaaggacgacgaggacagcttcagaagaagacagaaggagaagagaaagagaatgaagagagaccagcccgccttcacccccagcggcatcctgaccccccacgccctgggcagcagaaacagccccggcagccaggtggccagcaaccccagacaggccgcctacgagatgagaatgcagaacaacagcagccccagcatcagccccaacaccagcttcaccagcgacggcagccccagccccctgggcggcatcaagagaaaggccgaggacagcgacagcgagcccgagcccgaggacaacgtgagactgtgggaggccggctggaagcagagatactacaagaacaagttcgacgtggacgccgccgacgagaagttcagaagaaaggtggtgcagagctacgtggagggcctgtgctgggtgctgagatactactaccagggctgcgccagctggaagtggtactaccccttccactacgcccccttcgccagcgacttcgagggcatcgccgacatgcccagcgacttcgagaagggcaccaagcccttcaagcccctggagcagctgatgggcgtgttccccgccgccagcggcaacttcctgccccccagctggagaaagctgatgagcgaccccgacagcagcatcatcgacttctaccccgaggacttcgccatcgacctgaacggcaagaagtacgcctggcagggcgtggccctgctgcccttcgtggacgagagaagactgagagccgccctggaggaggtgtaccccgacctgacccccgaggagaccagaagaaacagcctgggcggcgacgtgctgttcgtgggcaagcaccaccccctgcacgacttcatcctggagctgtaccagaccggcagcaccgagcccgtggaggtgccccccgagctgtgccacggcatccagggcaagttcagcctggacgaggaggccatcctgcccgaccagatcgtgtgcagccccgtgcccatgctgagagacctgacccagaacaccgtggtgagcatcaacttcaaggacccccagttcgccgaggactacatcttcaaggccgtgatgctgcccggcgccagaaagcccgccgccgtgctgaagcccagcgactgggagaagagcagcaacggcagacagtggaagccccagctgggcttcaacagagacagaagacccgtgcacctggaccaggccgccttcagaaccctgggccacgtgatgcccagaggcagcggcaccggcatctacagcaacgccgcccccccccccgtgacctaccagggcaacctgtacagacccctgctgagaggccaggcccagatccccaagctgatgagcaacatgagaccccaggacagctggagaggccccccccccctgttccagcagcagagattcgacagaggcgtgggcgccgagcccctgctgccctggaacagaatgctgcagacccagaacgccgccttccagcccaaccagtaccagatgctggccggccccggcggctacccccccagaagagacgacagaggcggcagacagggctaccccagagagggcagaaagtaccccctgcccccccccagcggcagatacaactggaactag

SEQ ID NO: 173492 - DNA, 2691 bp, Artificial Sequence
  derived and/or modified sequence
atgaacggcatcatccacccctgcacccaccccgaggacaagcccgcccccaagaacgaggacgagatgatggtggccatcttcgagtacatcgacagactgttcagcatcgtgagacccagaagactgctgtacatggccatcgacggcgtggcccccagagccaagatgaaccagcagagaagcagaagattcagagccagcaaggagggcatggaggccgccgtggagaagcagagagtgagagaggagatcctggccaagggcggcttcctgccccccgaggagatcaaggagagattcgacagcaactgcatcacccccggcaccgagttcatggacaacctggccaagtgcctgagatactacatcgccgacagactgaacaacgaccccggctggaagaacctgaccgtgatcctgagcgacgccagcgcccccggcgagggcgagcacaagatcatggactacatcagaagacagagagcccagcccaaccacgaccccaacacccaccactgcctgtgcggcgccgacgccgacctgatcatgctgggcctggccacccacgagcccaacttcaccatcatcagagaggagttcaagcccaacaagcccaagccctgcggcctgtgcaaccagttcggccacgaggtgaaggactgcgagggcctgcccagagagaagaagggcaagcacgacgagctggccgacagcctgccctgcgccgagggcgagttcatcttcctgagactgaacgtgctgagagagtacctggagagagagctgaccatggccagcctgcccttcaccttcgacgtggagagaagcatcgacgactgggtgttcatgtgcttcttcgtgggcaacgacttcctgccccacctgcccagcctggagatcagagagaacgccatcgacagactggtgaacatctacaagaacgtggtgcacaagaccggcggctacctgaccgagagcggctacgtgaacctgcagagagtgcagatgatcatgctggccgtgggcgaggtggaggacagcatcttcaagaagagaaaggacgacgaggacagcttcagaagaagacagaaggagaagagaaagagaatgaagagagaccagcccgccttcacccccagcggcatcctgaccccccacgccctgggcagcagaaacagccccggcagccaggtggccagcaaccccagacaggccgcctacgagatgagaatgcagaacaacagcagccccagcatcagccccaacaccagcttcaccagcgacggcagccccagccccctgggcggcatcaagagaaaggccgaggacagcgacagcgagcccgagcccgaggacaacgtgagactgtgggaggccggctggaagcagagatactacaagaacaagttcgacgtggacgccgccgacgagaagttcagaagaaaggtggtgcagagctacgtggagggcctgtgctgggtgctgagatactactaccagggctgcgccagctggaagtggtactaccccttccactacgcccccttcgccagcgacttcgagggcatcgccgacatgcccagcgacttcgagaagggcaccaagcccttcaagcccctggagcagctgatgggcgtgttccccgccgccagcggcaacttcctgccccccagctggagaaagctgatgagcgaccccgacagcagcatcatcgacttctaccccgaggacttcgccatcgacctgaacggcaagaagtacgcctggcagggcgtggccctgctgcccttcgtggacgagagaagactgagagccgccctggaggaggtgtaccccgacctgacccccgaggagaccagaagaaacagcctgggcggcgacgtgctgttcgtgggcaagcaccaccccctgcacgacttcatcctggagctgtaccagaccggcagcaccgagcccgtggaggtgccccccgagctgtgccacggcatccagggcaagttcagcctggacgaggaggccatcctgcccgaccagatcgtgtgcagccccgtgcccatgctgagagacctgacccagaacaccgtggtgagcatcaacttcaaggacccccagttcgccgaggactacatcttcaaggccgtgatgctgcccggcgccagaaagcccgccgccgtgctgaagcccagcgactgggagaagagcagcaacggcagacagtggaagccccagctgggcttcaacagagacagaagacccgtgcacctggaccaggccgccttcagaaccctgggccacgtgatgcccagaggcagcggcaccggcatctacagcaacgccgcccccccccccgtgacctaccagggcaacctgtacagacccctgctgagaggccaggcccagatccccaagctgatgagcaacatgagaccccaggacagctggagaggccccccccccctgttccagcagcagagattcgacagaggcgtgggcgccgagcccctgctgccctggaacagaatgctgcagacccagaacgccgccttccagcccaaccagtaccagatgctggccggccccggcggctacccccccagaagagacgacagaggcggcagacagggctaccccagagagggcagaaagtaccccctgcccccccccagcggcagatacaactggaactag

SEQ ID NO: 173493 - protein, 495 aa, Artificial Sequence
  derived and/or modified sequence
MAESAPARHRRKRRSTPLTSSTLPSQATEKSSYFQTTEISLWTVVAAIQAVEKKMESQAARLQSLEGRTGTAEKKLADCEKMAVEFGNQLEGKWAVLGTLLQEYGLLQRRLENVENLLRNRNFWILRLPPGSKGEAPKVSRSLENDGVCFTEQEWENLEDWQKELYRNVMESNYETLVSLKVLGQTEGEAELGTEMLGDLEEEGPGGAHPAGGVMIKQELQYTQEGPADLPGEFSCIAEEQAFLSPEQTELWGGQGSSVLLETGPGDSTLEEPVGSRVPSSSRTVGCPKQKSHRQVQLDQECGQGLKLKKDTSRPYECSECEITFRYKQQLATHLRSHSGWGSCTPEEPEESLRPRPRLKPQTKKAKLHQCDVCLRSFSCKVSLVTHQRCHLQEGPSAGQHVQERFSPNSLVALPGHIPWRKSRSSLICGYCGKSFSHPSDLVRHQRIHTGERPYSCTECEKSFVQKQHLLQHQKIHQRERGGLALEPGRPNGLL

SEQ ID NO: 173494 - DNA, 2796 bp, Artificial Sequence
  derived and/or modified sequence
gcggcggcttccaacaggctctggggcgccgagcggacaggaacgcagcacgggggctccgaggcggggtctgggtgttgaggggcgactggagccatggcggagtcggcgcctgctcggcacaggagaaaacgacgctccacacctttaacttcttccacacttccttcacaagcaacagagaaaagctcctattttcagaccaccgagatttcactctggacggtggtggccgctattcaggctgtggagaagaagatggagtcccaggctgcccggctacagagcctggaggggcgcacggggacagccgagaagaagctggctgactgcgagaagatggccgtggagttcgggaaccagctggagggcaagtgggccgtgctggggaccctgctgcaggagtatgggctactgcagaggcggctggagaacgtggagaacctgctgcgcaacaggaacttctggatcctgcggctgcccccgggcagcaagggggaggcccccaaggtgtccaggtcactggagaatgatggcgtctgtttcaccgagcaggaatgggagaatctggaggattggcagaaggagctctacagaaacgtgatggagagtaactatgagacactggtctctctgaaggtccttggccagacagagggagaagcggagttgggtacagagatgctgggtgacttggaagaggaaggtcctggtggtgcccacccagcaggtggggtcatgatcaaacaggagctacagtatacacaggaaggccctgcggatcttcctggagagttctcatgcattgctgaagagcaggctttcctgagcccagagcagaccgaactctggggtggtcagggcagttctgtcctcttggaaacaggtcctggggactctactctagaggagcctgttggtagtagagttcctagcagcagcagaactgtgggctgcccgaagcagaaatctcataggcaggtacagctggaccaggaatgtgggcagggcctgaagctgaaaaaggacacttcccgcccctacgaatgttctgagtgtgagatcaccttccgctataagcagcagctggccacacatctgcgcagccactctgggtgggggtcttgtacacctgaggagccagaggagagccttaggcccaggccacggctgaaaccacagaccaaaaaggccaagctgcatcagtgtgatgtgtgcctgaggagcttcagctgcaaggtgagcctggtgacccatcagcgttgccacctgcaggaggggcccagtgccggccagcatgtccaagagaggttctcacccaacagcctggttgccctgcctggccacatcccttggaggaaaagccggagttccctcatctgtggttactgtggcaagagcttcagtcacccatctgacttggtgcggcaccagcgcatccacacgggtgagcggccctacagctgcactgagtgtgagaagagctttgtccagaagcagcacctcctgcagcaccagaagatccaccagcgggagcggggtgggctggccctggagcccggaaggcccaatggcctgctttaagggtgcagcccctcgcccgtctgggggatggaggggggtggcattggttcccccgaagagacactgcagtcagggactgagttcttcctgagggcagttgtttgtgattgccttcccttgtcccagtaccaagccaagcccaaaggctgtcctgaaaaccctgtggaagaagagtccaggccaggtcttcatcctgctgccaagtttgctgtttcttggcaccttcaggtctctggttttctcattcatgccaatgcttgtgggctggggttggcgttctgaccccacagggactggtggctggttccagggctcgtcccggcatttcatgtcttcccacggggttgagtcgggccataggggtgagcagctgcctggaagagttctgggaagtataaccctccattttttcttgttttataatctctttgtttaataataagtagaagaaataatttaaatgaactgcttagccctgctctgaagaaccttttttggaattagattttagttgattttttaaagaatacagcccaacacttgttttttacattttaagagttgtagaagttgttcctaacttggggactggacctaccctctaggagggagttgttaatggggctcttttagcccactgatgcttacttaggccggagagcaggggacacggtgctaggttccctcgtgcagtgcctggtgctctcaaattgtctcaaaaggaccaagaggaaaagagtcggaggggtagaccctgcagccctgttgagaagaaagattccagtgaagttgctgatggtatggctgtggtctgggacttgcggtgtctcggcatacccctctcctcttcccacctcctcctggctatgttctgcagcctcccagagtagaaaactactttgttacttaaggttgttcaccttgtaccagtggttatttgagtttgttcctattacaccaatccttacttgaggtggttcggattacagtttccaaatgcattctgggattgcctattccagagagggtacagaaaaagcacacagatggcttgtctcaggagtgttgaatgtgtgccccgctgctgtctggggggatgggagtgggctctggggtcatatgtgaacatccccttggatgatttgcggttgcttagaataaaacttgctactagcaaaagaaaaaaaaaaaaaaaaaaaaaaaaaaaaaaaa

SEQ ID NO: 173495 - DNA, 540 bp, Artificial Sequence
  derived and/or modified sequence
atggccgaggccgccgccccccccgactggcactgcggcctgaccagcagagagagacccagaagcgacctgcagagaagccccttcagactgagctggctgctgttcagatggtggagaagaagatggaaccccagactgcccggctacagagcctggagagacgcctgcggccagcccagaagaagctggctgaccgccagaagatggctgtggagcagcggcaccagctggagagccctggtgaacggcggcgccagcctggtgtgcggcagccaggtgggcctggtgagcagcgagtggctgtgccagaagggcctggtgtacgacagaaacgccggccagctggagagaccccaggccttctgccccggcagcagcaagagaaagggccaggtgggcggcgccagcagagcccacagaagacccctgtggcacacctgcgcccaggtgagacacgccggcccctgcctgctgagacccgtgagcctgggcctgagaagacacggcgtgccctggggcgccagccagagactgtag

SEQ ID NO: 173496 - DNA, 943 bp, Artificial Sequence
  derived and/or modified sequence
gcgttttccgcgtgtcccgagccccggcggccccgcgagctcggtccgtgcggggaaagcagggctgacgccgtctgcggagaggactgcgcagccgggcttgtgtggggccgcgcgtaacggcagcggctactccctgcccaggccggccagcacagggccatggccgaggcggctgcgcctccggactggcattgcggactgacctccagggagaggcccagatctgatctgcagagatctcccttccggctatcgtggctgctgttcaggtggtggagaagaagatggaaccccaggctgcctggctacagagcctggagggatgcatgtggacagccaagaagaagctggctgactgcgagaaggtggctgtggagttcgggaaccagctggagggccctggttaatggtggagccagcctggtgtgtggcagccaggtcgggctggtgtcttcagagtggctgtgtcagaagggcctcgtgtatgacagaaacgcaggccagctggaacgtccccaggcgttctgtcctggatcaagcaagaggaaggggcaagtgggaggagccagcagggcccacaggagaccactgtggcacacctgtgctcaggtaaggcatgctgggccatgtctcctcaggcctgtatccctgggccttaggagacatggcgtcccctggggggcctcacagcgcctctagtggggccttctcctgggcgaggctcctgagggaaggcagtgcgcagccttggctgtgtctctgcagaatcttgtatgcttgctgcgtggtgtcctcccatgcagttgcacgaaatcattcttttattcctgatcctgtttcctgtttatttcatgaacttgtctgtaggcagcatggtgctgggcgctgcaggggctcattaatgcatgagacacagattccactcaggagagagaagacg

SEQ ID NO: 173497 - DNA, 1488 bp, Artificial Sequence
  derived and/or modified sequence
atggccgagagcgcccccgccagacacagaagaaagagaagaagcacccccctgaccagcagcaccctgcccagccaggccaccgagaagagcagctacttccagaccaccgagatcagcctgtggaccgtggtggccgccatccaggccgtggagaagaagatggagagccaggccgccagactgcagagcctggagggcagaaccggcaccgccgagaagaagctggccgactgcgagaagatggccgtggagttcggcaaccagctggagggcaagtgggccgtgctgggcaccctgctgcaggagtacggcctgctgcagagaagactggagaacgtggagaacctgctgagaaacagaaacttctggatcctgagactgccccccggcagcaagggcgaggcccccaaggtgagcagaagcctggagaacgacggcgtgtgcttcaccgagcaggagtgggagaacctggaggactggcagaaggagctgtacagaaacgtgatggagagcaactacgagaccctggtgagcctgaaggtgctgggccagaccgagggcgaggccgagctgggcaccgagatgctgggcgacctggaggaggagggccccggcggcgcccaccccgccggcggcgtgatgatcaagcaggagctgcagtacacccaggagggccccgccgacctgcccggcgagttcagctgcatcgccgaggagcaggccttcctgagccccgagcagaccgagctgtggggcggccagggcagcagcgtgctgctggagaccggccccggcgacagcaccctggaggagcccgtgggcagcagagtgcccagcagcagcagaaccgtgggctgccccaagcagaagagccacagacaggtgcagctggaccaggagtgcggccagggcctgaagctgaagaaggacaccagcagaccctacgagtgcagcgagtgcgagatcaccttcagatacaagcagcagctggccacccacctgagaagccacagcggctggggcagctgcacccccgaggagcccgaggagagcctgagacccagacccagactgaagccccagaccaagaaggccaagctgcaccagtgcgacgtgtgcctgagaagcttcagctgcaaggtgagcctggtgacccaccagagatgccacctgcaggagggccccagcgccggccagcacgtgcaggagagattcagccccaacagcctggtggccctgcccggccacatcccctggagaaagagcagaagcagcctgatctgcggctactgcggcaagagcttcagccaccccagcgacctggtgagacaccagagaatccacaccggcgagagaccctacagctgcaccgagtgcgagaagagcttcgtgcagaagcagcacctgctgcagcaccagaagatccaccagagagagagaggcggcctggccctggagcccggcagacccaacggcctgctgtag

SEQ ID NO: 173498 - DNA, 1488 bp, Artificial Sequence
  derived and/or modified sequence
atggctgaatcggcacccgcacggcatcggagaaaaagaaggtccacacccttaactagttccaccctcccctcccaggccactgagaaatcttcatatttccagactacagagatctcactctggactgttgtggcagctatccaggcagtcgagaaaaagatggagtcacaggccgcccggctccagtctctcgaggggagaacagggaccgcagagaagaaactcgccgactgtgagaaaatggcagttgagttcggaaaccaactcgagggtaaatgggcggttctggggaccttattgcaggaatatggtctgctacagagaagactcgagaacgtcgagaacctgcttcggaacaggaatttctggatattacggctaccccctgggtccaaaggagaggcaccaaaagtttctcggtccctggagaatgacggcgtgtgcttcactgagcaggagtgggagaacttagaggactggcagaaagagctctataggaacgtaatggaaagcaattatgagaccctggtctcactgaaggtgttgggtcagactgagggcgaagctgagctggggacagagatgctgggtgatttagaggaagaaggacctgggggcgcacatcccgccggcggcgtgatgataaaacaagaactgcagtacacccaggaagggcctgctgatctgcctggcgaattcagctgcatcgccgaggagcaggcctttctatcaccagaacagactgaactttggggcggtcaagggtcatctgtgctccttgagacaggacccggtgattccacgctggaagagccagttgggtcacgtgtccccagttccagcagaaccgtggggtgccctaagcaaaaatcacacagacaggtgcaactggaccaggagtgcggacagggcctgaaactgaagaaagatacttctcgcccctacgagtgctccgagtgcgaaattactttccggtacaagcagcagctcgccactcatctgagaagccactctggatgggggtcgtgtactcctgaagagcctgaagagtctttgcgtcctagacccagactgaaacctcagactaaaaaggcaaagctccaccaatgtgatgtctgcctgaggtcctttagttgcaaggttagcctcgtgacccaccagcggtgccacctgcaggagggtccttctgcgggtcagcacgtgcaggaaaggtttagccccaattccctcgtggcactgccaggccatatcccttggagaaagtctcgcagctccctcatttgcgggtattgcggcaaatccttctcgcacccatctgatctcgttcgtcaccagcggattcacactggtgaacggccatacagctgcaccgagtgtgaaaagtctttcgtgcaaaaacaacatcttcttcagcatcagaagatccatcagagggaaaggggcggcttggccctcgagccagggcggccaaacggtttgttgtag

SEQ ID NO: 173499 - DNA, 1488 bp, Artificial Sequence
  derived and/or modified sequence
atggccgagagcgccccagcccggcacaggaggaagagaagaagcacccccctgaccagcagcaccctgcccagccaggccacagagaagagcagctacttccagaccacagagatcagcctgtggacagtggtggccgccatccaggccgtggagaagaagatggagagccaggccgcccggctgcagagcctggagggccgcactggaacagctgagaagaagctggccgactgtgagaagatggctgtggagtttggaaaccagctggagggcaagtgggccgtgctgggcaccctgctgcaggagtatggcctgctgcagaggcggctggagaatgtggagaacctgctgaggaacagaaacttctggatcctgcggctgcccccaggcagcaaaggagaggcccccaaggtgagccgcagcctggagaatgatggagtgtgcttcacagagcaggagtgggagaacctggaggactggcagaaggagctgtacagaaatgtgatggagagcaactatgagaccctggtgtccctgaaggtgctgggccagacagaaggagaggccgagctgggcacagagatgctgggggacctggaggaggagggccctggaggagcccaccctgctggaggagtgatgatcaagcaggagctgcagtacacccaggagggccctgctgacctgcctggagagttcagctgcatcgccgaggagcaggccttcctgagccctgagcagacagagctgtggggcggccagggcagctctgtgctgctggagactggacctggggacagcaccctggaggagcctgtgggcagccgggtgcccagcagcagcaggacagtgggctgccccaagcagaagagccaccggcaggtgcagctggaccaggagtgtggccagggcctgaagctgaagaaggacaccagccggccctatgaatgttctgaatgtgagatcaccttccgctacaagcagcagctggccacccacctgcggagccacagcggctggggcagctgcaccccagaggagcctgaggagagcctgcggccccggccccggctgaagccccagaccaagaaggccaagctgcaccagtgtgatgtgtgcctgcgctccttcagctgcaaggtgtccctggtgacccaccagcgctgccacctgcaggagggccccagcgctggccagcacgtgcaggagcgcttcagccccaacagcctggtggccctgcccggccacatcccctggaggaagagccgcagcagcctcatctgtggctactgtgggaagagcttcagccaccccagcgacctggtgcgccaccagaggatccacactggagagcggccctacagctgcacagaatgtgagaagagctttgtgcagaagcagcacctgctgcagcaccagaagatccaccagcgggagcggggcggcctggccctggagcccggccggcccaacggcctgctgtag

SEQ ID NO: 173500 - DNA, 1488 bp, Artificial Sequence
  derived and/or modified sequence
atggccgagagcgcccccgcccggcaccggcggaagcggcggagcacgccgctaacctcctcgaccctgcccagccaggccacagaaaagtctagctattttcagactactgagatctccctgtggacagtggtcgcggctatccaggccgtggagaagaagatggagagccaggctgcccggctccaaagcttggaagggagaaccggaaccgcggagaaaaagttggcagactgtgagaagatggcggtggagttcggcaatcagttggaaggcaagtgggctgtcctgggcacgttactgcaggaatatggcctgctgcagagaagactggagaatgtggagaatctgttaaggaaccggaacttttggatactccggttgccccctgggtcaaaaggagaggcccctaaggtgtccagaagcctagagaacgatggtgtctgcttcacagagcaggagtgggagaacttagaagattggcaaaaagagttgtatcgcaatgtcatggagtccaattatgaaacccttgtcagtctgaaagtgttgggtcaaacagaaggggaggcagaactgggaactgaaatgctcggagatctcgaggaagagggcccagggggggcccaccccgccgggggtgtcatgatcaagcaagagctgcagtatacccaggagggcccagccgacttaccaggcgagttttcctgcatcgctgaagagcaggcattcctgtctcccgagcaaaccgagctgtgggggggccaaggctcttcagtcctgctggaaaccgggcccggagattctaccctggaagagcctgtaggatctcgagtgccttcgagctctaggacggtagggtgtccaaaacaaaagtcccatcgccaggtccagttggaccaggagtgcggccagggtctgaaactaaagaaggacacctccagaccctacgaatgttcagagtgtgagattaccttccgctacaaacagcagctagcgacccatctgcgaagtcactccgggtgggggtcatgtacacccgaggaacccgaggaatccttaagacctaggccccgactcaagcctcaaaccaagaaagcaaagctccatcagtgcgacgtgtgccttcgatctttttcctgtaaagtcagtttggtgacacaccagcgttgtcatttacaggaggggccttcagccgggcaacacgtgcaggaacgattcagtcctaattcactagttgccctgcccggacatatcccatggaggaagtccagaagttccctgatctgcggttactgcggcaagtccttcagtcacccctccgatctggtgagacaccagaggatccacaccggagagcgaccctatagctgtactgaatgcgagaaatcgtttgtgcagaagcagcatctgctgcagcatcagaaaatccatcagagagagaggggcggtcttgctctggagcccggacggccgaatggccttctatag

SEQ ID NO: 173501 - DNA, 1488 bp, Artificial Sequence
  derived and/or modified sequence
atggccgagtccgctcctgccaggcatcgcagaaaacggaggagcaccccattgacgtccagcaccttaccttctcaagctactgaaaagtcatcatacttccagactacagagatctccctatggaccgtggtggctgctatacaggctgtggagaagaaaatggaatctcaagccgctcgcctccagtcactcgaaggaagaacaggaacggccgaaaagaagctcgcagattgcgagaaaatggcagtggaattcggaaatcagttagagggcaagtgggctgtgctaggcacactgctccaggaatacggcctgcttcagcggaggctggaaaacgttgagaatctcctgcgcaacaggaacttttggatcttaagattaccgcctggatcgaaaggcgaagcccctaaagtgagccggtcactggaaaacgacggggtgtgtttcacggaacaggaatgggaaaacctcgaggactggcagaaggagctttaccgaaacgtcatggagagcaactatgagacactggtgtctctcaaggttttgggccagacagagggagaagcagaactgggcacagaaatgttgggcgatctggaggaggagggcccaggaggtgcgcatcctgccggaggagtcatgataaaacaggaactgcagtacactcaggaaggccctgccgacctgccgggagaattctcttgtatagctgaagagcaggcctttctttcccccgagcagacggagctttggggtggccaagggtcaagcgtactcctggagaccggaccaggggactcgactctggaagagcccgttggatctagagtgccaagtagcagcaggacggtgggctgtccaaaacagaagtcacatagacaggtgcaactggatcaggagtgtggccaaggtctgaagctcaagaaggatacaagccggccttatgagtgttcggagtgcgagatcacatttcgctacaaacaacagctagcgacgcatctgcgctctcactccggctggggctcctgcactcctgaggaaccagaagagagtctgcgcccaaggccgagactgaaaccccagactaaaaaagccaagctgcaccagtgcgacgtgtgtctgcgcagttttagctgcaaagtgagtctggtcacgcatcagcgatgtcatctgcaggaggggcctagtgcaggacagcatgtgcaagaaaggtttagcccgaacagcctagtggctcttccaggtcatattccttggcggaaaagccgtagtagcctgatctgtggctactgtggcaagtctttcagtcacccctcggatctggtaagacatcagaggatccacaccggcgaacgtccatacagctgcactgagtgtgagaagtcttttgtgcagaaacagcatctgttacagcaccagaagattcaccagcgagagaggggcggactcgcattggagccgggtcgaccaaatggcctgctgtag

SEQ ID NO: 173502 - DNA, 2810 bp, Artificial Sequence
  derived and/or modified sequence
agaatgcacctggcatcaacacggcggcggcggcggcggcttccaacaggctctggggcgccgagcggacaggaacgcagcacgggggctccgaggcggggtctgggtgttgaggggcgactggagccatggcggagtcggcgcctgctcggcacaggagaaaacgacgctccacacctttaacttcttccacacttccttcacaagcaacagagaaaagctcctattttcagaccaccgagatttcactctggacggtggtggccgctattcaggctgtggagaagaagatggagtcccaggctgcccggctacagagcctggaggggcgcacggggacagccgagaagaagctggctgactgcgagaagatggccgtggagttcgggaaccagctggagggcaagtgggccgtgctggggaccctgctgcaggagtatgggctactgcagaggcggctggagaacgtggagaacctgctgcgcaacaggaacttctggatcctgcggctgcccccgggcagcaagggggaggcccccaaggtgtccaggtcactggagaatgatggcgtctgtttcaccgagcaggaatgggagaatctggaggattggcagaaggagctctacagaaacgtgatggagagtaactatgagacactggtctctctgaaggtccttggccagacagagggagaagcggagttgggtacagagatgctgggtgacttggaagaggaaggtcctggtggtgcccacccagcaggtggggtcatgatcaaacaggagctacagtatacacaggaaggccctgcggatcttcctggagagttctcatgcattgctgaagagcaggctttcctgagcccagagcagaccgaactctggggtggtcagggcagttctgtcctcttggaaacaggtcctggggactctactctagaggagcctgttggtagtagagttcctagcagcagcagaactgtgggctgcccgaagcagaaatctcataggcaggtacagctggaccaggaatgtgggcagggcctgaagctgaaaaaggacacttcccgcccctacgaatgttctgagtgtgagatcaccttccgctataagcagcagctggccacacatctgcgcagccactctgggtgggggtcttgtacacctgaggagccagaggagagccttaggcccaggccacggctgaaaccacagaccaaaaaggccaagctgcatcagtgtgatgtgtgcctgaggagcttcagctgcaaggtgagcctggtgacccatcagcgttgccacctgcaggaggggcccagtgccggccagcatgtccaagagaggttctcacccaacagcctggttgccctgcctggccacatcccttggaggaaaagccggagttccctcatctgtggttactgtggcaagagcttcagtcacccatctgacttggtgcggcaccagcgcatccacacgggtgagcggccctacagctgcactgagtgtgagaagagctttgtccagaagcagcacctcctgcagcaccagaagatccaccagcgggagcggggtgggctggccctggagcccggaaggcccaatggcctgctttaagggtgcagcccctcgcccgtctgggggatggaggggggtggcattggttcccccgaagagacactgcagtcagggactgagttcttcctgagggcagttgtttgtgattgccttcccttgtcccagtaccaagccaagcccaaaggctgtcctgaaaaccctgtggaagaagagtccaggccaggtcttcatcctgctgccaagtttgctgtttcttggcaccttcaggtctctggttttctcattcatgccaatgcttgtgggctggggttggcgttctgaccccacagggactggtggctggttccagggctcgtcccggcatttcatgtcttcccacggggttgagtcgggccataggggtgagcagctgcctggaagagttctgggaagtataaccctccattttttcttgttttataatctctttgtttaataataagtagaagaaataatttaaatgaactgcttagccctgctctgaagaaccttttttggaattagattttagttgattttttaaagaatacagcccaacacttgttttttacattttaagagttgtagaagttgttcctaacttggggactggacctaccctctaggagggagttgttaatggggctcttttagcccactgatgcttacttaggccggagagcaggggacacggtgctaggttccctcgtgcagtgcctggtgctctcaaattgtctcaaaaggaccaagaggaaaagagtcggaggggtagaccctgcagccctgttgagaagaaagattccagtgaagttgctgatggtatggctgtggtctgggacttgcggtgtctcggcatacccctctcctcttcccacctcctcctggctatgttctgcagcctcccagagtagaaaactactttgttacttaaggttgttcaccttgtaccagtggttatttgagtttgttcctattacaccaatccttacttgaggtggttcggattacagtttccaaatgcattctgggattgcctattccagagagggtacagaaaaagcacacagatggcttgtctcaggagtgttgaatgtgtgccccgctgctgtctggggggatgggagtgggctctggggtcatatgtgaacatccccttggatgatttgcggttgcttagaataaaacttgctactagcaaaagaaaaaaaaaaagtt

SEQ ID NO: 173503 - protein, 28 aa, Artificial Sequence
  derived and/or modified sequence
MVWEVKTNQMPNAVQKLLLVMDKRASGM

SEQ ID NO: 173504 - protein, 111 aa, Artificial Sequence
  derived and/or modified sequence
MVWEVKTNQMPNAVQKLLLVMDKRASGMNDSLELLQCNENLPSSPGYNSCDEHMELDDLPELQAVQSDPTQSGMYQLSSDVSHQEYPRSSWNQNTSDIPETTYRENEVDWL

SEQ ID NO: 173505 - DNA, 375 bp, Artificial Sequence
  derived and/or modified sequence
atggtgtgggaagtgaagacgaaccagatgccaaatgccgttcagaagctcctgctggtgatggacaagcgcgcatcaggcatgaacgattctttggagcttctgcagtgcaatgagaaccttccgagtagccccggctacaatagctgcgacgagcatatggaactcgacgatctcccagagctgcaggccgtgcagagcgacccgacccaatctggaatgtaccagctgtccagtgacgtgtcacatcaggagtatcctcggtcctcttggaaccagaacacctccgacatccccgaaaccacttaccgagagaacgaggtggattggctgactgaactggccaacatcgccacatctccacagtcaccatag

SEQ ID NO: 173506 - DNA, 1545 bp, Artificial Sequence
  derived and/or modified sequence
atggtatgggaggtaaagaccaatcaaatgccaaatgctgttcagaagctgctcctggtcatggataaacgcgcgtcaggaatgaatgacagcctggaacttctccaatgcaatgaaaacctgccctcatcacctggttataactcatgcgatgagcacatggagcttgacgacttgcccgagctccaggcggtgcaatctgaccctacccagagcggaatgtaccagctgagcagcgatgtctcccaccaggaatacccgcggagctcctggaatcagaatactagtgacatcccggagaccacctacagagaaaacgaggtggactggctgacggagctggccaatattgccaccagcccacagagtcctcttatgcagtgtagcttctataatcgatccagccccgtccacatcatcgctacaagcaagtctttacattcatacgccagaccaccacccgttagcagcagctccaaatctgaacccgctttcccgcatcaccattggaaagaggagacacccgtgcgccacgagcgggccaattccgagtcagaatcagggattttttgcatgtcctcactgtcggatgacgacgatctcggatggtgtaactcttggcccagcactgtatggcactgttttctgaagggcacacgcctttgctttcacaaagggtccaataaggaatggcaggacgtcgaggattttgctagggctgaaggttgtgacaacgaagaagatctgcagatggggattcataaaggctacggcagcgacgggttaaaactgcttagccacgaggaatctgtttcattcggcgagagcgtgctgaagttgacgtttgaccccggaactgtagaagacggccttctgactgttgaatgtaaacttgaccaccctttttatgttaagaataagggttggagctccttctatccatccctcaccgtcgtccagcatgggattccgtgctgcgaggttcacattggagacgtttgtttgccccctggacatcccgacgccatcaatttcgacgacagcggggtttttgacacctttaagagctacgatttcacacctatggactcatctgctgtgtatgtacttagttccatggcaagacagcgtcgggcatctctgtcttgcggtggacccggggggcaagactttgccagatctgggtttagtaaaaactgtggaagccctggttcctcccaattgagctccaactccctttacgcaaaggctgtaaagaatcacagttccggaaccgtgtcagctaccagccctaacaagtgcaaacgccctatgaatgccttcatgctcttcgccaagaagtatagagtggagtacacccagatgtacccaggtaaggacaaccgggccataagcgtgatactgggggataggtggaaaaaaatgaagaacgaagaacgccgcatgtataccctggaagctaaggccttggccgaagagcaaaagcgactgaaccccgattgctggaagcgcaaaaggacaaatagcgggtcacagcagcattag

SEQ ID NO: 173507 - DNA, 213 bp, Artificial Sequence
  derived and/or modified sequence
atggtctgggaggtgaagactaatcagatgcctaatgccgtccaaaagttattgttggtgatggacaagagagcctctggcatgaacgactctctcgaacttctgcagtgtaatgaaaacctccctagctcccccgggtacaatagctgcgacgagcacatggagctggatgatctgcccgaactacaggccgtgcagagcgatccaacctag

SEQ ID NO: 173508 - DNA, 336 bp, Artificial Sequence
  derived and/or modified sequence
atggtttgggaggtgaagactaatcagatgccgaacgctgtgcaaaaattgctgcttgtaatggacaaaagagcttccgggatgaacgactccctcgagcttcttcagtgtaatgaaaacctgccttctagcccaggatacaattcttgtgatgaacatatggagctcgacgacctccccgagttgcaagcagtgcaatcagaccctactcagtcaggtatgtaccagctgagctcagacgtgtcacaccaagagtacccgaggtcttcctggaaccagaatacaagcgatatacccgaaaccacttacagagagaacgaagtcgattggctgtag

SEQ ID NO: 173509 - DNA, 1545 bp, Artificial Sequence
  derived and/or modified sequence
atggtctgggaggtgaagacaaatcagatgcccaacgctgtgcagaagctgttgctggtgatggataagagggcaagtggtatgaacgattccctggagctgcttcagtgtaatgagaacctgccatcctcccccggatacaattcatgtgacgaacatatggagcttgatgatctgcccgaattacaggccgtccaaagcgatccaacacaaagcggcatgtatcagctgagctctgacgtgtctcatcaggaatatcccagaagttcctggaaccagaatacttcagacatccctgaaacaacttatagggaaaacgaggtggattggctgacagaacttgctaatatcgcgacctcaccccagagtccacttatgcagtgttccttttataatcggagcagcccagttcatataatcgctacctctaagagtctccacagctacgccaggccaccacccgtgagttcctcctcaaagagcgagcccgcctttccacaccaccactggaaggaggaaaccccggtcaggcatgagcgcgcaaacagcgagtccgagagtggcattttctgcatgagctctctgtcagatgatgacgacctagggtggtgtaattcttggcctagcaccgtttggcattgctttttgaagggaacacggctgtgcttccacaaagggtccaacaaggaatggcaggacgtcgaggattttgctagagccgaggggtgtgataacgaggaagacctacagatgggaatacacaagggttacggctccgacggcctgaaattgctgtctcatgaagagagtgttagtttcggtgaaagtgttttgaaactaactttcgaccccggaacagtcgaagatgggctgctcacagtggaatgcaagctggatcatccattttacgtgaaaaacaagggctggagtagcttttatccgtctttaaccgtggttcagcatggcatcccatgttgcgaggtgcatatcggtgatgtctgtctcccccctggccaccccgacgccatcaactttgatgattccggagtgttcgatactttcaagtcctacgatttcactcccatggactctagtgccgtgtacgtgctttcctctatggcgcggcagcggagggcctccctgtcttgtgggggccccggcggccaggacttcgcccggagcgggtttagtaaaaactgtggctctcccggcagctcccagcttagctccaactctctgtatgcgaaggctgtgaagaaccacagcagcggcacagtaagtgcaacctccccgaacaagtgcaagagacctatgaatgctttcatgctattcgctaaaaagtacagggtggagtatacacagatgtaccctgggaaggacaatcgagccatctctgttattctgggtgatagatggaagaagatgaaaaatgaagagcggagaatgtatacgctggaggctaaggccctggccgaggagcaaaagcgactgaaccctgactgctggaaacggaagcgcaccaacagtggatcacagcaacattag

SEQ ID NO: 173510 - DNA, 327 bp, Artificial Sequence
  derived and/or modified sequence
atggtttgggaagtaaagacaaatcaaatgccaaacgccgttcagaagctgctgcttgtcatggacaaacgggcgagcgggatgaatgattctttagagctccttcagtgtaacgagaatttgccgagttctcccggctataatagttgtgacgagcacatggagttggatgacctgcctgaattgcaggcagtgcaatccgacccgacgcaatcgggcatgtaccagctcagctccgacgtttcacaccaggagtacccacgttcttcatggaatcaaaataccagcgatatacctgaaacaacctatagggaaaacgaagtttag

SEQ ID NO: 173511 - DNA, 1365 bp, Artificial Sequence
  derived and/or modified sequence
cagatgcccaatgctgtccaaaagctcttactggttatggataagcgcgccagcggcatgaatgactcactggaactcctacagtgcaacgaaaatttacccagttctcctggatacaatagttgcgatgagcacatggagctggatgatctcccagaactgcaagccgtgcaatctgatcctacccagagtggaatgtatcagttgtcttccgatgtctcgcaccaggaatatcctaggagctcatggaaccagaatacatctgatattcccgagaccacctatcgcgaaaacgaggtggattggctcacagagctggctaatatcgccacatctcctcagtccccactaatgcaatgcagcttttacaacaggtcctcccctgtgcacatcatcgctacctccaagagtcttcactcttacgcccgcccacctcctgttagcagtagcagcaagagcgaacccgcctttccacaccaccattggaaggaagagactccagtgcgccacgagagagctaactccgagagcgaatccggtattttttgcatgtctagcctgagcgacgatgatgacttaggttggtgcaattcatggccaagcacggtgtggcactgcttcctgaagggcactcgtctgtgcttccataaaggctctaataaggagtggcaggatgtggaggattttgcgagagccgaagggtgtgacaacgaggaggatctccaaatgggaatacataagggctacggcagtgatggccttaagcttctgagccatgaggaatccgtgtccttcggagaatcagtcctgaaactcacattcgacccaggaactgtcgaggacgggctcctgaccgtggagtgcaaattggaccatcccttctacgtaaagaataagggctggagttccttttatccctcgctgaccgttgttcagcacggtatcccatgttgtgaggtgcacataggagatgtttgcctcccacccggacatcccgatgcaatcaactttgatgattctggggtgtttgacacttttaagagctacgacttcacacccatggattcatccgcagtgtacgtcctctccagcatggcacggcagcgcagagccagtttatcttgtgggggccccggcggccaggattttgctcgctctggtttttctaaaaattgtggatcaccaggcagctcccagctgtcctccaactctctctatgctaaggctgtcaagaatcactcgagcgggacagtcagtgctacttcacctaataaatgcaagagaccaatgaatgcttttatgttgtttgcaaaaaaataccgcgtcgaatacacccagatgtaccccggcaaggacaatagatag

SEQ ID NO: 173512 - DNA, 375 bp, Artificial Sequence
  derived and/or modified sequence
atggtgtgggaggtgaagaccaaccagatgcccaatgctgtgcagaagctgctgctggtgatggacaagagggccagcggcatgaatgacagcctggagctgctgcagtgcaatgaaaacctgcccagcagccctggctacaacagctgtgatgagcacatggagctggatgacctgcctgagctgcaggccgtgcagagcgaccccacccagagcggcatgtaccagctgagcagtgatgtgagccaccaggagtaccccaggagctcctggaaccagaacaccagtgacatccctgagaccacctacagagaaaatgaggtggactggctgacagagctggccaacatcgccaccagcccccagagcccctag

SEQ ID NO: 173513 - DNA, 1545 bp, Artificial Sequence
  derived and/or modified sequence
atggtgtgggaggtgaagaccaaccagatgcccaatgctgtgcagaagctgctgctggtgatggacaagagggccagcggcatgaatgacagcctggagctgctgcagtgcaatgaaaacctgcccagcagccctggctacaacagctgtgatgagcacatggagctggatgacctgcctgagctgcaggccgtgcagagcgaccccacccagagcggcatgtaccagctgagcagtgatgtgagccaccaggagtaccccaggagctcctggaaccagaacaccagtgacatccctgagaccacctacagagaaaatgaggtggactggctgacagagctggccaacatcgccaccagcccccagagccccctgatgcagtgcagcttctacaacagaagcagccctgtgcacatcatcgccaccagcaagagcctgcacagctatgcccggcccccacctgtgagcagcagcagcaagtctgagcccgccttcccccaccaccactggaaggaggagacccctgtgagacatgagcgggccaacagcgagagcgagagcggcatcttctgcatgagcagcctgagtgatgatgatgacctgggctggtgcaacagctggcccagcacagtgtggcactgcttcctgaagggcacccggctgtgcttccacaagggcagcaacaaggagtggcaggatgtggaggactttgcccgggcagagggctgtgacaatgaggaggacctgcagatgggcatccacaagggctacggcagtgatggcctgaagctgctgagccatgaggagagcgtgtcctttggagagagcgtgctgaagctgacctttgaccccggcaccgtggaggatggcctgctgactgtggagtgcaagctggaccaccccttctacgtgaagaacaagggctggagcagcttctaccccagcctgactgtggtgcagcacggcatcccctgctgtgaggtgcacatcggagatgtgtgcctgcccccaggccacccagatgccatcaactttgatgacagcggcgtgtttgacaccttcaagagctatgacttcacccccatggacagcagcgctgtgtatgtgctgagctccatggcccggcagaggcgggccagcctgagctgtggcggccctgggggccaggactttgcccggagcggcttcagcaagaactgtggcagccctggcagcagccagctgagcagcaacagcctgtatgccaaggctgtgaagaaccacagcagcggcaccgtgtctgccaccagccccaacaagtgcaagaggcccatgaatgccttcatgctgtttgccaagaagtacagagtggagtacacccagatgtacccaggcaaggacaacagagccatcagcgtcatcctgggggaccgctggaagaagatgaagaatgaggagaggaggatgtacaccctggaggccaaggccctggccgaggagcagaagaggctgaacccagactgctggaagaggaagaggaccaacagcggcagccagcagcactag

SEQ ID NO: 173514 - DNA, 213 bp, Artificial Sequence
  derived and/or modified sequence
atggtgtgggaggtgaagaccaaccagatgcccaatgctgtgcagaagctgctgctggtgatggacaagagggccagcggcatgaatgacagcctggagctgctgcagtgcaatgaaaacctgcccagcagccctggctacaacagctgtgatgagcacatggagctggatgacctgcctgagctgcaggccgtgcagagcgaccccacctag

SEQ ID NO: 173515 - DNA, 336 bp, Artificial Sequence
  derived and/or modified sequence
atggtgtgggaggtgaagaccaaccagatgcccaatgctgtgcagaagctgctgctggtgatggacaagagggccagcggcatgaatgacagcctggagctgctgcagtgcaatgaaaacctgcccagcagccctggctacaacagctgtgatgagcacatggagctggatgacctgcctgagctgcaggccgtgcagagcgaccccacccagagcggcatgtaccagctgagcagtgatgtgagccaccaggagtaccccaggagctcctggaaccagaacaccagtgacatccctgagaccacctacagagaaaatgaggtggactggctgtag

SEQ ID NO: 173516 - DNA, 327 bp, Artificial Sequence
  derived and/or modified sequence
atggtgtgggaggtgaagaccaaccagatgcccaatgctgtgcagaagctgctgctggtgatggacaagagggccagcggcatgaatgacagcctggagctgctgcagtgcaatgaaaacctgcccagcagccctggctacaacagctgtgatgagcacatggagctggatgacctgcctgagctgcaggccgtgcagagcgaccccacccagagcggcatgtaccagctgagcagtgatgtgagccaccaggagtaccccaggagctcctggaaccagaacaccagtgacatccctgagaccacctacagagaaaatgaggtgtag

SEQ ID NO: 173517 - DNA, 1365 bp, Artificial Sequence
  derived and/or modified sequence
cagatgcccaatgctgtgcagaagctgctgctggtgatggacaagagggccagcggcatgaatgacagcctggagctgctgcagtgcaatgaaaacctgcccagcagccctggctacaacagctgtgatgagcacatggagctggatgacctgcctgagctgcaggccgtgcagagcgaccccacccagagcggcatgtaccagctgagcagtgatgtgagccaccaggagtaccccaggagctcctggaaccagaacaccagtgacatccctgagaccacctacagagaaaatgaggtggactggctgacagagctggccaacatcgccaccagcccccagagccccctgatgcagtgcagcttctacaacagaagcagccctgtgcacatcatcgccaccagcaagagcctgcacagctatgcccggcccccacctgtgagcagcagcagcaagtctgagcccgccttcccccaccaccactggaaggaggagacccctgtgagacatgagcgggccaacagcgagagcgagagcggcatcttctgcatgagcagcctgagtgatgatgatgacctgggctggtgcaacagctggcccagcacagtgtggcactgcttcctgaagggcacccggctgtgcttccacaagggcagcaacaaggagtggcaggatgtggaggactttgcccgggcagagggctgtgacaatgaggaggacctgcagatgggcatccacaagggctacggcagtgatggcctgaagctgctgagccatgaggagagcgtgtcctttggagagagcgtgctgaagctgacctttgaccccggcaccgtggaggatggcctgctgactgtggagtgcaagctggaccaccccttctacgtgaagaacaagggctggagcagcttctaccccagcctgactgtggtgcagcacggcatcccctgctgtgaggtgcacatcggagatgtgtgcctgcccccaggccacccagatgccatcaactttgatgacagcggcgtgtttgacaccttcaagagctatgacttcacccccatggacagcagcgctgtgtatgtgctgagctccatggcccggcagaggcgggccagcctgagctgtggcggccctgggggccaggactttgcccggagcggcttcagcaagaactgtggcagccctggcagcagccagctgagcagcaacagcctgtatgccaaggctgtgaagaaccacagcagcggcaccgtgtctgccaccagccccaacaagtgcaagaggcccatgaatgccttcatgctgtttgccaagaagtacagagtggagtacacccagatgtacccaggcaaggacaacagatag

SEQ ID NO: 173518 - DNA, 375 bp, Artificial Sequence
  derived and/or modified sequence
atggtgtgggaggtgaagaccaaccagatgcccaacgccgtgcagaagttgctgttggtcatggacaagcgagcatcaggaatgaacgattctctagagcttctgcagtgtaacgaaaatcttccatccagccctggttacaatagctgcgatgagcatatggagctagacgatctcccagagctgcaagccgtgcaatccgatccaacacagtcaggcatgtatcagctatctagcgatgtgagtcatcaggaataccccagatcgtcttggaaccaaaatacctcagacattcctgagacaacctaccgggagaatgaggttgactggcttacggagctcgccaatattgcaacctcgccacagagcccctag

SEQ ID NO: 173519 - DNA, 1545 bp, Artificial Sequence
  derived and/or modified sequence
atggtgtgggaggtgaagaccaaccagatgcccaacgccgtgcagaaactgctgctggtcatggataagcgcgcatctggaatgaatgacagtctggaactactacaatgcaatgaaaaccttccaagttcacccggctataactcttgtgacgaacatatggaactggacgatctgccggagctccaggccgtccagtccgaccctacccagagcgggatgtatcaacttagctcggatgtctctcaccaggagtacccccgctccagttggaatcagaacacgtcagatattccagaaactacctaccgcgagaacgaggtggattggctgactgagttggcaaacattgccaccagcccacaatctccactcatgcaatgttccttctacaatagaagttctcccgttcatatcatcgccacatcaaagtctctccactcgtatgcgcgaccaccccccgttagctcatcatcaaagagtgagcctgcctttccacatcaccactggaaagaagaaacccctgtgcggcatgaaagggctaacagcgaaagtgaaagtgggattttctgtatgtcgtccctgtcagacgatgacgacctcgggtggtgcaactcttggccctccacagtatggcactgtttcttgaaaggaacgcgcttatgcttccataaggggtccaacaaagagtggcaggacgtcgaggattttgctagggcagaagggtgtgacaatgaggaggatctgcagatgggcattcacaaagggtacggaagtgacggtcttaagttgctctcccacgaagaatcggtgagctttggcgagtctgttcttaagcttacttttgaccctgggaccgtggaggacggcctcctcactgtggagtgcaaactagaccatcccttttacgttaagaacaaaggctggagcagcttttaccctagcttgaccgtagtgcaacatggaatcccctgttgtgaggttcacattggagatgtttgccttccgccagggcatcctgacgccatcaatttcgacgacagtggcgtctttgatacgtttaagtcttatgactttacacccatggattctagcgccgtctatgtccttagttctatggctagacaacgcagagcatcactctcctgcggcggccctggaggccaggattttgccaggtcgggttttagtaagaactgtggctcgcccggatcttcacagctgagcagcaactccctgtatgcgaaagcggtgaaaaatcactcttcaggcacagtaagtgcaacatctcctaacaagtgcaaaagacccatgaacgccttcatgctttttgccaagaaataccgcgtggaatatacccaaatgtatcccggaaaggacaaccgagctatctccgtgattctaggggacagatggaagaagatgaaaaatgaggaacggcgcatgtatacactggaggctaaagcactggccgaggagcagaagagactgaatccagattgttggaaacgcaagcgtactaatagcggcagccagcagcactag

SEQ ID NO: 173520 - DNA, 213 bp, Artificial Sequence
  derived and/or modified sequence
atggtgtgggaggtgaagaccaaccagatgcccaacgccgtgcagaaactgctcttagtgatggacaaaagggcatcggggatgaatgatagcctggagctgctccaatgtaacgaaaacttgccaagcagccccggttataactcctgtgatgagcacatggagctggacgacctccccgagctgcaagccgttcagagtgatcccacatag

SEQ ID NO: 173521 - DNA, 336 bp, Artificial Sequence
  derived and/or modified sequence
atggtgtgggaggtgaagaccaaccagatgcccaacgccgtgcagaaacttcttctcgtgatggataaacgagcctctggcatgaatgactctctagagcttttgcaatgcaatgagaatctgccttctagcccagggtataatagctgcgacgagcacatggaactggatgatctgcctgagctgcaggccgtgcagtcggaccctacacaatctggcatgtatcaattatcctcggacgtgtcgcaccaagaatatcctcggtccagctggaaccagaacacaagcgacatacccgagacaacctacagagaaaacgaagttgactggttatag

SEQ ID NO: 173522 - DNA, 1545 bp, Artificial Sequence
  derived and/or modified sequence
atggtgtgggaggtgaagaccaaccagatgcccaacgccgtgcagaagctgttgctggtaatggacaaaagagccagcgggatgaacgattccctcgaactccttcagtgcaacgaaaacctgccatcctctcccggctacaattcctgcgatgaacacatggagctggatgacttgccagaacttcaggccgtgcagagcgaccctactcaatctggaatgtaccagctgtcttctgatgtgtcccaccaggaatacccccggagttcctggaaccagaatacttctgacattcctgagaccacctaccgagagaatgaagtagactggctgaccgagttggccaatattgccacttccccacagtccccgctgatgcagtgtagtttctataaccgcagttcgcctgttcacatcatagcaacttcaaaatctctgcactcgtacgccagacccccacctgtttcatcctcatctaagagtgaacccgccttcccccatcaccactggaaagaggagacccctgtgcggcatgagagagccaactcagagtccgagagcggaattttctgcatgagcagtctgtccgacgacgatgacctgggatggtgcaattcttggccatctacagtctggcattgtttcctaaaaggaacccgcctctgtttccataaggggagcaacaaagaatggcaggatgttgaggatttcgccagagccgaaggctgtgataatgaggaggatctgcagatggggatacataaaggctacgggtccgatgggcttaagctgttgtcccatgaagagagcgtgtcgtttggcgaaagcgttcttaagttaacttttgaccctgggacggttgaagatggtctactcacagtagagtgcaaattggaccacccgttctacgtgaagaacaaaggttggagctcattctacccctctctgacagtggtccaacacgggatcccctgttgtgaggtgcacatcggcgacgtgtgtctccctccaggacatcccgatgccatcaatttcgatgatagcggagttttcgacacatttaaatcctatgattttaccccaatggactcatcggctgtctacgtgttgagttcaatggccaggcaaaggagggcttccttgagctgcggaggcccaggtggacaggatttcgcccgctctgggttctccaagaattgtggcagccccggctcatcccagctgtctagcaactctttgtatgctaaggccgtcaaaaatcattcttccggcaccgtctctgctaccagtcctaacaagtgtaaacggcccatgaacgcctttatgttgttcgccaaaaagtatcgggtcgaatacacacagatgtatcctggtaaagacaaccgcgccatatccgtgatacttggggaccgctggaaaaaaatgaagaatgaggaacggagaatgtatactttagaagccaaggcactggctgaggagcaaaaaaggttgaaccccgactgctggaagcgaaagcgcacaaatagcggctcacaacagcactag

SEQ ID NO: 173523 - DNA, 327 bp, Artificial Sequence
  derived and/or modified sequence
atggtgtgggaggtgaagaccaaccagatgcccaacgccgtgcagaagttactgttagtgatggataagcgggcatccgggatgaacgattctttagaactgcttcagtgcaacgagaacctcccttcttcccctggatacaatagctgtgatgaacacatggaactggatgaccttccggaattgcaggccgtgcaatctgacccaacccagtctggtatgtaccagctgagctctgatgtgagtcaccaagagtacccaagatcaagctggaatcagaacaccagcgacattccagaaaccacctatcgcgagaacgaagtgtag

SEQ ID NO: 173524 - DNA, 1365 bp, Artificial Sequence
  derived and/or modified sequence
cagatgcccaacgccgtgcagaagctgctgctggtgatggacaagagagcttctgggatgaatgatagcctggagctgctgcagtgtaacgaaaacttgccaagcagcccgggctacaattcatgtgatgagcatatggaactggacgacctgccagagctccaggcggtccagagcgacccaacccagtctggaatgtatcagctgtccagtgacgtgtcccatcaggagtatccacgttcgagctggaatcagaatacttctgacatcccggagacgacatatcgggaaaatgaagtcgactggctgaccgagttggccaatatcgcaacctccccccagagcccactaatgcagtgctccttctataaccgtagctcccccgtacacataatcgcaacctccaagtcactgcacagctatgctaggccccccccagtgtcatcctcctcaaaatcagagcccgctttcccacaccaccactggaaggaggaaacacccgtcagacatgaacgggcaaattccgagtccgaaagcggcattttctgcatgtcatctctgagtgacgacgatgacctggggtggtgcaacagctggccctccactgtgtggcactgtttcctgaagggtactcggctgtgttttcataaggggagtaacaaggagtggcaggatgtggaggatttcgctcgagcagagggctgcgataacgaggaagacctgcagatgggtattcataaaggctacggctctgatggtctcaaattactgagtcatgaagagagcgtctcatttggcgaatctgtcctcaaactgacattcgatcctggaactgtggaggatggcctgctaacggtggaatgtaaattagaccaccccttttatgtgaagaataagggatggtcctctttttacccttcattgaccgtggtgcagcacggcattccatgctgcgaggtccacatcggggacgtgtgtctcccacctggacaccctgatgctattaacttcgacgactccggagtgttcgacacctttaaaagttacgactttaccccaatggacagttctgctgtctatgttctatcaagcatggccagacagagaagggcatcccttagttgtggcggcccaggcggccaggatttcgctaggagtggatttagcaaaaattgtggctcccctggcagctctcaactgagctcaaacagtctgtacgcgaaagcagtgaaaaatcactcttcagggacagtgagtgctacgtctccaaataagtgtaagaggcctatgaatgcatttatgcttttcgccaaaaaataccgggtggagtatacccagatgtaccctggaaaagataatagatag

SEQ ID NO: 173525 - DNA, 375 bp, Artificial Sequence
  derived and/or modified sequence
atggtctgggaagtgaaaactaaccaaatgcccaacgctgtgcagaagctgctcctcgtcatggacaagcgggcaagtggaatgaatgacagtctagagctgctgcaatgtaacgagaatctaccgtcttcccccggatataacagctgcgacgaacacatggagctcgacgacttaccggagctgcaggcagttcagagcgacccaacacagtctggaatgtatcaactctccagtgacgtcagccatcaggagtacccgcgatcctcatggaaccagaacacctctgatatacccgaaactacctaccgggaaaacgaagtcgattggcttaccgaactggcgaatattgcaacatctccacagtcgccatag

SEQ ID NO: 173526 - DNA, 1545 bp, Artificial Sequence
  derived and/or modified sequence
atggtttgggaagtgaagacaaaccaaatgcctaatgccgtgcaaaagctgctgctagtaatggataagcgggctagcgggatgaacgactccctggagctgctccaatgtaacgaaaacctgcccagcagccccggttacaacagctgtgatgaacatatggaattggacgacctcccggaactgcaggcagtccaatcagatccaactcagtctgggatgtatcagctgagttccgatgtaagccaccaagaatatcctaggagctcttggaatcaaaacacttcagacattccggaaacgacatacagagaaaatgaggtcgactggcttactgagctggctaacatagccacgtcacctcagagtcccttgatgcagtgttctttctataaccggtccagtccagttcatatcatagccacctcgaaaagcctgcattcctatgctcgccctccacccgtgagcagctcctccaagtccgagccagcatttccgcatcaccattggaaagaagaaactcctgtccgacacgagcgagcaaacagtgagagcgaatccgggatattctgcatgtctagcctcagcgacgatgacgatttggggtggtgtaactcgtggccaagtacggtctggcactgtttcttgaaggggacacgcctgtgctttcacaagggttcgaacaaggagtggcaggacgtcgaggactttgcccgagccgaaggatgcgacaatgaagaagacctgcaaatggggatacacaaggggtacgggtccgacggcctcaagctgctgagtcatgaagagagcgtttctttcggtgagtccgtcctgaagttaacgttcgaccccggtaccgtggaggacggacttctcaccgttgagtgtaaactggaccacccattctacgttaagaataaaggatggtcaagtttttacccaagcctaacagtggtgcaacatggaattccttgttgtgaagtacatatcggggatgtttgcctccctccgggtcacccagatgccatcaatttcgatgattctggtgttttcgatactttcaagtcctacgattttactccgatggatagcagtgccgtgtacgtcttgagcagcatggcccgacaacggagggcgtcactgtcttgcggcggacccggtggtcaggatttcgcacggtcaggcttcagcaaaaattgtggatcccctggcagcagtcaattatccagcaattccctctacgccaaagctgttaagaaccactcttctggcactgtttccgcaacaagccccaacaaatgtaaaagaccgatgaatgcgtttatgttatttgccaagaagtaccgggtggaatacacccagatgtacccgggaaaggataatcgagctattagcgtgatactcggcgaccggtggaagaaaatgaagaatgaggaacggaggatgtataccctggaggcgaaggccctggctgaagagcagaaacgtttgaatcccgactgttggaaacgaaaacgcacaaactctggcagccagcagcactag

SEQ ID NO: 173527 - DNA, 213 bp, Artificial Sequence
  derived and/or modified sequence
atggtttgggaggtgaagaccaatcaaatgcctaacgcagtgcagaagctgctgttggttatggacaaacgggctagcggaatgaatgattcccttgaactcctgcagtgtaatgaaaacctgccatcgagtccgggatacaacagctgcgatgaacatatggaacttgacgatctgcctgagttgcaggcagtccagagcgatcctacttag

SEQ ID NO: 173528 - DNA, 336 bp, Artificial Sequence
  derived and/or modified sequence
atggtgtgggaggtgaagacaaaccagatgccaaacgccgtacagaagctgcttctagtcatggataaacgggcttcaggaatgaacgacagcttagagctccttcaatgcaatgagaaccttccgtcaagccctgggtacaactcctgcgatgaacacatggagttggacgacctgcccgaactccaggctgtgcagagtgacccaacacaaagcgggatgtaccaactgagtagtgatgttagccatcaggaataccctcgcagctcttggaaccagaacacctctgatatacccgagacaacctaccgcgagaacgaggttgattggctgtag

SEQ ID NO: 173529 - DNA, 1545 bp, Artificial Sequence
  derived and/or modified sequence
atggtgtgggaggtgaaaactaatcagatgcctaacgctgtgcaaaagttgctgcttgtgatggacaaaagagcttcaggcatgaatgacagtctagaactgctgcagtgtaatgagaacctgccgtcaagcccaggatataatagctgtgacgaacatatggagttggacgatttacctgaactacaagccgtgcagagcgatcctacgcaatctggaatgtaccagctttcttcagatgtgtcgcaccaggagtatccacgcagttcttggaatcagaacacaagtgacatacctgaaacaacatatcgtgaaaacgaggtagattggctcacagaacttgccaatatagcaacgtccccacaatcacccctgatgcagtgtagcttctataatcgttcgtctccagtccatatcatcgctactagtaaatcgttgcactcttacgccaggcctccacctgtgtcctcctcctctaaaagcgagcccgcattccctcaccaccattggaaggaggaaactcccgtacggcatgagcgtgcaaactccgagtcggagtccggcatattttgcatgagttctctgtctgatgatgatgacctgggctggtgcaacagctggccctcaaccgtctggcactgcttcctgaaaggtacccggttgtgttttcataagggatctaataaggaatggcaggatgtcgaggacttcgcacgagccgagggttgcgacaatgaagaggatttacagatgggaattcataagggttatggatccgatggcctaaaactgctgtcccatgaggagagtgtttcctttggggagtccgtgctgaagttaaccttcgacccaggcactgtggaagacggattattaacagttgagtgtaagctggatcaccccttctacgtgaaaaataagggatggagcagcttctatccctcacttacagtcgttcagcacggaattccatgctgtgaggtgcacataggcgatgtctgtctccctccaggccaccccgacgccataaacttcgatgacagtggcgtgttcgataccttcaagagctacgatttcaccccaatggatagctcagccgtgtatgttctgagttctatggcaaggcagcgcagggccagcctgagctgtgggggtccagggggacaggacttcgcaagatccgggttcagcaagaattgtgggtctcctgggtcaagccagctgtcctcaaactcactttacgccaaggcggtgaaaaatcatagcagcggcacagtaagtgccacaagccccaacaagtgtaaacgacctatgaacgctttcatgttattcgctaaaaagtatcgggtggaatacacccaaatgtatcctgggaaggacaatagggctatctcggtgatcctgggtgaccgctggaaaaagatgaagaacgaagaaagaagaatgtacacgctggaggccaaggcactagctgaggagcagaagaggctgaacccggactgttggaaaaggaagcgcacaaattcgggatctcaacaacattag

SEQ ID NO: 173530 - DNA, 327 bp, Artificial Sequence
  derived and/or modified sequence
atggtttgggaagttaaaaccaatcaaatgccaaacgctgtgcagaagttattactggtgatggataaaagggcttcgggcatgaatgacagcctcgagctgctccaatgcaacgagaacttacctagtagtcctggatacaactcatgcgatgagcatatggaactcgatgaccttcccgaactgcaggccgtccagtcagatcctacccagtcagggatgtaccaactcagcagcgacgtgagtcatcaagagtaccccaggtcctcgtggaatcaaaatacctccgatatccctgaaactacttaccgtgagaacgaggtgtag

SEQ ID NO: 173531 - DNA, 1365 bp, Artificial Sequence
  derived and/or modified sequence
cagatgcccaacgctgtgcagaagctgctgctggtgatggataagcgcgcatccggcatgaacgattctctggagcttctccagtgcaatgagaatctgccctccagtccaggatacaacagctgcgacgaacacatggagctggatgacctgcctgaactacaggccgtccaatcagatcctacgcagtctggcatgtatcagctgtcatccgatgtgagccatcaggaatacccaaggtcaagctggaatcagaacactagcgatatccctgagacaacctatcgcgaaaacgaggttgattggctcacagaattggcgaatatcgcgacgtccccccaaagccctcttatgcagtgcagtttctacaatagatcctcacctgtgcacatcatcgctacaagcaagagcctgcattcctacgctcggccaccccctgtatcgtcctcaagcaaatcggagcctgcctttccacatcaccattggaaagaggaaaccccggtaaggcacgagagagccaactctgaaagtgagtcaggcatattctgcatgagctctcttagcgacgatgatgaccttggttggtgcaattcttggccctctacggtgtggcattgcttccttaaagggactcgactgtgtttccacaagggatccaataaagaatggcaggacgttgaggactttgcacgcgcagaaggctgtgacaacgaagaggatctccagatggggatccacaaaggctatggcagcgacggcttaaaacttctcagtcatgaggaaagtgtttccttcggcgagagcgtgctcaagctcacgttcgaccccggaacagtggaggatggcctcttgaccgtagaatgcaaattggaccaccctttttatgtgaaaaacaaggggtggtccagtttctatccctccctgacagtagttcaacatggaattccatgttgcgaggttcacattggggatgtatgtctgccacctggacatccagacgctatcaactttgatgattcaggtgtcttcgacactttcaaaagctacgactttactcccatggatagtagcgctgtgtacgttctgagtagtatggcacgccagcgaagggccagcctgtcttgtggagggccaggtgggcaggactttgctagatcaggttttagcaagaattgcggatcccccggatcctcccagttgtcttcaaacagcctgtatgcaaaagccgtcaaaaaccattcctccggcacggtatcggccacctccccgaataaatgcaagaggcctatgaatgcatttatgctgttcgcaaaaaagtaccgagtggagtatacccagatgtaccctggcaaggacaacagatag

SEQ ID NO: 173532 - DNA, 375 bp, Artificial Sequence
  derived and/or modified sequence
atggtgtgggaggtgaagaccaaccagatgcccaacgccgtgcagaagctgctgctggtgatggacaagagagccagcggcatgaacgacagcctggagctgctgcagtgcaacgagaacctgcccagcagccccggctacaacagctgcgacgagcacatggagctggacgacctgcccgagctgcaggccgtgcagagcgaccccacccagagcggcatgtaccagctgagcagcgacgtgagccaccaggagtaccccagaagcagctggaaccagaacaccagcgacatccccgagaccacctacagagagaacgaggtggactggctgaccgagctggccaacatcgccaccagcccccagagcccctag

SEQ ID NO: 173533 - DNA, 1545 bp, Artificial Sequence
  derived and/or modified sequence
atggtgtgggaggtgaagaccaaccagatgcccaacgccgtgcagaagctgctgctggtgatggacaagagagccagcggcatgaacgacagcctggagctgctgcagtgcaacgagaacctgcccagcagccccggctacaacagctgcgacgagcacatggagctggacgacctgcccgagctgcaggccgtgcagagcgaccccacccagagcggcatgtaccagctgagcagcgacgtgagccaccaggagtaccccagaagcagctggaaccagaacaccagcgacatccccgagaccacctacagagagaacgaggtggactggctgaccgagctggccaacatcgccaccagcccccagagccccctgatgcagtgcagcttctacaacagaagcagccccgtgcacatcatcgccaccagcaagagcctgcacagctacgccagacccccccccgtgagcagcagcagcaagagcgagcccgccttcccccaccaccactggaaggaggagacccccgtgagacacgagagagccaacagcgagagcgagagcggcatcttctgcatgagcagcctgagcgacgacgacgacctgggctggtgcaacagctggcccagcaccgtgtggcactgcttcctgaagggcaccagactgtgcttccacaagggcagcaacaaggagtggcaggacgtggaggacttcgccagagccgagggctgcgacaacgaggaggacctgcagatgggcatccacaagggctacggcagcgacggcctgaagctgctgagccacgaggagagcgtgagcttcggcgagagcgtgctgaagctgaccttcgaccccggcaccgtggaggacggcctgctgaccgtggagtgcaagctggaccaccccttctacgtgaagaacaagggctggagcagcttctaccccagcctgaccgtggtgcagcacggcatcccctgctgcgaggtgcacatcggcgacgtgtgcctgccccccggccaccccgacgccatcaacttcgacgacagcggcgtgttcgacaccttcaagagctacgacttcacccccatggacagcagcgccgtgtacgtgctgagcagcatggccagacagagaagagccagcctgagctgcggcggccccggcggccaggacttcgccagaagcggcttcagcaagaactgcggcagccccggcagcagccagctgagcagcaacagcctgtacgccaaggccgtgaagaaccacagcagcggcaccgtgagcgccaccagccccaacaagtgcaagagacccatgaacgccttcatgctgttcgccaagaagtacagagtggagtacacccagatgtaccccggcaaggacaacagagccatcagcgtgatcctgggcgacagatggaagaagatgaagaacgaggagagaagaatgtacaccctggaggccaaggccctggccgaggagcagaagagactgaaccccgactgctggaagagaaagagaaccaacagcggcagccagcagcactag

SEQ ID NO: 173534 - DNA, 213 bp, Artificial Sequence
  derived and/or modified sequence
atggtgtgggaggtgaagaccaaccagatgcccaacgccgtgcagaagctgctgctggtgatggacaagagagccagcggcatgaacgacagcctggagctgctgcagtgcaacgagaacctgcccagcagccccggctacaacagctgcgacgagcacatggagctggacgacctgcccgagctgcaggccgtgcagagcgaccccacctag

SEQ ID NO: 173535 - DNA, 336 bp, Artificial Sequence
  derived and/or modified sequence
atggtgtgggaggtgaagaccaaccagatgcccaacgccgtgcagaagctgctgctggtgatggacaagagagccagcggcatgaacgacagcctggagctgctgcagtgcaacgagaacctgcccagcagccccggctacaacagctgcgacgagcacatggagctggacgacctgcccgagctgcaggccgtgcagagcgaccccacccagagcggcatgtaccagctgagcagcgacgtgagccaccaggagtaccccagaagcagctggaaccagaacaccagcgacatccccgagaccacctacagagagaacgaggtggactggctgtag

SEQ ID NO: 173536 - DNA, 327 bp, Artificial Sequence
  derived and/or modified sequence
atggtgtgggaggtgaagaccaaccagatgcccaacgccgtgcagaagctgctgctggtgatggacaagagagccagcggcatgaacgacagcctggagctgctgcagtgcaacgagaacctgcccagcagccccggctacaacagctgcgacgagcacatggagctggacgacctgcccgagctgcaggccgtgcagagcgaccccacccagagcggcatgtaccagctgagcagcgacgtgagccaccaggagtaccccagaagcagctggaaccagaacaccagcgacatccccgagaccacctacagagagaacgaggtgtag

SEQ ID NO: 173537 - DNA, 1365 bp, Artificial Sequence
  derived and/or modified sequence
cagatgcccaacgccgtgcagaagctgctgctggtgatggacaagagagccagcggcatgaacgacagcctggagctgctgcagtgcaacgagaacctgcccagcagccccggctacaacagctgcgacgagcacatggagctggacgacctgcccgagctgcaggccgtgcagagcgaccccacccagagcggcatgtaccagctgagcagcgacgtgagccaccaggagtaccccagaagcagctggaaccagaacaccagcgacatccccgagaccacctacagagagaacgaggtggactggctgaccgagctggccaacatcgccaccagcccccagagccccctgatgcagtgcagcttctacaacagaagcagccccgtgcacatcatcgccaccagcaagagcctgcacagctacgccagacccccccccgtgagcagcagcagcaagagcgagcccgccttcccccaccaccactggaaggaggagacccccgtgagacacgagagagccaacagcgagagcgagagcggcatcttctgcatgagcagcctgagcgacgacgacgacctgggctggtgcaacagctggcccagcaccgtgtggcactgcttcctgaagggcaccagactgtgcttccacaagggcagcaacaaggagtggcaggacgtggaggacttcgccagagccgagggctgcgacaacgaggaggacctgcagatgggcatccacaagggctacggcagcgacggcctgaagctgctgagccacgaggagagcgtgagcttcggcgagagcgtgctgaagctgaccttcgaccccggcaccgtggaggacggcctgctgaccgtggagtgcaagctggaccaccccttctacgtgaagaacaagggctggagcagcttctaccccagcctgaccgtggtgcagcacggcatcccctgctgcgaggtgcacatcggcgacgtgtgcctgccccccggccaccccgacgccatcaacttcgacgacagcggcgtgttcgacaccttcaagagctacgacttcacccccatggacagcagcgccgtgtacgtgctgagcagcatggccagacagagaagagccagcctgagctgcggcggccccggcggccaggacttcgccagaagcggcttcagcaagaactgcggcagccccggcagcagccagctgagcagcaacagcctgtacgccaaggccgtgaagaaccacagcagcggcaccgtgagcgccaccagccccaacaagtgcaagagacccatgaacgccttcatgctgttcgccaagaagtacagagtggagtacacccagatgtaccccggcaaggacaacagatag

SEQ ID NO: 173538 - DNA, 2332 bp, Artificial Sequence
  derived and/or modified sequence
cagatgcctaatgcagtacagaaactcctgttggtgatggacaagagagcctcaggaatgaatgactcattggagttgctgcagtgtaatgagaatttgccatcttcacctggatataactcctgtgatgaacacatggagcttgatgaccttcctgaacttcaggcagttcaaagtgatcctacccaatctggcatgtaccagctgagttcagatgtttcacatcaagaatacccaagatcatcttggaaccaaaatacctcagacataccagaaactacttaccgtgaaaatgaggtggactggctaacagaattggcaaatatcgcgaccagtccacaaagtccactgatgcagtgctcattttacaatagatcatctcctgtacacatcatagccactagcaaaagtttacattcctatgcacgccctccaccagtgtcctcttcttcgaagagtgaaccagccttccctcatcaccattggaaggaggaaacaccagtaagacacgaaagggcaaatagtgagtcagaatctggcattttctgcatgtcctccctgtcagatgatgatgatttgggatggtgcaattcctggccttcaactgtctggcactgttttttgaaaggcacacgactgtgctttcataagggaagcaataaggaatggcaagatgttgaagattttgctagagctgaaggctgtgataatgaggaagatcttcaaatgggcattcacaagggctatggttctgatggtctaaagttgttatcacatgaagaaagtgtatcatttggcgagtctgtactgaagttgacttttgatcctggtacagtagaagatggtttacttaccgtagagtgtaagctggaccaccctttctatgttaaaaataaaggttggtcatcattttatccaagcttgactgtggtacagcatggcattccatgttgtgaagttcatattggcgatgtatgtctacctcctggacaccccgatgccattaattttgatgattcaggtgtttttgatacatttaaaagctatgacttcacacctatggattcttctgcagtttatgtgttaagtagtatggctcgccagcgtcgtgcatctttgtcttgtggaggacctggtggtcaagactttgcaagatctggattcagtaaaaactgtggctcacctggatcatcacagctctcttccaattctttgtatgctaaagctgtcaaaaaccacagctcagggactgtgagtgccacttctcctaataagtgcaaaagaccaatgaatgccttcatgctttttgccaaaaaatacagagttgaatatactcagatgtatccagggaaagataacaggtaaaaatagtgataattctgattacaataaatgagtaacacttcaatacggttcatggtaactggaatagttaagtaaacttattctttaatagcttttattcaactcttaggttgacttttttgtttgtttttgagacggagtctcgctgtgtcacccaagctggagtccagtggtacgatctcagctcactgcaacctccgccttccaggttcaagtgattatcctgcctcagcctctcaagtagctgagactacaggcgcccaccaccatacctggctaattttttgtatttttagtagagacagggtttcaccatgttggccaggctgatctcgaactcctgacctcgtgatccacccaccttggcctcctaaagtgccgtgattacaggcgtgagccactgtgcccggccaggttgactttaaagtaaaaagtttaagtggaatttttagggttatatgtaattattttataatacatagacaattaggttatctaccttagtagtaaggatctaccttttattatttgtgccatagcccaggctgcagtacagcggcgcaactcactgtagcctgtatctcccaggctcaatcctcccacctcagcttcctgaatggctgggattacaggcacatgccaccacacccagttaatttttgtattttttgtagagatagggttgtgccatgttgcccaggctggtctcaaactcctgggttcaagccatctgcctgcctcccaaagtgcaagatctaccttttaaaatcatgttatttatctgttggaggacacggttctaacaattaacagttctatctttatggaacagcttttcacctgagtcaactatggattgtacggggaactggcaatttgtagcaagctgccagagttgtcaaaacggtgaacttaagagctgtcctcagtagaagctggaaataaaaatcaactcaagtccttccta

SEQ ID NO: 173539 - DNA, 1545 bp, Artificial Sequence
  derived and/or modified sequence
atggtgtgggaagtcaagaccaaccaaatgcccaacgctgtgcagaagctgctgctggtgatggataaaagggctagcgggatgaatgactcattggagctactgcaatgtaatgagaacctcccgtcgagcccaggctataactcctgtgacgagcatatggagctcgacgatctccccgaactccaggcagttcaaagcgatcctacacagagcgggatgtaccagttgagttctgacgtcagccatcaggaatatccaagaagctcttggaatcaaaacacctcagatatccctgagaccacctatcgggaaaacgaagtcgactggctgacggagttagcgaacattgctacttctccccagtcacccttaatgcagtgttcgttctataataggagttccccagttcacattatcgctacttctaagagcctccacagttacgcacgccctccgccagtcagcagcagctcgaaatccgagcccgcttttcctcatcaccattggaaggaggagacccctgtccgtcacgagagggctaattccgagtccgagtctggtatattctgcatgtctagcctgtcggatgacgatgaccttggctggtgtaactcatggccaagcaccgtgtggcactgctttcttaaggggacccgactttgcttccacaaaggcagcaataaggagtggcaggacgtggaggacttcgcgcgggccgaaggatgtgacaatgaggaagacttgcagatgggcatacataaggggtatgggtctgatgggctgaagcttctctctcacgaggagtctgtatcattcggcgagtcagtgctaaagctaacattcgatcctgggactgttgaggacggcctcctgaccgtagaatgcaaactcgatcatccattctacgtcaagaataaggggtggtccagtttttatccctccttaaccgtggtgcaacacggaatcccatgctgcgaggtgcacatcggagatgtatgtctgcctccgggtcacccagacgctatcaatttcgatgactcgggagtgtttgatacgtttaaatcctatgactttactccaatggacagttcagccgtgtatgtgctatcttccatggcccggcagaggcgggccagtctgagctgcgggggtccaggcggacaagattttgccaggtcaggcttcagtaagaattgcggaagtccaggaagtagtcagttgagtagtaattcactttacgccaaggctgtcaaaaatcattcctccgggacagtttcagctacctcgcctaacaaatgtaaacggccgatgaacgcatttatgttgttcgccaaaaaataccgcgttgaatacacccaaatgtaccccggcaaggataaccgcgccatcagtgttattttaggcgatcgttggaagaagatgaagaatgaagaacgccgcatgtataccttggaggccaaggccctggccgaggaacagaaacgcctgaacccggactgctggaagagaaaaaggaccaacagtggctcccaacagcactag

SEQ ID NO: 173540 - DNA, 1545 bp, Artificial Sequence
  derived and/or modified sequence
atggtgtgggaggtgaagaccaaccagatgcccaacgccgtgcagaaactgctccttgtcatggataaacgagctagcggtatgaatgattctctggaactgttacagtgtaacgagaatttgccttcaagccctgggtataatagttgcgatgaacatatggaactcgatgatttgccagagctccaagccgttcaatccgaccccactcagtctgggatgtaccagctgagctcggacgtaagccaccaggagtaccctcgatcgtcatggaaccagaacacttcagacatccccgagaccacctacagagagaacgaggtggattggctgacagaactggcgaatatcgccacgagtccccagtctcctctgatgcagtgctccttttacaatagatcttctcccgtgcatattatcgccaccagtaaatccctgcactcatacgctcgccctcctccggtctccagcagtagcaagtcggaacccgcattccctcatcaccactggaaagaagagacgcccgtgaggcacgagcgagcaaattccgagtccgagagcggaattttttgtatgagtagtctgtccgacgatgacgacctcgggtggtgtaattcatggccctccaccgtgtggcattgcttccttaagggcacaagactctgttttcacaaagggagcaacaaagaatggcaggacgtggaggatttcgctagagcggaggggtgcgataacgaggaagacctgcagatggggattcacaaaggctatggttcggatggcctgaaactgcttagccacgaagaaagtgtatcgttcggggagtcagtcctgaaactgaccttcgacccaggcacggtggaagacggcctgctgacagtcgagtgcaagcttgatcaccctttttatgtcaagaacaaagggtggtcgagtttttatccttctctcaccgtggtccagcacggcatcccatgttgtgaagtgcatatcggggacgtgtgcttgcccccaggccatcccgatgctataaacttcgacgattctggggtcttcgacacatttaagagttatgactttacacccatggattcctccgccgtgtatgtcctgtcatccatggccagacagagaagggcctccctgtcatgcgggggacccggcggacaagattttgcgcgtagtgggtttagcaagaactgcggttctcctggttctagtcagttgtcatctaactccctgtacgccaaggctgtcaaaaaccacagcagtggaaccgtcagtgctacctctcccaacaaatgtaagcggcctatgaatgccttcatgctcttcgctaaaaagtatcgagttgaatatacccagatgtacccaggtaaagacaatagggctatatcggtaatattgggtgataggtggaagaagatgaagaatgaagaacggaggatgtacaccctagaggcaaaagctctggccgaggaacaaaaaaggctaaatccagactgctggaagagaaaacggacaaacagcggatcacagcagcactag

SEQ ID NO: 173541 - DNA, 1545 bp, Artificial Sequence
  derived and/or modified sequence
atggtgtgggaagtcaaaactaaccagatgcctaacgccgtgcagaaacttctgctggtgatggacaaacgggcaagtggaatgaatgacagccttgaacttctccagtgcaacgaaaacctcccatcatctcccggatacaatagttgtgatgagcatatggagctggacgaccttccagaattgcaggccgtgcagtcggacccgactcagagcggaatgtaccaactttcaagcgacgtgagccaccaggagtatccacgatcaagctggaatcagaataccagcgatatcccagaaacaacctatcgcgaaaacgaagttgactggctcacagagttagccaacatcgccacctcacctcagtcacccctgatgcagtgctctttctacaaccgctcctctcctgtccacattatagctacgagcaaatctttgcacagctatgctagaccacctccagtatctagctcatccaagtctgaacctgcttttccacaccaccattggaaggaagagactcccgtgcggcacgaacgcgcaaacagtgagagcgagagcgggattttctgcatgtcctcgctgtctgacgatgacgacctcgggtggtgcaactcttggccttctacagtgtggcattgtttcctgaaaggaaccaggctgtgcttccacaagggctccaacaaagagtggcaggacgtggaggattttgccagggcggagggatgcgataatgaggaggacctgcagatgggcattcataaggggtacggatccgacggccttaagctgctgagccacgaagaaagtgtgtccttcggggagtccgtgttaaaactcacatttgaccctggtacagtagaggacggccttttgacagtcgagtgtaagctcgaccaccctttttatgtgaaaaacaaaggttggtcaagcttttacccttctctgacggtagtgcagcatggaataccatgttgtgaagtgcacatcggagacgtttgcttgcctccgggacatccggacgctattaattttgatgactctggggtatttgatacatttaagtcctacgactttacgcccatggatagcagtgctgtttacgtcctcagtagcatggcgaggcagagaagggcctcactgtcttgtggtggcccaggcggtcaggatttcgccaggagtggattctccaaaaattgcggctctcccggttcaagccagctttcatcaaatagtctctacgccaaggccgtgaagaaccatagttccgggactgtctcagccacgtccccaaacaagtgcaaaagacctatgaatgccttcatgctgtttgctaagaagtatcgagttgaatacacgcagatgtatccaggcaaggataatcgtgctatctccgtcatactaggagaccgatggaagaaaatgaagaacgaggaacgtagaatgtacacgctggaggcaaaagcccttgctgaggagcaaaaacggttaaaccccgattgctggaagagaaagcgcaccaactcggggtcgcagcagcactag

SEQ ID NO: 173542 - protein, 304 aa, Artificial Sequence
  derived and/or modified sequence
MKRAHPEYSSSDSELDETIEVEKESADENGNLSSALGSMSPTTSSQILARKRRRGIIEKRRRDRINNSLSELRRLVPSAFEKQGSAKLEKAEILQMTVDHLKMLHTAGGKGYFDAHALAMDYRSLGFRECLAEVARYLSIIEGLDASDPLRVRLVSHLNNYASQREAASGAHAGLGHIPWGTVFGHHPHIAHPLLLPQNGHGNAGTTASPTEPHHQGRLGSAHPEAPALRAPPSGSLGPVLPVVTSASKLSPPLLSSVASLSAFPFSFGSFHLLSPNALSPSAPTQAANLGKPYRPWGTEIGAF

SEQ ID NO: 173543 - DNA, 2319 bp, Artificial Sequence
  derived and/or modified sequence
ttccccactcccccgccctccccagggccctgggaaggggctcagcgtgggaaaggatggttgagttttaaccagaggcaaagcgtgagcgggatcagtgtgtgcggaacgcaagcagccgagagcggagaggcgccgctgtagttaactcctccctgcccgccgcgccgaccctccccaggaacccccagggagccagcatgaagcgagctcaccccgagtacagctcctcggacagcgagctggacgagaccatcgaggtggagaaggagagtgcggacgagaatggaaacttgagttcggctctaggttccatgtccccaactacatcttcccagattttggccagaaaaagacggagaggaataattgagaagcgccgacgagaccggatcaataacagtttgtctgagctgagaaggctggtacccagtgcttttgagaagcagggatctgctaagctagaaaaagccgagatcctgcagatgaccgtggatcacctgaaaatgctgcatacggcaggagggaaaggttactttgacgcgcacgcccttgctatggactatcggagtttgggatttcgggaatgcctggcagaagttgcgcgttatctgagcatcattgaaggactagatgcctctgacccgcttcgagttcgactggtttcgcatctcaacaactacgcttcccagcgggaagccgcgagcggcgcccacgcgggcctcggacacattccctgggggaccgtcttcggacatcacccgcacatcgcgcacccgctgttgctgccccagaacggccacgggaacgcgggcaccacggcctcacccacggaaccgcaccaccagggcaggctgggctcggcacatccggaggcgcctgctttgcgagcgccccctagcggcagcctcggaccggtgctccctgtggtcacctccgcctccaaactgtcgccgcctctgctctcctcagtggcctccctgtcggccttccccttctctttcggctccttccacttactgtctcccaatgcactgagcccttcagcacccacgcaggctgcaaaccttggcaagccctatagaccttgggggacggagatcggagctttttaaagaactgatgtagaatgagggaggggaaagtttaaaatcccagctgggctggactgttgccaacatcaccttaaagtcgtcagtaaaagtaaaaaggaaaaaggtacactttcagataattttttttttaaagactaaaggtttgttggtttacttttatcttttttaatgtttttttcatcatgtcatgtattagcagtttttaaaaactagttgttaaattttgttcaagacattaaattgaaatagtgagtataagccaacactttgtgataggtttgtactgtgcctaatttactttgtaaaccagaatgattccgtttttgcctcaaaatttggggaatcttaacatttagtatttttggtctgtttttctccttgtatagttatggtctgtttttagaattaattttccaaaccactatgcttaatgttaacatgattctgtttgttaatattttgacagattaaggtgttgtataaataatattcttttggggggaggggaactatattgaattttatatttctgagcaaagcgttgacaaatcagatgatcagctttatccaagaaagaagactagtaaattgtctgcctcctatagcagaaaggtgaatgtacaaactgttggtggccctgaatccatctgaccagctgctggtatctgccaggactggcagttctgatttagttaggagagagccgctgataggttaggtctcatttggagtgttggtggaaaggaaactgaaggtaattgaatagaatacgcctgcatttaccagccccagcaacacaaagaatttttaatcacacggatctcaaattcacaaatgttaacatggataagtgatcatggtgtgcgagtggtcaattgagtagtacagtggaaactgttaaatgcataacctaattttcctgggactgccatattttcttttaactggaaatttttatgtgagttttccttttggtgcatggaactgtggttgccaaggtatttaaaagggctttcctgcctccttctctttgatttatttaatttgatttgggctataaaatatcatttttcaggtttattcttttagcaggtgtagttaaacgacctccactgaactgggtttgacctctgttgtactgatgtgttgtgactaaataaaaaagaaagaacaaagtaaaaaaaaaaaaaaaaaaaaaaaaaaa

SEQ ID NO: 173544 - DNA, 915 bp, Artificial Sequence
  derived and/or modified sequence
atgaagagagcccaccccgagtacagcagcagcgacagcgagctggacgagaccatcgaggtggagaaggagagcgccgacgagaacggcaacctgagcagcgccctgggcagcatgagccccaccaccagcagccagatcctggccagaaagagaagaagaggcatcatcgagaagagaagaagagacagaatcaacaacagcctgagcgagctgagaagactggtgcccagcgccttcgagaagcagggcagcgccaagctggagaaggccgagatcctgcagatgaccgtggaccacctgaagatgctgcacaccgccggcggcaagggctacttcgacgcccacgccctggccatggactacagaagcctgggcttcagagagtgcctggccgaggtggccagatacctgagcatcatcgagggcctggacgccagcgaccccctgagagtgagactggtgagccacctgaacaactacgccagccagagagaggccgccagcggcgcccacgccggcctgggccacatcccctggggcaccgtgttcggccaccacccccacatcgcccaccccctgctgctgccccagaacggccacggcaacgccggcaccaccgccagccccaccgagccccaccaccagggcagactgggcagcgcccaccccgaggcccccgccctgagagccccccccagcggcagcctgggccccgtgctgcccgtggtgaccagcgccagcaagctgagcccccccctgctgagcagcgtggccagcctgagcgccttccccttcagcttcggcagcttccacctgctgagccccaacgccctgagccccagcgcccccacccaggccgccaacctgggcaagccctacagaccctggggcaccgagatcggcgccttctag

SEQ ID NO: 173545 - DNA, 2293 bp, Artificial Sequence
  derived and/or modified sequence
ttccccactcccccgccctccccagggccctgggaaggggctcagcgtgggaaaggatggttgagttttaaccagaggcaaagcgtgagcgggatcagtgtgtgcggaacgcaagcagccgagagcggagaggcgccgctgtagttaactcctccctgcccgccgcgccgaccctccccaggaacccccagggagccagcatgaagcgagctcaccccgagtacagctcctcggacagcgagctggacgagaccatcgaggtggagaaggagagtgcggacgagaatggaaacttgagttcggctctaggttccatgtccccaactacatcttcccagattttggccagaaaaagacggagaggaataattgagaagcgccgacgagaccggatcaataacagtttgtctgagctgagaaggctggtacccagtgcttttgagaagcagggatctgctaagctagaaaaagccgagatcctgcagatgaccgtggatcacctgaaaatgctgcatacggcaggagggaaaggttactttgacgcgcacgcccttgctatggactatcggagtttgggatttcgggaatgcctggcagaagttgcgcgttatctgagcatcattgaaggactagatgcctctgacccgcttcgagttcgactggtttcgcatctcaacaactacgcttcccagcgggaagccgcgagcggcgcccacgcgggcctcggacacattccctgggggaccgtcttcggacatcacccgcacatcgcgcacccgctgttgctgccccagaacggccacgggaacgcgggcaccacggcctcacccacggaaccgcaccaccagggcaggctgggctcggcacatccggaggcgcctgctttgcgagcgccccctagcggcagcctcggaccggtgctccctgtggtcacctccgcctccaaactgtcgccgcctctgctctcctcagtggcctccctgtcggccttccccttctctttcggctccttccacttactgtctcccaatgcactgagcccttcagcacccacgcaggctgcaaaccttggcaagccctatagaccttgggggacggagatcggagctttttaaagaactgatgtagaatgagggaggggaaagtttaaaatcccagctgggctggactgttgccaacatcaccttaaagtcgtcagtaaaagtaaaaaggaaaaaggtacactttcagataattttttttttaaagactaaaggtttgttggtttacttttatcttttttaatgtttttttcatcatgtcatgtattagcagtttttaaaaactagttgttaaattttgttcaagacattaaattgaaatagtgagtataagccaacactttgtgataggtttgtactgtgcctaatttactttgtaaaccagaatgattccgtttttgcctcaaaatttggggaatcttaacatttagtatttttggtctgtttttctccttgtatagttatggtctgtttttagaattaattttccaaaccactatgcttaatgttaacatgattctgtttgttaatattttgacagattaaggtgttgtataaataatattcttttggggggaggggaactatattgaattttatatttctgagcaaagcgttgacaaatcagatgatcagctttatccaagaaagaagactagtaaattgtctgcctcctatagcagaaaggtgaatgtacaaactgttggtggccctgaatccatctgaccagctgctggtatctgccaggactggcagttctgatttagttaggagagagccgctgataggttaggtctcatttggagtgttggtggaaaggaaactgaaggtaattgaatagaatacgcctgcatttaccagccccagcaacacaaagaatttttaatcacacggatctcaaattcacaaatgttaacatggataagtgatcatggtgtgcgagtggtcaattgagtagtacagtggaaactgttaaatgcataacctaattttcctgggactgccatattttcttttaactggaaatttttatgtgagttttccttttggtgcatggaactgtggttgccaaggtatttaaaagggctttcctgcctccttctctttgatttatttaatttgatttgggctataaaatatcatttttcaggtttattcttttagcaggtgtagttaaacgacctccactgaactgggtttgacctctgttgtactgatgtgttgtgactaaataaaaaagaaagaacaaagta

SEQ ID NO: 173546 - DNA, 915 bp, Artificial Sequence
  derived and/or modified sequence
atgaaacgggctcacccagaatactccagttccgactcggagctggacgagactattgaggtagagaaggagtctgctgacgagaatgggaatctgagtagtgcccttggtagcatgtctcccacaacttcatcccagatcctggccagaaaaaggaggaggggaataattgagaaaagacgaagggatcggatcaataacagtctgagcgaattgcggcggctcgtcccatccgccttcgagaagcagggcagcgccaagctggagaaggccgagattctacaaatgactgtagatcacctgaaaatgctccatactgcaggcggcaagggctacttcgatgcccatgctttggcgatggattatagatcgctgggcttcagagagtgtctcgcggaggtggcccgctacctaagcataatcgagggcctggatgcaagcgaccctctccgagtaaggctcgtgagccacctaaataattatgcttcccagagggaagccgccagcggcgcccacgctggactgggacacattccttggggaacagtgttcgggcaccacccccacatcgcacatcctctgctgttgcctcagaacgggcatggtaatgctggcactaccgcctcgcctacagagccgcaccatcaggggcgactgggcagcgcacacccagaggccccggccttaagggctcctccctcaggatctctaggtcctgtcctgcctgtagtcaccagcgcaagtaagctgtccccccccctgctaagctccgtcgctagcctatctgcttttccttttagctttggaagcttccatttactgagccccaacgccctgagtcccagcgctcctacacaagctgccaatctcggcaagccttatcgcccgtggggtacggagataggggcgttctag

SEQ ID NO: 173547 - DNA, 915 bp, Artificial Sequence
  derived and/or modified sequence
atgaagagggcccaccctgagtacagcagcagtgacagcgagctggatgagaccatcgaggtggagaaggagagcgcagatgaaaatggaaacctgagcagcgccctgggctccatgagccccaccaccagcagccagatcctggccaggaagagaagaagaggcatcatcgagaagagaagaagagaccgcatcaacaacagcctgtctgagctgcggcggctggtgcccagcgcctttgagaagcagggcagcgccaagctggagaaggccgagatcctgcagatgacagtggaccacctgaagatgctgcacacagctgggggcaagggctactttgatgcccacgccctggccatggactaccgcagcctgggcttcagagaatgtctggccgaggtggcccgctacctgagcatcatcgagggcctggatgccagtgaccccctgcgggtgcggctggtgagccacctgaacaactatgccagccagcgggaggccgccagcggggcccatgctggcctgggccacatcccctggggcaccgtgtttggccaccacccccacatcgcccaccccctgctgctgccccagaatggacatggaaatgccggcaccacagccagccccacagagccccaccaccagggccgcctgggcagcgcccaccctgaggccccagccctgcgggccccacccagcggcagcctgggccctgtgctgcctgtggtgaccagcgccagcaagctgagcccccccctgctgagctctgtggccagcctgagcgccttccccttctcctttggcagcttccacctgctgagccccaatgccctgagccccagcgcccccacccaggccgccaacctgggcaagccctaccggccctggggcacagaaattggagccttctag

SEQ ID NO: 173548 - DNA, 915 bp, Artificial Sequence
  derived and/or modified sequence
atgaagcgggcccaccccgagtacagcagcagcgacagcgagctggatgaaacaatcgaagttgagaaggaatcagctgatgagaatgggaatctcagttctgcgcttgggtccatgagccccacaacctcttcccagatcctcgcaaggaagaggagacgaggaatcatcgaaaagaggcgcagggaccggatcaacaacagcctctcagaacttcgcagactcgtcccttcagcattcgaaaaacagggctccgccaaactggagaaggctgagatacttcagatgacagttgaccatctgaagatgttgcataccgccggcgggaaaggatatttcgatgcccatgcgctggcaatggattaccggagtttgggcttcagggagtgtctggctgaagttgctcgctacctgtctatcatcgaaggcctcgatgcatctgatcccttgagagtccggttagtttcccacctcaacaattacgcttctcagagggaagccgcttccggggctcacgcagggctgggacatattccttggggaaccgtgttcggccaccacccacatattgcccatccgctgttactgccccagaacggccatggcaatgccgggaccacggcatcccctacggaacctcaccaccagggccgcctgggctctgcccacccagaagcccccgcactcagagctccaccatcagggtcattaggaccagtccttccagtcgttacctcagctagcaagttaagccccccccttctctcaagtgtggcatctctaagtgctttccctttttcgtttggatcattccacttactgagccctaacgccttgtcaccaagcgctcctacacaggcagcaaacctcggaaaaccctaccgcccatggggcacagagattggagcattttag

SEQ ID NO: 173549 - DNA, 915 bp, Artificial Sequence
  derived and/or modified sequence
atgaagagagcccatcccgagtattcctcctccgatagcgagctggacgaaacaattgaggtggaaaaggaatccgccgacgaaaatggaaacctgtctagtgcactagggtctatgtcgccgactacctcctcacagattctcgctaggaagagaagacgcggaattattgagaagaggagacgggacaggattaacaactctctctcagaactcagacggctcgttcccagcgctttcgaaaagcagggatccgccaaactggaaaaggcagaaatcctgcagatgaccgtggatcacttaaagatgctgcacacagccggtggaaaaggttattttgatgcacatgctcttgccatggactataggagcctgggctttcgtgagtgtctcgccgaagttgctcggtacctgagcataatagaggggctggacgcttcagaccccctgcgcgtgcgactggttagccacctcaataactatgcgagtcagcgcgaggcagcatcaggagcgcatgctggactaggccatatcccgtggggcactgtcttcggccaccacccacacatagctcaccccctgctgctgcctcagaatggccacggaaacgctgggacgactgccagccctacagaaccacaccatcaaggcagactggggtcagcccatcctgaggcccctgcactgcgagctcccccttccggatccttaggccctgttctgcccgtggtgaccagcgcttctaaactgagccctcctctcctcagcagcgtggcctctctgtcagcttttccgttttcattcggctcgttccacctgctgtctcctaatgctctgtctccctctgcccctacacaggccgcaaatttagggaagccgtacagaccctggggcaccgaaatcggtgctttctag

SEQ ID NO: 173550 - protein, 337 aa, Artificial Sequence
  derived and/or modified sequence
MKRPCEETTSESDMDETIDVGSENNYSGQSTSSVIRLNSPTTTSQIMARKKRRGIIEKRRRDRINNSLSELRRLVPTAFEKQGSAKLEKAEILQMTVDHLKMLQATGGKGYFDAHALAMDFMSIGFRECLTEVARYLSSVEGLDSSDPLRVRLVSHLSTCATQREAAAMTSSMAHHHHPLHPHHWAAAFHHLPAALLQPNGLHASESTPCRLSTTSEVPPAHGSALLTATFAHADSALRMPSTGSVAPCVPPLSTSLLSLSATVHAAAAAATAAAHSFPLSFAGAFPMLPPNAAAAVAAATAISPPLSVSATSSPQQTSSGTNNKPYRPWGTEVGAF

SEQ ID NO: 173551 - protein, 291 aa, Artificial Sequence
  derived and/or modified sequence
MARKKRRGIIEKRRRDRINNSLSELRRLVPTAFEKQGSAKLEKAEILQMTVDHLKMLQATGGKGYFDAHALAMDFMSIGFRECLTEVARYLSSVEGLDSSDPLRVRLVSHLSTCATQREAAAMTSSMAHHHHPLHPHHWAAAFHHLPAALLQPNGLHASESTPCRLSTTSEVPPAHGSALLTATFAHADSALRMPSTGSVAPCVPPLSTSLLSLSATVHAAAAAATAAAHSFPLSFAGAFPMLPPNAAAAVAAATAISPPLSVSATSSPQQTSSGTNNKPYRPWGTEVGAF

SEQ ID NO: 173552 - DNA, 2672 bp, Artificial Sequence
  derived and/or modified sequence
gcgtggccggcgccggctcttgcggccgagcagagttgcggcgtgggaaagagccgctaggagcagaccgcgccgccgccggagccgcgcctgcccaggcccggggagggaggaggcgggcgtcagggtgctgcgccccgctcggcgtccgagcttccggccgggctgtgccccgcgcggtcttcgccgggatgaagcgcccctgcgaggagacgacctccgagagcgacatggacgagaccatcgacgtggggagcgagaacaattactcggggcaaagtactagctctgtgattagattgaattctccaacaacaacatctcagattatggcaagaaagaaaaggagagggattatagagaaaaggcgtcgggatcggataaataacagtttatctgagttgagaagacttgtgccaactgcttttgaaaaacaaggatctgcaaagttagaaaaagctgaaatattgcaaatgacagtggatcatttgaagatgcttcaggcaacagggggtaaaggctactttgacgcacacgctcttgccatggacttcatgagcataggattccgagagtgcctaacagaagttgcgcggtacctgagctccgtggaaggcctggactcctcggatccgctgcgggtgcggcttgtgtctcatctcagcacttgcgccacccagcgggaggcggcggccatgacatcctccatggcccaccaccatcatccgctccacccgcatcactgggccgccgccttccaccacctgcccgcagccctgctccagcccaacggcctccatgcctcagagtcaaccccttgtcgcctctccacaacttcagaagtgcctcctgcccacggctctgctctcctcacggccacgtttgcccatgcggattcagccctccgaatgccatccacgggcagcgtcgccccctgcgtgccacctctctccacctctctcttgtccctctctgccaccgtccacgccgcagccgcagcagccaccgcggctgcacacagcttccctctgtccttcgcgggggcattccccatgcttcccccaaacgcagcagcagcagtggccgcggccacagccatcagcccgcccttgtcagtatcagccacgtccagtcctcagcagaccagcagtggaacaaacaataaaccttaccgaccctgggggacagaagttggagctttttaaatttttcttgaacttcttgcaatagtaactgaatgtcctccatttcagagtcagcttaaaacctctgcaccctgaaggtagccatacagatgccgacagatccacaaaggaacaataaagctatttgagacacaaacctcacgagtggaaatgtggtattctcttttttttctctcccttttttgtttggttcaaggcagctcggtaactgacatcagcaacttttgaaaacttcacacttgttaccatttagaagtttcctggaaaatatatggaccgtaccatccagcagtgcatcagtatgtctgaattggggaagtaaaatgccctgactgaattctcttgagactagatgggacatacatatatagagagagagtgagagagtcgtgtttcgtaagtgcctgagcttaggaagttttcttctggatatataacattgcacaagggaagacgagtgtggaggataggttaagaaaggaaagggacagaagtcttgcaataggctgcagacattttaataccatgccagagaagagtattctgctgaaaccaacaggttttactggtcaaaatgactgctgaaaataattttcaagttgaaagatctagttttatcttagtttgccttctttgtacagacatgccaagaggtgacatttagcagtgcattggtataagcaattatttcatcagttctcagattaacaagcatttctgctctgcctgcaggcccccaggcacttttttttttggatggctcaaaatatggtgctgctttatataaaccttacatttatatagtgcacctatgagcagttgcctaccatgtgtccaccagaggctatttaattcatgccaacttgaaaactctccagtttgtaggagtttggtttaatttattcagtttcattaggactatttttatatatttatcctcttcattttctcctaatgatgcaacatctattcttgtcaccctttgggagaagttacatttctggaggtgatgaagcaaggagggagcactaggaagagaaaagctacaatttttaaagctctttgtcaagttagtgattgcatttgatcccaaaacaagatgaatgtatgcaatgggatgtacataagttatttttgcccatgcctaaactagtgctatgtaatggggttgtggttttgtttttttcgatttcgtttaatgacaaaataatctcttaatatgctgaaatcaagcacgtgagagtttttgtttaaaagataagagacacagcatgtattatgcacttcatttctctactgtgtggagaaagcaataaacattatgagaatgttaaacgttatgcaaaattatacttttaaatatttgttttgaaattactgtacctagtcttttttgcattactttgtaacctttttctatgcaagagtctttacataccactaattaaatgaagtcctttttgacta

SEQ ID NO: 173553 - DNA, 1014 bp, Artificial Sequence
  derived and/or modified sequence
atgaagcgcccatgcgaagaaacaaccagcgaatccgacatggatgaaaccattgacgtcgggagtgagaacaactactccggccagagtacgagtagcgtaatccgcctcaactcccccaccaccaccagccagattatggcccggaaaaagcgtagaggcataatcgagaagagacgtagggatagaattaataactccctgagcgagcttagacgcttagtacccactgcattcgaaaagcaggggagcgcaaagttggagaaagcggagattctgcagatgaccgtggatcacctgaagatgctacaagcaacagggggcaaggggtatttcgatgctcatgccctcgccatggattttatgtcaattggtttcagagagtgcctgaccgaagtcgctcgctacctttcttctgtggagggactcgacagctctgaccctttgcgagtccgattggtgagtcatctgtccacctgtgcaactcagcgcgaagctgcggctatgacttccagcatggcgcaccaccaccaccctttgcacccgcatcattgggctgccgcctttcaccatttaccagctgcgttactgcaacccaatggtctgcacgccagcgaaagcaccccttgtcggctctccacaacatccgaagttccgcctgcccacgggtctgccctgttgaccgctactttcgctcatgctgattccgccttacggatgccatctaccgggtctgtggcaccatgtgtgccaccgctgtctactagcctgctgtctctgtccgctactgtacatgctgccgctgctgctgcaactgcagccgctcacagttttcccctctcgttcgccggcgccttcccaatgcttccaccgaacgctgccgcagctgtcgctgctgctaccgccatcagcccgcctctgtctgttagtgccacttcctctcctcaacagacctccagtggcaccaacaataaaccataccggccgtggggcaccgaagttggggccttctag

SEQ ID NO: 173554 - DNA, 2678 bp, Artificial Sequence
  derived and/or modified sequence
gggggggcgtggccggcgccggctcttgcggccgagcagagttgcggcgtgggaaagagccgctaggagcagaccgcgccgccgccggagccgcgcctgcccaggcccggggagggaggaggcgggcgtcagggtgctgcgccccgctcggcgtccgagcttccggccgggctgtgccccgcgcggtcttcgccgggatgaagcgcccctgcgaggagacgacctccgagagcgacatggacgagaccatcgacgtggggagcgagaacaattactcggggcaaagtactagctctgtgattagattgaattctccaacaacaacatctcagattatggcaagaaagaaaaggagagggattatagagaaaaggcgtcgggatcggataaataacagtttatctgagttgagaagacttgtgccaactgcttttgaaaaacaaggatctgcaaagttagaaaaagctgaaatattgcaaatgacagtggatcatttgaagatgcttcaggcaacagggggtaaaggctactttgacgcacacgctcttgccatggacttcatgagcataggattccgagagtgcctaacagaagttgcgcggtacctgagctccgtggaaggcctggactcctcggatccgctgcgggtgcggcttgtgtctcatctcagcacttgcgccacccagcgggaggcggcggccatgacatcctccatggcccaccaccatcatccgctccacccgcatcactgggccgccgccttccaccacctgcccgcagccctgctccagcccaacggcctccatgcctcagagtcaaccccttgtcgcctctccacaacttcagaagtgcctcctgcccacggctctgctctcctcacggccacgtttgcccatgcggattcagccctccgaatgccatccacgggcagcgtcgccccctgcgtgccacctctctccacctctctcttgtccctctctgccaccgtccacgccgcagccgcagcagccaccgcggctgcacacagcttccctctgtccttcgcgggggcattccccatgcttcccccaaacgcagcagcagcagtggccgcggccacagccatcagcccgcccttgtcagtatcagccacgtccagtcctcagcagaccagcagtggaacaaacaataaaccttaccgaccctgggggacagaagttggagctttttaaatttttcttgaacttcttgcaatagtaactgaatgtcctccatttcagagtcagcttaaaacctctgcaccctgaaggtagccatacagatgccgacagatccacaaaggaacaataaagctatttgagacacaaacctcacgagtggaaatgtggtattctcttttttttctctcccttttttgtttggttcaaggcagctcggtaactgacatcagcaacttttgaaaacttcacacttgttaccatttagaagtttcctggaaaatatatggaccgtaccatccagcagtgcatcagtatgtctgaattggggaagtaaaatgccctgactgaattctcttgagactagatgggacatacatatatagagagagagtgagagagtcgtgtttcgtaagtgcctgagcttaggaagttttcttctggatatataacattgcacaagggaagacgagtgtggaggataggttaagaaaggaaagggacagaagtcttgcaataggctgcagacattttaataccatgccagagaagagtattctgctgaaaccaacaggttttactggtcaaaatgactgctgaaaataattttcaagttgaaagatctagttttatcttagtttgccttctttgtacagacatgccaagaggtgacatttagcagtgcattggtataagcaattatttcatcagttctcagattaacaagcatttctgctctgcctgcaggcccccaggcacttttttttttggatggctcaaaatatggtgctgctttatataaaccttacatttatatagtgcacctatgagcagttgcctaccatgtgtccaccagaggctatttaattcatgccaacttgaaaactctccagtttgtaggagtttggtttaatttattcagtttcattaggactatttttatatatttatcctcttcattttctcctaatgatgcaacatctattcttgtcaccctttgggagaagttacatttctggaggtgatgaagcaaggagggagcactaggaagagaaaagctacaatttttaaagctctttgtcaagttagtgattgcatttgatcccaaaacaagatgaatgtatgcaatgggatgtacataagttatttttgcccatgcctaaactagtgctatgtaatggggttgtggttttgtttttttcgatttcgtttaatgacaaaataatctcttaatatgctgaaatcaagcacgtgagagtttttgtttaaaagataagagacacagcatgtattatgcacttcatttctctactgtgtggagaaagcaataaacattatgagaatgttaaacgttatgcaaaattatacttttaaatatttgttttgaaattactgtacctagtcttttttgcattactttgtaacctttttctatgcaagagtctttacataccactaattaaatgaagtcctttttgacta

SEQ ID NO: 173555 - DNA, 1014 bp, Artificial Sequence
  derived and/or modified sequence
atgaagaggccctgtgaggagaccaccagcgagagtgacatggatgagaccattgatgtgggcagcgagaacaactacagcggccagagcaccagcagcgtcatccggctgaacagccccaccaccaccagccagatcatggccaggaagaagaggcggggcatcatcgagaagagaagaagagaccgcatcaacaacagcctgtctgagctgcggcggctggtgcccacagcctttgagaagcagggcagcgccaagctggagaaggccgagatcctgcagatgacagtggaccacctgaagatgctgcaggccaccggcggcaagggctactttgatgcccacgccctggccatggacttcatgagcatcggcttccgggagtgcctgacagaggtggcccgctacctgagctctgtggagggcctggacagcagtgaccccctgcgggtgcggctggtgagccacctgagcacctgtgccacccagcgggaggccgccgccatgaccagctccatggcccaccaccaccaccccctgcacccccaccactgggccgccgccttccaccacctgcctgctgccctgctgcagcccaacggcctgcacgccagcgagagcaccccctgccgcctgagcaccaccagcgaggtgcccccagcccacggcagcgccctgctgacagccacctttgcccacgccgacagcgccctgaggatgcccagcactggatctgtggccccctgtgtgccccccctgagcaccagcctgctgagcctgagcgccaccgtgcacgccgctgctgctgctgccacagctgctgcccacagcttccccctgagctttgctggggccttccccatgctgcccccaaatgctgctgctgctgtggccgccgccacagccatcagcccccccctgtctgtgtctgccaccagcagcccccagcagaccagcagcggcaccaacaacaagccctaccggccctggggcacagaggtgggcgccttctag

SEQ ID NO: 173556 - DNA, 1014 bp, Artificial Sequence
  derived and/or modified sequence
atgaagcggccctgcgaggagaccaccagcgagagcgacatggacgagacaattgatgtaggatcggaaaataattacagcgggcagtctacctcaagcgtgatccgcctgaactcaccaaccactaccagccaaatcatggcaaggaagaaacgtaggggcatcatagagaaacgacgccgagatcgtatcaataactctctctctgaactccgccggttagttccgacagcttttgaaaaacagggttctgcaaaacttgagaaggccgagatccttcagatgacagtcgaccacctgaaaatgctacaggcaactggcggaaagggttacttcgatgcccacgcccttgctatggatttcatgagtataggctttagggagtgcctgaccgaggttgcccgctacctttcatccgtggagggcctggacagctcagacccgcttcgggtgcgactggtaagccacctgtcaacatgcgcaacgcaaagagaagccgccgctatgaccagctcgatggctcaccaccaccacccattgcaccctcaccattgggccgccgctttccaccatctgcccgctgcactgctacaaccgaacggccttcacgcatccgaatcaacgccttgtaggctgagcaccacgtcagaggtcccccccgcacatggctccgccctgttgactgccacctttgcccatgcagacagtgcactgcggatgccttcaactggttcagtcgccccatgcgtgccacctctgtcaacatcactcctgtctctttccgcaaccgtgcacgctgccgcagccgctgcgaccgctgctgctcactcttttccactgtcctttgctggagccttcccaatgctcccccccaacgcagccgcagcagtcgccgcggctaccgctatctcaccgcccctgtctgtgagtgccacgagctccccgcaacagacgtcttctggcactaacaacaaaccatatcgcccctgggggaccgaggtgggagccttttag

SEQ ID NO: 173557 - DNA, 1014 bp, Artificial Sequence
  derived and/or modified sequence
atgaaacgcccatgtgaagagacaactagtgaatccgacatggacgagacaattgacgtggggagtgaaaacaattactccggccagtccaccagctccgtgattaggctgaactcacctactacgacctcccaaattatggctcgaaagaaaaggcgagggatcatcgagaaaagaaggagagataggataaataattctctctccgagctcagacgactggtgcctaccgccttcgagaaacaggggagcgccaaactcgaaaaggctgaaatattgcagatgaccgtggatcacctgaagatgttgcaggccaccgggggtaaagggtactttgacgcccacgcactcgcaatggacttcatgagcatcggatttagggaatgcctgacagaggtggctcggtatctgtcgagtgtggaagggctggatagttcagaccctctgagggtgcgccttgtgtcgcatctatcaacatgtgcgactcagcgggaggctgcagcaatgacttccagtatggcccaccatcaccaccccctgcacccacaccactgggccgctgccttccaccacctgccagctgccctgttgcagcccaatggtctccatgcgtctgagtcaaccccctgtaggctgagtacaacctcagaggtgccccctgcacatggtagcgcgctcctgacggctaccttcgcccatgccgatagcgctcttcgtatgcctagcacgggatccgtagccccatgtgttcctcccctgtccacttctctcctttcccttagtgctactgtccacgcagcggctgctgccgctacggccgctgcacacagtttcccgctgtctttcgctggggcttttcccatgctgccaccaaacgctgccgctgccgtggcggctgccaccgcaatctcaccaccactgagtgtgtctgccacatcatctccacagcagacatcttcggggacaaacaacaagccttaccgcccatgggggacagaggttggggcattctag

SEQ ID NO: 173558 - DNA, 1014 bp, Artificial Sequence
  derived and/or modified sequence
atgaagagaccctgcgaggagaccaccagcgagagcgacatggacgagaccatcgacgtgggcagcgagaacaactacagcggccagagcaccagcagcgtgatcagactgaacagccccaccaccaccagccagatcatggccagaaagaagagaagaggcatcatcgagaagagaagaagagacagaatcaacaacagcctgagcgagctgagaagactggtgcccaccgccttcgagaagcagggcagcgccaagctggagaaggccgagatcctgcagatgaccgtggaccacctgaagatgctgcaggccaccggcggcaagggctacttcgacgcccacgccctggccatggacttcatgagcatcggcttcagagagtgcctgaccgaggtggccagatacctgagcagcgtggagggcctggacagcagcgaccccctgagagtgagactggtgagccacctgagcacctgcgccacccagagagaggccgccgccatgaccagcagcatggcccaccaccaccaccccctgcacccccaccactgggccgccgccttccaccacctgcccgccgccctgctgcagcccaacggcctgcacgccagcgagagcaccccctgcagactgagcaccaccagcgaggtgccccccgcccacggcagcgccctgctgaccgccaccttcgcccacgccgacagcgccctgagaatgcccagcaccggcagcgtggccccctgcgtgccccccctgagcaccagcctgctgagcctgagcgccaccgtgcacgccgccgccgccgccgccaccgccgccgcccacagcttccccctgagcttcgccggcgccttccccatgctgccccccaacgccgccgccgccgtggccgccgccaccgccatcagcccccccctgagcgtgagcgccaccagcagcccccagcagaccagcagcggcaccaacaacaagccctacagaccctggggcaccgaggtgggcgccttctag

SEQ ID NO: 173559 - protein, 578 aa, Artificial Sequence [sequence omitted]

SEQ ID NO: 173560 - DNA, 1737 bp, Artificial Sequence
  derived and/or modified sequence
atgcctgactccaatttcgcagaaagaagtgaggagcaggtttctggggctaaagtaattgcccaagctcttaagactcaggacgtagagtatatcttcggtattgtgggaatcccggtgacggagattgccatcgctgcacagcagcttgggatcaagtatatcggcatgaggaacgaacaggcagcctgctatgcggcctccgccatcggctatctgacttcgcgtcctggtgtctgtctcgtggtcagtggtccgggactgattcacgcactcggcggtatggctaacgctaacatgaactgttggccactgctagtgataggaggctcctccgagcggaaccaggagactatgggcgctttccaggaatttccacaagtcgaggcctgtaggctgtacacaaaatttagcgccagaccaagctccatcgaggcaattccctttgtgatagaaaaagcagttagatccagcatctatggccggcctggtgcctgctatgtggacatcccagctgatttcgtgaacctccaggtgaatgtgaactcgattaagtacatggagcgttgtatgtccccacccatctcaatggctgagacaagcgcggtttgtacagccgcatcagttattcgcaatgctaaacagccactgcttatcatcggcaaaggcgccgcttatgcgcatgccgaggagtccattaagaagctggtggaacaatataaactgccattcctgcccacgccaatgggaaagggagttgtccctgacaaccacccttactgcgtcggggctgcacgctctcgggcactccaatttgcagacgttatcgtcctgttcggagcacggctgaactggattctccacttcgggctgccaccccggtatcaacccgacgtgaagttcatccaagtcgacatctgtgccgaagaactgggcaataacgtgaagccagcagtgacactcttggggaatatccatgcagtaaccaaacaactgctagaagagctcgataaaaccccatggcagtatcctcccgaaagcaagtggtggaaaaccttgagggagaaaatgaagtcgaatgaggcagcttccaaagaactggcttcgaagaaatctctcccaatgaactattatactgttttttatcatgtgcaagagcaactacctcgggattgcttcgtcgtgtcagagggagcaaacaccatggacatcgggcgcactgtcttgcagaactacctgcctcgccatcggctggacgctggcacattcggcacgatgggcgtcgggctggggttcgccatcgccgccgccgtggtggcaaaggacaggagcccgggccaatggattatctgtgtagaaggcgactctgcatttgggttctccggaatggaggtggagacaatatgcaggtacaacctgcccattattctcctcgtggtgaacaataacggtatctaccagggttttgatactgacacttggaaggaaatgctgaagttccaggacgcgacagccgtggtcccccctatgtgtttgttgcctaattcacactacgaacaagtaatgactgcatttggggggaaagggtacttcgtacaaacacctgaagaactgcaaaagagccttaggcaatcactggctgataccactaaacccagtctcatcaatattatgatcgagcctcaagccaccagaaaggcccaggacttccactggctcacccggtccaatatgtag

SEQ ID NO: 173561 - DNA, 1737 bp, Artificial Sequence
  derived and/or modified sequence
atgccagacagcaactttgctgagaggtctgaggagcaggtgtctggggccaaggtgattgcccaggccctgaagacccaggatgtggagtacatctttggaattgtgggcatccctgtgacagaaattgccatcgccgcccagcagctgggcatcaagtacatcggcatgagaaatgagcaggccgcctgctacgccgccagcgccatcggctacctgaccagcaggcctggggtgtgcctggtggtgtctggccctggcctcatccacgccctgggcggcatggccaatgccaacatgaactgctggcccctgctggtgattggaggcagcagcgagaggaaccaggagaccatgggcgccttccaggagttcccccaggtggaggcctgccgcctgtacaccaagttcagcgcccggcccagcagcattgaggccatcccctttgtgattgagaaggctgtgcgcagcagcatctacggccggcctggggcctgctacgtggacatcccagctgactttgtgaacctgcaggtgaatgtgaacagcatcaagtacatggagcgctgcatgagcccccccatctccatggccgagaccagcgctgtgtgcacagctgccagcgtcatcagaaatgccaagcagcccctgctgatcatcggcaagggggccgcctatgcccatgctgaggagagcatcaagaagctggtggagcagtacaagctgcccttcctgcccacccccatgggcaaaggagtggtgcctgacaaccacccctactgtgtgggcgccgcccggagccgggccctgcagtttgctgatgtgattgtgctgtttggagcccggctgaactggatcctgcacttcggcctgcccccacgctaccagccagatgtgaagttcatccaggtggacatctgtgccgaggagctgggcaacaacgtgaagccagctgtgaccctgctgggcaacatccatgctgtgaccaagcagctgctggaggagctggacaagaccccctggcagtacccacctgagagcaagtggtggaagaccctgcgggagaagatgaagagcaatgaggccgccagcaaggagctggccagcaagaagagcctgcccatgaactactacacagtgttctaccacgtgcaggagcagctgccccgggactgctttgtggtgtctgagggcgccaacaccatggacatcggccgcacagtgctgcagaactacctgcccaggcaccggctggatgctggcaccttcggcaccatgggcgtgggcctgggctttgccatcgctgctgctgtggtggccaaggacaggagccctggccagtggatcatctgtgtggagggggacagcgccttcggcttcagcggcatggaggtggagaccatctgccgctacaacctgcccatcatcctgctggtggtgaacaacaacggcatctaccagggctttgacacagacacctggaaggagatgctgaagttccaggatgccacagctgtggtgccccccatgtgcctgctgcccaacagccactatgagcaggtgatgacagcctttggaggcaagggctactttgtgcagaccccagaggagctgcagaagagcctgcggcagagcctggccgacaccaccaagcccagcctcatcaacatcatgattgagccccaggccaccaggaaggcccaggacttccactggctgaccaggagcaacatgtag

SEQ ID NO: 173562 - DNA, 1737 bp, Artificial Sequence
  derived and/or modified sequence
atgcccgacagcaacttcgccgagcggagcgaggagcaggtgagcggcgctaaagttatcgctcaagcccttaagacgcaagacgtggagtacattttcggaattgttgggattcccgtgacagaaatcgctatagcggctcagcagctgggaatcaagtacattgggatgcgcaacgagcaggccgcatgctatgccgccagcgcaatcgggtatctgactagcagacctggcgtgtgtctggtcgtgagcgggccaggtctgatacacgcactcggcggaatggctaatgcgaacatgaactgttggccactgctggtgatcggagggtcatcagagcggaaccaggaaacaatgggggctttccaggagtttcctcaggttgaggcctgccggttgtataccaagttttcagcccgccccagttccatcgaggccatcccctttgtcattgaaaaggccgtgcgcagtagcatctacgggaggcccggggcttgctacgtggatatccctgccgactttgtgaacctgcaggtaaacgtcaacagcatcaaatacatggaacggtgcatgagcccacccatatctatggcggagacctccgcggtttgtaccgcggcgtcagtgataagaaacgccaagcagcccctgctcattatcggcaagggtgctgcgtacgcacacgccgaagagtcaatcaagaagctggtggaacagtataagttgccattcttaccgactcccatgggtaaaggagtcgtgccagacaatcatccctattgcgttggcgctgcaagatcacgcgctctgcagttcgcggatgtgattgttctgttcggcgcccgcttaaactggattctccatttcggcctcccaccacggtaccagccagacgttaaattcatacaggtggacatttgtgcagaagagctggggaacaatgtgaaaccggccgtgactctgctaggcaatatacatgccgtcaccaagcaactcttagaggagcttgacaagaccccgtggcaatacccccctgaaagcaaatggtggaaaacactgcgggaaaaaatgaaatccaatgaagccgcttcaaaagaactggcgtctaagaagagtctgccaatgaattattatactgtgttctaccatgtgcaggaacagttgccgagggattgcttcgtggtctcagaaggggctaacaccatggatattggccgcaccgtgttacagaattacctgccacggcaccgccttgacgccgggacattcgggactatgggagttgggctcggcttcgccatcgcggctgccgttgtagccaaggacaggagtcccggtcaatggatcatttgtgttgaaggagatagcgcctttggattttccggcatggaggtggaaaccatttgtagatataatctacctattattctcctggtggtcaataacaatggcatttatcaagggttcgacaccgacacttggaaggaaatgcttaagtttcaggatgccactgcagtagttcctccaatgtgtctgcttcccaacagtcattatgaacaagtcatgacagcatttggaggcaaggggtactttgtccagactcccgaggagctccagaagagtctgagacagtcccttgcagataccacaaagccctccctcatcaacatcatgatcgagcctcaggccacccgcaaggctcaagacttccactggttgaccagaagcaacatgtag

SEQ ID NO: 173563 - DNA, 1737 bp, Artificial Sequence
  derived and/or modified sequence
atgcctgacagcaactttgcggaaagatccgaggaacaggtgtcaggggcaaaggtgattgcacaggcgctgaagacccaggacgtggaatatattttcggaatcgtcggtatcccagttacagagatcgccatagctgcgcagcaacttggcattaaatacatcggcatgcgcaacgagcaggcagcttgttatgcagctagcgccatcggctacctgacttccagacccggagtctgtctggtggtatccggacccggtctgattcacgcactgggcggaatggcgaatgctaatatgaattgttggcctttgctcgtaatcggagggtccagcgagagaaatcaagaaacaatgggagccttccaggagtttccccaagtggaagcttgccgcctgtacactaaattttcagcaaggccctcatcgatcgaggctataccctttgtgatcgaaaaggccgtacgctccagcatttacggtagacccggtgcctgttatgtcgacattcccgcagacttcgttaacttacaagttaatgtcaacagtataaagtatatggagcgctgcatgtcacccccaatctccatggcagagaccagtgctgtatgtacagccgctagcgtcattagaaacgcaaagcagcctcttctgattatcggcaagggggcagcttatgctcatgctgaggaatcgatcaagaaactggtggaacagtataaactgccttttcttcccactcccatgggaaagggcgtggtacccgataatcatccctactgcgtgggtgccgctcgatcaagggcgttgcagttcgcagacgtgatcgtgttgttcggagccaggctcaattggattctgcacttcggactgcctcctaggtatcaacctgacgtgaagtttattcaggtggatatatgtgcagaggagctgggaaataatgtgaagcccgctgttactctcctgggcaacatccatgcagtcactaaacagctcctggaagaactcgacaagactccttggcagtatcctcctgaatcaaaatggtggaagacgctacgggaaaaaatgaaatccaatgaagctgcttcaaaagagcttgccagtaaaaagtcgctgcccatgaactattacaccgtgttctaccacgtccaagagcagctgcctcgcgactgcttcgtcgtttctgagggggctaataccatggatattggccgtacggtgctgcagaattacctccctcggcatcgattagacgccggtacctttgggacaatgggggtgggcctgggttttgccatcgctgcggctgtggtggctaaagacaggtcccctgggcagtggattatctgcgtggagggcgacagtgccttcggcttttcaggcatggaagtcgagaccatctgccgatataatctacctatcatcctgctagttgttaacaataatggtatataccagggcttcgacacggatacttggaaagagatgctgaaatttcaggacgccacggccgtggttcctccgatgtgcctgctgccaaacagccattacgagcaggtgatgactgccttcgggggtaagggatactttgttcagacgcccgaggagctccagaagtctctgcggcagagcttagccgatacaacaaagcccagtttaataaatatcatgattgaacctcaggcaacccggaaagcacaagactttcactggctgacacgttctaacatgtag

SEQ ID NO: 173564 - DNA, 2266 bp, Artificial Sequence
  derived and/or modified sequence
aaacgctccagctggccgactcggagacaatggcgagaggcctcagagttcggcttcttacctgctttgcataggcagcaatctcctgctagtcccgcctccctctggcattctggcgcgcgaatggaggagccgagaagagagcgcagttctgattggagaacgcgcgtgtttacattctcacctctcccgggaagtggacgaatttagaccgcctcttccttcccgttgtttaaggcagttggttgccctcctgtccgtcagaggtgcagtaccagaggtggcgtgctgccgatttcgcgtttgccttgctggatgattccgcttgtttgccggctgcgtgagtgcttagagcttttcggtggaagatgccggacagtaacttcgcagagcgcagcgaggagcaggtgtctggtgctaaagtcatcgctcaggccctgaaaacgcaagatgtggagtacatatttggcatcgtaggcatcccagtgaccgaaatcgccattgctgcccagcagctaggcatcaagtacatcgggatgaggaatgagcaagcggcttgttatgctgcctccgcgattggatatctgacaagcaggccaggagtctgccttgttgtttctggcccaggtctcatccatgccttgggcggtatggcaaatgcaaacatgaactgctggcccttgcttgtgattggtggttcctctgaaagaaaccaagaaacaatgggagctttccaggagtttcctcaggttgaagcttgtagattatataccaagttctctgcccgcccaagcagcatagaagctattccttttgttattgaaaaggcagtgagaagcagtatctatggtcgtccaggtgcttgctatgttgacataccagcagattttgtgaaccttcaggtgaatgtgaattctataaagtacatggaacgctgcatgtcacctcctattagcatggcagaaacctctgctgtgtgcacggcggcttctgttattaggaatgccaaacaaccccttcttatcatcgggaaaggtgctgcttacgctcatgcagaagagagtatcaagaaattggtggagcaatataaactgccatttttgcccacccctatggggaagggtgttgtccctgacaaccatccatactgtgtaggtgcagccagatccagggctttgcaatttgctgatgtaattgtgttatttggtgccagactaaattggattttacattttggactgcctccaagatatcagccagatgtgaagtttatccaggttgatatctgtgcagaagaattggggaataatgtaaagcccgctgttactttgctaggaaacatacatgctgtcactaagcagcttttagaggaacttgataaaacaccatggcagtatcctccagagagcaagtggtggaaaactctgagagaaaaaatgaagagcaatgaagctgcatccaaggaactagcttctaaaaaatccctgcctatgaattattacacagtattctaccatgttcaagaacaactacctagagactgtttcgtggtaagtgaaggagcaaatactatggacattggacggactgtgcttcagaactaccttcctcgtcacaggcttgatgctggtactttcggaacaatgggagttggtttgggatttgctattgcagctgccgtggtggctaaagatagaagccctgggcaatggatcatctgtgtggaaggagacagtgcatttgggttttctggcatggaggtagaaaccatctgcaggtacaacttgccaatcatactgttggtagtgaataacaatggaatttaccaaggttttgatacagatacttggaaagaaatgttaaaatttcaagatgctactgcagtggtccctccaatgtgtttgctgccaaattcacattatgagcaagtcatgactgcatttggaggcaaagggtattttgtacaaacaccagaagaactccaaaaatccctgaggcagagcctagcagacacaactaaaccttctcttatcaacatcatgattgagccacaagccacacggaaggcccaggattttcattggctgacccgctctaatatgtaaataaagacgccagttggtggtcttgagttttctctttcttgcaagatgaaattttattttccacagcaaaattactctactgttaaaattgtgcaaaataaaataaacatttaaaatgacattttacagtaaaggaattgattaaaaacagaaaaagttag

SEQ ID NO: 173565 - DNA, 1737 bp, Artificial Sequence
  derived and/or modified sequence
atgcccgacagcaacttcgccgagagaagcgaggagcaggtgagcggcgccaaggtgatcgcccaggccctgaagacccaggacgtggagtacatcttcggcatcgtgggcatccccgtgaccgagatcgccatcgccgcccagcagctgggcatcaagtacatcggcatgagaaacgagcaggccgcctgctacgccgccagcgccatcggctacctgaccagcagacccggcgtgtgcctggtggtgagcggccccggcctgatccacgccctgggcggcatggccaacgccaacatgaactgctggcccctgctggtgatcggcggcagcagcgagagaaaccaggagaccatgggcgccttccaggagttcccccaggtggaggcctgcagactgtacaccaagttcagcgccagacccagcagcatcgaggccatccccttcgtgatcgagaaggccgtgagaagcagcatctacggcagacccggcgcctgctacgtggacatccccgccgacttcgtgaacctgcaggtgaacgtgaacagcatcaagtacatggagagatgcatgagcccccccatcagcatggccgagaccagcgccgtgtgcaccgccgccagcgtgatcagaaacgccaagcagcccctgctgatcatcggcaagggcgccgcctacgcccacgccgaggagagcatcaagaagctggtggagcagtacaagctgcccttcctgcccacccccatgggcaagggcgtggtgcccgacaaccacccctactgcgtgggcgccgccagaagcagagccctgcagttcgccgacgtgatcgtgctgttcggcgccagactgaactggatcctgcacttcggcctgccccccagataccagcccgacgtgaagttcatccaggtggacatctgcgccgaggagctgggcaacaacgtgaagcccgccgtgaccctgctgggcaacatccacgccgtgaccaagcagctgctggaggagctggacaagaccccctggcagtacccccccgagagcaagtggtggaagaccctgagagagaagatgaagagcaacgaggccgccagcaaggagctggccagcaagaagagcctgcccatgaactactacaccgtgttctaccacgtgcaggagcagctgcccagagactgcttcgtggtgagcgagggcgccaacaccatggacatcggcagaaccgtgctgcagaactacctgcccagacacagactggacgccggcaccttcggcaccatgggcgtgggcctgggcttcgccatcgccgccgccgtggtggccaaggacagaagccccggccagtggatcatctgcgtggagggcgacagcgccttcggcttcagcggcatggaggtggagaccatctgcagatacaacctgcccatcatcctgctggtggtgaacaacaacggcatctaccagggcttcgacaccgacacctggaaggagatgctgaagttccaggacgccaccgccgtggtgccccccatgtgcctgctgcccaacagccactacgagcaggtgatgaccgccttcggcggcaagggctacttcgtgcagacccccgaggagctgcagaagagcctgagacagagcctggccgacaccaccaagcccagcctgatcaacatcatgatcgagccccaggccaccagaaaggcccaggacttccactggctgaccagaagcaacatgtag

SEQ ID NO: 173566 - protein, 423 aa, Artificial Sequence
  derived and/or modified sequence
MAGKVKWVTDIEKSVLINNFEKRGWVQVTENEDWNFYWMSVQTIRNVFSVEAGYRLSDDQIVNHFPNHYELTRKDLMVKNIKRYRKELEKEGSPLAEKDENGKYLYLDFVPVTYMLPADYNLFVEEFRKSPSSTWIMKPCGKAQGKGIFLINKLSQIKKWSRDSKTSSFVSQSNKEAYVISLYINNPLLIGGRKFDLRLYVLVSTYRPLRCYMYKLGFCRFCTVKYTPSTSELDNMFVHLTNVAIQKHGEDYNHIHGGKWTVSNLRLYLESTRGKEVTSKLFDEIHWIIVQSLKAVAPVMNNDKHCFECYGYDIIIDDKLKPWLIEVNASPSLTSSTANDRILKYNLINDTLNIAVPNGEIPDCKWNKSPPKEVLGNYEILYDEELAQGDGADRELRSRQGQSLGPRAGRSRDSGRAVLTTWK

SEQ ID NO: 173567 - protein, 394 aa, Artificial Sequence
  derived and/or modified sequence
MAGKVKWVTDIEKSVLINNFEKRGWVQVTENEDWNFYWMSVQTIRNVFSVEAGYRLSDDQIVNHFPNHYELTRKDLMVKNIKRYRKELEKEGSPLAEKDENGKYLYLDFVPVTYMLPADYNLFVEEFRKSPSSTWIMKPCGKAQGKGIFLINKLSQIKKWSRDSKTSSFVSQSNKEAYVISLYINNPLLIGGRKFDLRLYVLVSTYRPLRCYMYKLGFCRFCTVKYTPSTSELDNMFVHLTNVAIQKHGEDYNHIHGGKWTVSNLRLYLESTRGKEVTSKLFDEIHWIIVQSLKAVAVNASPSLTSSTANDRILKYNLINDTLNIAVPNGEIPDCKWNKSPPKEVLGNYEILYDEELAQGDGADRELRSRQGQSLGPRAGRSRDSGRAVLTTWK

SEQ ID NO: 173568 - protein, 59 aa, Artificial Sequence
  derived and/or modified sequence
MAGKVKWVTDIEKSVLINNFEKRGWVQVTENEDWNFYWLLDLPEFRYRSCLNEFPDFRV

SEQ ID NO: 173569 - DNA, 1272 bp, Artificial Sequence
  derived and/or modified sequence
atggccggcaaggtgaagtgggtgaccgacatcgagaagagcgtgctgatcaacaacttcgagaagagaggctgggtgcaggtgaccgagaacgaggactggaacttctactggatgagcgtgcagaccatcagaaacgtgttcagcgtggaggccggctacagactgagcgacgaccagatcgtgaaccacttccccaaccactacgagctgaccagaaaggacctgatggtgaagaacatcaagagatacagaaaggagctggagaaggagggcagccccctggccgagaaggacgagaacggcaagtacctgtacctggacttcgtgcccgtgacctacatgctgcccgccgactacaacctgttcgtggaggagttcagaaagagccccagcagcacctggatcatgaagccctgcggcaaggcccagggcaagggcatcttcctgatcaacaagctgagccagatcaagaagtggagcagagacagcaagaccagcagcttcgtgagccagagcaacaaggaggcctacgtgatcagcctgtacatcaacaaccccctgctgatcggcggcagaaagttcgacctgagactgtacgtgctggtgagcacctacagacccctgagatgctacatgtacaagctgggcttctgcagattctgcaccgtgaagtacacccccagcaccagcgagctggacaacatgttcgtgcacctgaccaacgtggccatccagaagcacggcgaggactacaaccacatccacggcggcaagtggaccgtgagcaacctgagactgtacctggagagcaccagaggcaaggaggtgaccagcaagctgttcgacgagatccactggatcatcgtgcagagcctgaaggccgtggcccccgtgatgaacaacgacaagcactgcttcgagtgctacggctacgacatcatcatcgacgacaagctgaagccctggctgatcgaggtgaacgccagccccagcctgaccagcagcaccgccaacgacagaatcctgaagtacaacctgatcaacgacaccctgaacatcgccgtgcccaacggcgagatccccgactgcaagtggaacaagagcccccccaaggaggtgctgggcaactacgagatcctgtacgacgaggagctggcccagggcgacggcgccgacagagagctgagaagcagacagggccagagcctgggccccagagccggcagaagcagagacagcggcagagccgtgctgaccacctggaagtag

SEQ ID NO: 173570 - DNA, 1185 bp, Artificial Sequence
  derived and/or modified sequence
atggccggcaaggtgaagtgggtgaccgacatcgagaagagcgtgctgatcaacaacttcgagaagagaggctgggtgcaggtgaccgagaacgaggactggaacttctactggatgagcgtgcagaccatcagaaacgtgttcagcgtggaggccggctacagactgagcgacgaccagatcgtgaaccacttccccaaccactacgagctgaccagaaaggacctgatggtgaagaacatcaagagatacagaaaggagctggagaaggagggcagccccctggccgagaaggacgagaacggcaagtacctgtacctggacttcgtgcccgtgacctacatgctgcccgccgactacaacctgttcgtggaggagttcagaaagagccccagcagcacctggatcatgaagccctgcggcaaggcccagggcaagggcatcttcctgatcaacaagctgagccagatcaagaagtggagcagagacagcaagaccagcagcttcgtgagccagagcaacaaggaggcctacgtgatcagcctgtacatcaacaaccccctgctgatcggcggcagaaagttcgacctgagactgtacgtgctggtgagcacctacagacccctgagatgctacatgtacaagctgggcttctgcagattctgcaccgtgaagtacacccccagcaccagcgagctggacaacatgttcgtgcacctgaccaacgtggccatccagaagcacggcgaggactacaaccacatccacggcggcaagtggaccgtgagcaacctgagactgtacctggagagcaccagaggcaaggaggtgaccagcaagctgttcgacgagatccactggatcatcgtgcagagcctgaaggccgtggccgtgaacgccagccccagcctgaccagcagcaccgccaacgacagaatcctgaagtacaacctgatcaacgacaccctgaacatcgccgtgcccaacggcgagatccccgactgcaagtggaacaagagcccccccaaggaggtgctgggcaactacgagatcctgtacgacgaggagctggcccagggcgacggcgccgacagagagctgagaagcagacagggccagagcctgggccccagagccggcagaagcagagacagcggcagagccgtgctgaccacctggaagtag

SEQ ID NO: 173571 - DNA, 180 bp, Artificial Sequence
  derived and/or modified sequence
atggccggcaaggtgaagtgggtgaccgacatcgagaagagcgtgctgatcaacaacttcgagaagagaggctgggtgcaggtgaccgagaacgaggactggaacttctactggctgctggacctgcccgagttcagatacagaagctgcctgaacgagttccccgacttcagagtgtag

SEQ ID NO: 173572 - DNA, 1272 bp, Artificial Sequence
  derived and/or modified sequence
atggctggcaaagtcaaatgggtaaccgatatcgagaaaagcgtgttgatcaataactttgagaagcgcgggtgggtccaagttacggagaacgaggactggaacttttattggatgtctgtacaaactatccggaacgtgttcagcgtagaggctgggtaccggctctccgatgaccaaattgtaaaccacttcccaaaccattatgaactcacccgaaaagatttgatggtcaagaatattaaacggtaccgaaaagagctggaaaaggaagggtccccactagcagagaaggacgagaacggcaaatacctgtatctggattttgtgccagtcacctatatgctgcccgcggattataacttgttcgtggaggaatttagaaagtccccctctagcacttggatcatgaagccctgcggcaaggcgcaggggaaggggatcttcctcataaacaagctgtctcagataaaaaagtggtctcgcgacagtaaaacatctagctttgtaagccagtctaacaaagaagcttacgttatctccctgtacataaacaaccctctcctaataggcggcaggaaattcgatcttcgtctttatgtgctcgtgtctacctacaggccactgcgctgctacatgtataagcttggcttttgtagattctgcacggtgaagtacacaccatccacctctgagcttgacaatatgtttgtgcaccttaccaacgtggcaatacaaaaacacggggaggattacaatcacattcatggtggtaaatggacagtgtcaaacctgcggctgtacttggagtccacacggggcaaggaggtcacaagcaagctcttcgatgaaatccactggataatcgtccagtctctgaaagccgttgctcctgtgatgaacaatgacaagcactgttttgaatgctatggttacgacatcatcattgacgataagttgaagccatggctgatcgaggtcaacgcatctccttctctgacatcaagcaccgccaatgacaggatcctcaaatataatctcatcaacgataccctgaacatcgcggttcctaacggggagatcccagactgcaagtggaacaagtctccgccaaaagaggtcctggggaactatgaaattctgtatgacgaggagctcgcacaaggtgatggagctgatcgcgaactcagaagtagacaagggcaatccttaggaccccgggccggacggtcacgagactccggccgggctgtgctgacaacgtggaaatag

SEQ ID NO: 173573 - DNA, 1185 bp, Artificial Sequence
  derived and/or modified sequence
atggccggcaaggtgaagtgggttaccgatatcgagaagagcgttctgatcaacaattttgaaaagaggggctgggttcaagtcacagaaaacgaagattggaatttctactggatgtcagtacaaactattcggaacgtttttagtgttgaagccggctatcgattatctgacgaccagatcgtgaaccattttccaaaccactatgagttgactcggaaagatctgatggtaaaaaacatcaaacgttacagaaaagagcttgagaaggagggaagccctcttgctgagaaagacgagaatgggaaatatctgtacctggattttgtacctgtgacttacatgctgcctgcggattataatttattcgttgaagaattccggaagtccccgtcatcaacatggataatgaagccttgtgggaaagcccagggaaaaggaattttcctcatcaacaaactgtcccagattaaaaaatggtctcgggatagtaagacttcttcttttgtctcgcagagtaacaaagaggcctacgtcatttcactctatattaataacccattattgatcggggggcgcaaatttgatctgaggctgtatgtactggtcagtacctaccggcctctgagatgctacatgtataagctaggtttctgccgcttttgtaccgtcaaatacactccctcgacgagcgaacttgacaacatgttcgtccatctgacaaacgtggctatccagaaacacggagaagactataatcacattcatggcggaaaatggacagtttccaacttaagactatatctggagagcacacgggggaaagaggttacttccaagctgtttgatgagattcattggatcatagtgcaatcattaaaggccgttgcagttaatgctagccctagcctcacttctagtacagctaatgatcgaatcttaaaatataacttgatcaacgacaccctgaacatcgctgtgcctaacggtgagattcccgactgtaagtggaacaaatcccctcccaaagaagtccttggcaactatgaaatactctacgacgaggaactggcccagggggacggcgctgacagggagctcagatctcgccagggacagtccctcggtccccgggctggccgctctcgcgacagcggcagggcggtgttaacgacgtggaaatag

SEQ ID NO: 173574 - DNA, 180 bp, Artificial Sequence
  derived and/or modified sequence
atggcaggcaaggtgaagtgggtgactgacattgaaaaatcagtgctgatcaataactttgaaaaacgcggctgggtgcaagtgaccgagaatgaggattggaacttctactggctactagacctgccggaatttaggtacaggagctgtctgaacgagttcccagactttcgcgtctag

SEQ ID NO: 173575 - DNA, 1272 bp, Artificial Sequence
  derived and/or modified sequence
atggccggcaaggtgaagtgggtgacagacatcgagaagtctgtgctgatcaacaactttgagaagaggggctgggtgcaggtgacagaaaatgaagactggaacttctactggatgtctgtgcagaccatcagaaatgtgttttctgtggaggccggctaccgcctgagtgatgaccagatcgtgaaccacttccccaaccactatgagctgaccaggaaggacctgatggtgaagaacatcaagcgctacaggaaggagctggagaaggagggcagccccctggccgagaaggatgaaaatggcaagtacctgtacctggactttgtgcctgtgacctacatgctgcctgctgactacaacctgtttgtggaggagttcaggaagagccccagcagcacctggatcatgaagccctgtgggaaggcccagggcaagggcatcttcctgatcaacaagctgagccagatcaagaagtggagccgggacagcaagaccagcagctttgtgtcccagagcaacaaggaggcctacgtgatcagcctgtacatcaacaaccccctgctgattggaggcaggaagtttgacctgcggctgtatgtgctggtgtccacctaccggcccctgcgctgctacatgtacaagctgggcttctgccgcttctgcaccgtgaagtacacccccagcaccagcgagctggacaacatgtttgtgcacctgaccaacgtggccatccagaagcacggggaggactacaaccacatccacggcggcaagtggacagtgagcaacctgcggctgtacctggagagcacccggggcaaggaggtgaccagcaagctgtttgatgagatccactggatcatcgtgcagagcctgaaggctgtggcccctgtgatgaacaatgacaagcactgctttgagtgctacggctatgacatcatcattgatgacaagctgaagccctggctgattgaggtgaatgccagccccagcctgaccagcagcacagccaatgaccgcatcctgaagtacaacctgatcaatgacaccctgaacattgctgtgcccaacggggagatcccagactgcaagtggaacaagagcccccccaaggaggtgctgggcaactatgagatcctgtatgatgaggagctggcccagggagatggagctgaccgggagctgcggagccggcagggccagagcctgggcccccgggccggccgcagccgggacagcggccgggctgtgctgaccacctggaagtag

SEQ ID NO: 173576 - DNA, 1185 bp, Artificial Sequence
  derived and/or modified sequence
atggccggcaaggtgaagtgggtgacagacatcgagaagtctgtgctgatcaacaactttgagaagaggggctgggtgcaggtgacagaaaatgaagactggaacttctactggatgtctgtgcagaccatcagaaatgtgttttctgtggaggccggctaccgcctgagtgatgaccagatcgtgaaccacttccccaaccactatgagctgaccaggaaggacctgatggtgaagaacatcaagcgctacaggaaggagctggagaaggagggcagccccctggccgagaaggatgaaaatggcaagtacctgtacctggactttgtgcctgtgacctacatgctgcctgctgactacaacctgtttgtggaggagttcaggaagagccccagcagcacctggatcatgaagccctgtgggaaggcccagggcaagggcatcttcctgatcaacaagctgagccagatcaagaagtggagccgggacagcaagaccagcagctttgtgtcccagagcaacaaggaggcctacgtgatcagcctgtacatcaacaaccccctgctgattggaggcaggaagtttgacctgcggctgtatgtgctggtgtccacctaccggcccctgcgctgctacatgtacaagctgggcttctgccgcttctgcaccgtgaagtacacccccagcaccagcgagctggacaacatgtttgtgcacctgaccaacgtggccatccagaagcacggggaggactacaaccacatccacggcggcaagtggacagtgagcaacctgcggctgtacctggagagcacccggggcaaggaggtgaccagcaagctgtttgatgagatccactggatcatcgtgcagagcctgaaggctgtggccgtgaatgccagccccagcctgaccagcagcacagccaatgaccgcatcctgaagtacaacctgatcaatgacaccctgaacattgctgtgcccaatggagagatcccagactgcaagtggaacaagagcccccccaaggaggtgctgggcaactatgagatcctgtatgatgaggagctggcccagggagatggagctgaccgggagctgcggagccggcagggccagagcctgggccccagggctggccgcagccgggacagcggccgggctgtgctgaccacctggaagtag

SEQ ID NO: 173577 - DNA, 180 bp, Artificial Sequence
  derived and/or modified sequence
atggccggcaaggtgaagtgggtgacagacatcgagaagtctgtgctgatcaacaactttgagaagaggggctgggtgcaggtgacagaaaatgaagactggaacttctactggctgctggacctgcctgagttccgctaccgcagctgcctgaatgagttcccagacttccgggtgtag

SEQ ID NO: 173578 - DNA, 1272 bp, Artificial Sequence
  derived and/or modified sequence
atggccggcaaggtgaagtgggtgaccgacatcgagaagagcgtgctgataaataattttgagaaacgggggtgggtacaggttaccgagaatgaagactggaatttctactggatgagtgtccagaccatccgaaacgtgttttccgttgaggccgggtatcgactgtccgacgatcaaatagtgaatcacttcccaaaccactatgagctgacccgaaaagacttgatggtgaagaacatcaaaaggtacagaaaagagctcgaaaaagaaggcagccctctggccgagaaagacgaaaacgggaaatatttatacctcgacttcgtaccggtgacctacatgctacctgcggactacaatctgttcgtagaggaatttcggaaaagccctagttctacctggatcatgaagccctgcggtaaagcccaaggtaagggcatctttctgatcaacaaactttctcagatcaagaagtggtcgcgcgattctaagaccagtagtttcgtgagtcaaagcaataaagaggcgtatgtgatttctctttatattaacaaccccctcctcattggcggacgcaagtttgatttgcgtctatatgtgttggtgtctacctatcgcccccttaggtgctatatgtataagctgggattttgcagattttgtactgttaagtatactccgtccacatcagagctggataacatgtttgtacacttaaccaatgtcgcgatacagaagcacggagaggattacaaccacatccacggtggaaagtggacggtgtctaacctgcgcctgtacctcgagtccactcgtggcaaagaggtgacaagtaagctgtttgatgaaatccattggatcatcgtgcaatcactcaaagctgtggcaccagtcatgaataatgataaacactgttttgaatgctacggctacgatatcattatagacgacaaactgaagccctggttgatagaggtcaacgcctcaccatctctgacctcttcaacagctaacgaccgaatccttaagtacaacctcatcaacgatacattgaacattgccgtgcccaatggagaaataccagattgcaagtggaataagtcacctcctaaggaggtactgggaaactacgagatcctgtatgatgaggaactcgcacagggggacggcgccgaccgggagctgagaagcaggcagggacagtccctgggccctagggctgggaggagcagagatagcggcagggcagtcctcacaacgtggaaatag

SEQ ID NO: 173579 - DNA, 1185 bp, Artificial Sequence
  derived and/or modified sequence
atggccggcaaggtgaagtgggtgaccgacatcgagaagagcgtgttaatcaacaactttgagaagaggggctgggtccaagttactgagaatgaggactggaatttctactggatgtctgttcagaccatccggaatgtgttcagtgtggaggctggctaccggctctcagatgaccagatcgtgaaccacttccccaatcattatgaactgacccggaaagacctcatggttaagaacattaaacggtacaggaaggaactcgagaaggagggcagccctcttgcggaaaaagacgagaatggcaagtacctatatctggatttcgtgcccgttacttacatgctaccagccgattataatctgtttgtagaggaattccgcaagtcgccaagttcaacctggataatgaagccgtgcggcaaagcacaggggaaggggattttcttaattaacaaactgagccagatcaagaaatggtcccgagattccaaaaccagttcatttgtaagtcagtccaataaggaggcctacgttatttccctctatataaacaaccccctgctcattggcgggcgtaagttcgacctcagactctatgtactggtctccacatacaggcctctccggtgttacatgtacaagttgggattctgcagattctgcacggtcaagtacacccccagcacaagtgaattagataacatgtttgtgcatcttacaaatgtcgcaatccagaaacacggggaggattacaaccatattcatggtggtaaatggaccgtgagcaacctgaggctttacctggagtctacacggggcaaggaggtgacatcaaagctgttcgacgaaattcactggattatagttcagtcccttaaagcagtggctgtgaatgcgagtccctctctcacttccagtaccgccaacgataggatcctcaagtataatctgattaacgacacattaaacatcgcagtaccaaatggtgaaattcccgactgtaagtggaacaagtcacctccgaaggaagttctgggcaactacgagatcctgtatgatgaggagctagcacaaggagacggcgcagatagggagctccggagccgacagggccagtccctcgggcctagagctgggcgctccagggactcagggcgggcagtccttactacttggaaatag

SEQ ID NO: 173580 - DNA, 180 bp, Artificial Sequence
  derived and/or modified sequence
atggccggcaaggtgaagtgggtgaccgacatcgagaagagcgtgctgatcaacaatttcgagaaacggggttgggtgcaggtgactgaaaacgaggactggaatttctactggctgctggacctcccagagttcagatatcggtcttgccttaatgagtttcctgatttcagggtctag

SEQ ID NO: 173581 - DNA, 1272 bp, Artificial Sequence
  derived and/or modified sequence
atggctggcaaggtgaagtgggtgacagacatcgaaaagtctgtgctgatcaacaacttcgaaaaaagaggttgggttcaggtaaccgagaacgaggactggaacttttactggatgagtgtgcagactattcggaacgtgtttagtgtggaagcgggataccgcctgtcagatgaccagattgtgaatcactttcccaaccattacgagttgaccagaaaagacctgatggttaaaaatattaagcgctatcgaaaagagctggagaaggagggctcccccctggccgagaaagacgaaaatggaaaatatttgtacctggacttcgtgcccgtgacatacatgctgcccgcagactacaacctgtttgtggaggaattccgaaagtcccccagcagtacatggatcatgaagccctgcggaaaggcgcaggggaaggggatatttctgattaacaaattgtcacagataaaaaagtggtcaagggactcgaaaacctccagctttgtctctcagtctaataaggaggcctatgtgattagcttgtacataaacaaccccttgctgatcgggggacggaaattcgaccttcgactgtacgtgcttgtgagcacctataggccactgagatgctatatgtataaactcggattttgtagattctgcacagttaagtatacgccttctacatccgaactggataacatgttcgtgcacctgactaatgtggcaattcagaagcacggcgaggactataaccacatccatggcggaaagtggactgtgtccaatctaagactgtatcttgagtccacccgcggtaaggaggtgacctctaaattgttcgacgagatccattggatcatcgttcagagtctgaaagcagtggccccagtcatgaacaatgataaacactgttttgagtgctatggctacgacattatcattgacgataagctgaaaccatggttaatcgaggttaacgctagtcccagcttgacgtcctcgacagcaaacgatagaatactaaagtataatcttatcaacgacacactcaatatcgccgtgccaaacggagaaattcctgattgtaagtggaacaaatctcccccaaaggaggtgctgggtaactacgaaattctgtacgatgaagagctggcccaaggggatggggctgaccgcgaactccgatccaggcagggccagtccctgggcccacgggctggcagatcacgtgattctggcagagctgtcctgacgacatggaagtag

SEQ ID NO: 173582 - DNA, 1185 bp, Artificial Sequence
  derived and/or modified sequence
atggctggaaaggtcaagtgggtgaccgacattgaaaaatccgtgctgattaacaacttcgaaaagcgcggatgggtgcaagttaccgagaatgaagattggaatttctactggatgtccgtacagacaatcaggaatgtattctcagtggaagccggataccggctgagtgatgaccagatagtgaatcacttccctaaccactacgagctaaccaggaaggacctgatggttaagaatattaagcgatatcggaaggaactggagaaggagggaagcccactggccgagaaagatgagaacggaaagtacttgtatctcgacttcgttccagtgacatatatgctgccggctgattataatttgtttgttgaagagttccgcaaaagcccctccagcacctggatcatgaaaccttgtgggaaggcgcagggaaagggaatttttctgatcaataaactatcccagatcaagaagtggtcacgggactcgaaaacctcttcctttgtgtcacaatctaataaagaggcatacgtgatttcgctgtacatcaataatcctctgctgataggcggtcgcaagttcgacctgagactttacgtcttggtctcaacctatcggccattgaggtgttacatgtacaaactgggcttctgccggttctgcacggtcaaatataccccatccaccagtgagcttgataacatgttcgtacatcttactaatgtggctatccagaagcatggagaggattacaatcatatccacggaggcaaatggaccgtttctaatctgcgactgtacctggaatctactagaggaaaagaagtcaccagcaagctgtttgacgagatccactggataatcgtacagtctctcaaagcagtggccgtaaatgcctcccctagtctgacttcctctacggccaatgaccggattctaaagtacaatctcattaacgacacacttaacatagcggtgcctaatggcgagattcccgactgcaaatggaataaaagcccacccaaagaagtgctaggaaattatgaaattttatacgacgaagagctggctcagggtgatggagctgaccgcgaacttcggtctagacaggggcagtcactcggtccccgagctggccgtagcagggattccggaagggctgtcctgactacgtggaaatag

SEQ ID NO: 173583 - DNA, 180 bp, Artificial Sequence
  derived and/or modified sequence
atggctggtaaagtgaaatgggtgacagacattgagaagagcgttttaatcaataattttgagaagcgaggttgggtgcaagtgaccgaaaacgaggattggaatttttattggttactggacctccctgagttcaggtaccgctcatgcctgaatgagttcccagattttagagtgtag

SEQ ID NO: 173584 - DNA, 1645 bp, Artificial Sequence
  derived and/or modified sequence
agtgcagcgcggggcggggcgggccggtgcgcctggcagtcggctgcgtactcctgcgagcgccggagaggggctggaggcggggcgagggcgcggctcgaggcatccctgcagggcgctcctccgagtccctcggcgctctgagcccacagggaagaaggaggggccggcgtcagtgacgtcagcgagaccgaggtgagcgtgggcgttgccagtggtgctctgtcagtgcctatggattatggcagggaaagtaaaatgggtcactgatatcgagaagtcagtgctgatcaataactttgaaaagagaggatgggtccaagtgacagaaaacgaggactggaatttttactggatgagtgtgcaaaccatccgaaatgtgttcagcgttgaagctggatatcggctctcagatgaccaaatagtcaaccattttccaaaccactatgaactgacccggaaggacctgatggtgaagaacatcaaaagatacaggaaggagctggagaaagaagggagtcctctggcagaaaaagatgaaaatggaaaatacctctatctggactttgttccagtcacctatatgctgcccgctgactacaacctgtttgtagaggagttccggaagagcccgtccagcacctggatcatgaagccttgtggcaaggcccagggaaagggcatcttccttatcaacaagctctcacagatcaaaaagtggtcccgggacagcaagacatcttcgtttgtgtctcaatctaataaggaagcctacgtgatctctctctatattaacaacccgttactaattggcgggaggaagttcgacctgcgcttgtacgttctggtgtccacgtaccgtccactgcgctgttacatgtacaagcttgggttttgccggttctgcacagtgaaatacaccccgagtaccagtgagctggacaacatgttcgttcatctcaccaacgtcgccatccagaaacacggggaggactacaaccacatccatgggggcaagtggacagtgagtaacctgcggctctacctggagagcacccgcggcaaggaggtgaccagcaagctgttcgacgagatccactggatcatcgtgcagtccctgaaggctgtggcgccggtgatgaacaatgacaagcactgctttgaatgctatggctacgacatcatcatcgacgacaagctgaagccctggctgatcgaggtgaatgcgtccccgtctctcacgtccagcactgccaatgaccgaatcctcaagtacaacctgattaatgacaccctcaacatcgccgtcccgaatggtgaaatcccagactgcaaatggaacaagtcgccacctaaggaagtcctcggcaattacgagattctgtatgatgaagaattggcccagggtgacggggctgaccgggagctgagaagccgtcagggtcagtctctggggcccagagcaggccgatcgagagactcggggagagcggtcctcaccacctggaagtgagtcccacctggaccttatcaaaactactcactccacctgggcccctgctgaagccctattttgaaatttcccttttgtagagcttttttcctttcctaagccctgtaaataaacgaaggcacttctttggaa

SEQ ID NO: 173585 - DNA, 1686 bp, Artificial Sequence
  derived and/or modified sequence
agtgcagcgcggggcggggcgggccggtgcgcctggcagtcggctgcgtactcctgcgagcgccggagaggggctggaggcggggcgagggcgcggctcgaggcatccctgcagggcgctcctccgagtccctcggcgctctgagcccacagggaagaaggaggggccggcgtcagtgacgtcagcgagaccgaggtgagcgtgggcgttgccagtggtgctctgtcagtgcctatggattatggcagggaaagtaaaatgggtcactgatatcgagaagtcagtgctgatcaataactttgaaaagagaggatgggtccaagtgacagaaaacgaggactggaatttttactggatgagtgtgcaaaccatccgaaatgtgttcagcgttgaagctggatatcggctctcagatgaccaaatagtcaaccattttccaaaccactatgaactgacccggaaggacctgatggtgaagaacatcaaaagatacaggaaggagctggagaaagaagggagtcctctggcagaaaaagatgaaaatggaaaatacctctatctggactttgttccagtcacctatatgctgcccgctgactacaacctgtttgtagaggagttccggaagagcccgtccagcacctggatcatgaagccttgtggcaaggcccagggaaagggcatcttccttatcaacaagctctcacagatcaaaaagtggtcccgggacagcaagacatcttcgtttgtgtctcaatctaataaggaagcctacgtgatctctctctatattaacaacccgttactaattggcgggaggaagttcgacctgcgcttgtacgttctggtgtccacgtaccgtccactgcgctgttacatgtacaagcttgggttttgccggttctgcacagtgaaatacaccccgagtaccagtgagctggacaacatgttcgttcatctcaccaacgtcgccatccagaaacacggggaggactacaaccacatccatgggggcaagtggacagtgagtaacctgcggctctacctggagagcacccgcggcaaggaggtgaccagcaagctgttcgacgagatccactggatcatcgtgcagtccctgaaggctgtggcggtgaatgcgtccccgtctctcacgtccagcactgccaatgaccgaatcctcaagtacaacctgattaatgacaccctcaacatcgccgtcccgaatggtgaaatcccagactgcaaatggaacaagtcgccacctaaggaagtcctcggcaattacgagattctgtatgatgaagaattggcccagggtgacggggctgaccgggagctgagaagccgtcagggtcagtctctggggcccagagcaggccgatcgagagactcggggagagcggtcctcaccacctggaagtgagtcccacctggaccttatcaaaactactcactccacctgggcccctgctgaagccctattttgaaatttcccttttgtagagcttttttcctttcctaagccctgtaaataaacgaaggcacttctttggaaggttatggagtctgtttgactagtgctaaaggaaacaattcatgcggatgtataaaactcgctcttttttttttaatttttaacctaagcagaattttcatattaaaaactcacttttttgacagaaa

SEQ ID NO: 173586 - DNA, 421 bp, Artificial Sequence
  derived and/or modified sequence
agtgcagcgcggggcggggcgggccggtgcgcctggcagtcggctgcgtactcctgcgagcgccggagaggggctggaggcggggcgagggcgcggctcgaggcatccctgcagggcgctcctccgagtccctcggcgctctgagcccacagggaagaaggaggggccggcgtcagtgacgtcagcgagaccgaggtgagcgtgggcgttgccagtggtgctctgtcagtgcctatggattatggcagggaaagtaaaatgggtcactgatatcgagaagtcagtgctgatcaataactttgaaaagagaggatgggtccaagtgacagaaaacgaggactggaatttttactggctccttgaccttcctgaatttcggtacagatcctgtttaaatgagtttcctgacttcagagtctga

SEQ ID NO: 173587 - protein, 386 aa, Artificial Sequence
  derived and/or modified sequence
MHARGPHGQLSPALPLASSVLMLLMSTLWLVGAGPGLVLAPELLLDPWQVHRLLTHALGHTALPGLLLSLLLLPTVGWQQECHLGTLRFLHASALLALASGLLAVLLAGLGLSSAAGSCGYMPVHLAMLAGEGHRPRRPRGALPPWLSPWLLLALTPLLSSEPPFLQLLCGLLAGLAYAAGAFRWLEPSERRLQVLQEGVLCRTLAGCWPLRLLATPGSLAELPVTHPAGVRPPIPGPPYVASPDLWSHWEDSALPPPSLRPVQPTWEGSSEAGLDWAGASFSPGTPMWAALDEQMLQEGIQASLLDGPAQEPQSAPWLSKSSVSSLRLQQLERMGFPTEQAVVALAATGRVEGAVSLLVGGQVGTETLVTHGKGGPAHSEGPGPP

SEQ ID NO: 173588 - protein, 136 aa, Artificial Sequence
  derived and/or modified sequence
MHARGPHGQLSPALPLASSVLMLLMSTLWLVGAGPGLVLAPELLLDPWQVHRLLTHALGHTALPGLLLSLLLLPTVGWQQECHLGTLRFLHASALLALASGLLAVLLAGLGLSSAAGSCGYMPVHLAMLAGEGHRP

SEQ ID NO: 173589 - protein, 195 aa, Artificial Sequence
  derived and/or modified sequence
MHARGPHGQLSPALPLASSVLMLLMSTLWLVGAGPGLVLAPELLLDPWQVHRLLTHALGHTALPGLLLSLLLLPTVGWQQECHLGTLRFLHASALLALASGLLAVLLAGLGLSSAAGSCGYMPVHLAMLAGEGHRPRRPRGALPPWLSPWLLLALTPLLSSEPPFLQLLCGLLAGLAYAAGAFRWLEPSERRLQV

SEQ ID NO: 173590 - DNA, 411 bp, Artificial Sequence
  derived and/or modified sequence
atgcacgccagaggcccccacggccagctgagccccgccctgcccctggccagcagcgtgctgatgctgctgatgagcaccctgtggctggtgggcgccggccccggcctggtgctggcccccgagctgctgctggacccctggcaggtgcacagactgctgacccacgccctgggccacaccgccctgcccggcctgctgctgagcctgctgctgctgcccaccgtgggctggcagcaggagtgccacctgggcaccctgagattcctgcacgccagcgccctgctggccctggccagcggcctgctggccgtgctgctggccggcctgggcctgagcagcgccgccggcagctgcggctacatgcccgtgcacctggccatgctggccggcgagggccacagaccctag

SEQ ID NO: 173591 - DNA, 588 bp, Artificial Sequence
  derived and/or modified sequence
atgcacgccagaggcccccacggccagctgagccccgccctgcccctggccagcagcgtgctgatgctgctgatgagcaccctgtggctggtgggcgccggccccggcctggtgctggcccccgagctgctgctggacccctggcaggtgcacagactgctgacccacgccctgggccacaccgccctgcccggcctgctgctgagcctgctgctgctgcccaccgtgggctggcagcaggagtgccacctgggcaccctgagattcctgcacgccagcgccctgctggccctggccagcggcctgctggccgtgctgctggccggcctgggcctgagcagcgccgccggcagctgcggctacatgcccgtgcacctggccatgctggccggcgagggccacagacccagaagacccagaggcgccctgcccccctggctgagcccctggctgctgctggccctgacccccctgctgagcagcgagccccccttcctgcagctgctgtgcggcctgctggccggcctggcctacgccgccggcgccttcagatggctggagcccagcgagagaagactgcaggtgtag

SEQ ID NO: 173592 - DNA, 411 bp, Artificial Sequence
  derived and/or modified sequence
atgcacgccagagggccgcacgggcagttgagtccagcacttcccctggcctcctccgttctcatgctgctcatgtcgaccctgtggctggttggcgcagggccaggactggtcctggcgcccgaactgttactggatccctggcaggtgcacaggctcctgacacatgctctaggacataccgccctgccaggtctgctcctgtccctgctgctcctccccactgtgggctggcagcaagagtgtcacctgggcaccttgaggttccttcacgcttccgccctgctggccctggcatcgggtttattggctgtgctgctcgctgggctgggcttgagcagcgctgccggtagttgtggctatatgccggtgcatttagccatgctagctggcgaggggcataggccttag

SEQ ID NO: 173593 - DNA, 588 bp, Artificial Sequence
  derived and/or modified sequence
atgcacgcccgggggcctcacggtcagctgagtcctgccctccctctggcaagttccgtgctcatgctgctgatgtctacactctggttggtaggcgcgggtccagggcttgtactcgccccggaacttctgcttgacccctggcaagtacaccgactgttgactcacgccctggggcataccgccctgcccgggcttctgctgtcgctacttctcctgcccactgttggatggcaacaggaatgtcatctaggaactctgcggtttctgcatgcttctgccctgctggcgctggccagtggtctcctcgccgtcctgctggcgggtctggggctgtcctctgcagccggatcttgcgggtacatgcctgtgcacctggctatgcttgccggcgaagggcatcgaccaagaagacctcggggagcactgccaccttggcttagcccctggttacttctcgccctgacaccactgctttccagcgagcctccattcttgcagctgttgtgcggtctgctggcaggccttgcgtatgccgctggagctttccgttggttggagccctctgagaggagattgcaggtgtag

SEQ ID NO: 173594 - DNA, 411 bp, Artificial Sequence
  derived and/or modified sequence
atgcacgcccggggcccccacggccagctgagccctgccctgcccctggccagctctgtgctgatgctgctgatgagcaccctgtggctggtgggcgccggccctggcctggtgctggcccctgagctgctgctggacccctggcaggtgcaccggctgctgacccacgccctgggccacacagccctgcccggcctgctgctgagcctgctgctgctgcccaccgtgggctggcagcaggagtgccacctgggcaccctgcgcttcctgcacgccagcgccctgctggccctggccagcggcctgctggccgtgctgctggccggcctgggcctgagcagcgctgctggcagctgtggctacatgcctgtgcacctggccatgctggccggggagggccaccggccctag

SEQ ID NO: 173595 - DNA, 588 bp, Artificial Sequence
  derived and/or modified sequence
atgcacgcccggggcccccacggccagctgagccctgccctgcccctggccagctctgtgctgatgctgctgatgagcaccctgtggctggtgggcgccggccctggcctggtgctggcccctgagctgctgctggacccctggcaggtgcaccggctgctgacccacgccctgggccacacagccctgcccggcctgctgctgagcctgctgctgctgcccaccgtgggctggcagcaggagtgccacctgggcaccctgcgcttcctgcacgccagcgccctgctggccctggccagcggcctgctggccgtgctgctggccggcctgggcctgagcagcgctgctggcagctgtggctacatgcctgtgcacctggccatgctggccggggagggccaccggccccggcggcccaggggggccctgcccccctggctgagcccctggctgctgctggccctgacccccctgctgagcagcgagccccccttcctgcagctgctgtgtggcctgctggccggcctggcctatgctgctggggccttccgctggctggagcccagcgagcggcggctgcaggtgtag

SEQ ID NO: 173596 - DNA, 411 bp, Artificial Sequence
  derived and/or modified sequence
atgcacgcccggggcccccacggccagctgagccccgccctgcccctggccagttccgtactcatgctcctaatgagtacgctgtggctggtcggcgccggtccaggcctagtcctggcccccgagctgctgttggacccttggcaagtgcacaggttgctaacccacgcattaggtcatactgccctacctggcctgttactgtctttgctgctccttcccacggtcggctggcagcaggaatgtcatctgggtaccctgaggttcctgcacgcatcagccctgcttgcgctggcctccggcctcttggcagtgctgctggcggggctggggctgagtagcgccgcaggatcatgcgggtacatgccggtacatctggctatgcttgcaggtgaagggcaccgaccttag

SEQ ID NO: 173597 - DNA, 588 bp, Artificial Sequence
  derived and/or modified sequence
atgcacgcccggggcccccacggccagctgagccccgccctgcccctggcctcctctgtcctgatgctcctcatgagcacattgtggttggtgggggccggccctggactggtcctggctcccgaactgctgctggacccatggcaggtgcatcgtctgctgacccacgctcttggtcatactgcactgccaggattactgctgtctctgctgctcttgccgaccgtggggtggcagcaggaatgtcatctgggcaccctcaggttcctacacgcatcggcactgctggctctggcctccggcctcctcgccgtgttattggccggactcggactgtcttcggctgccggctcctgcggatacatgcccgtgcacctcgctatgttggccggggaaggccatcgccctcgccgaccaaggggtgccctgcccccttggttatctccgtggctgctattggccctcactcccctgctgtccagcgaaccgccctttttgcagctcctgtgtggcctgctggccggcttagcatatgccgcaggcgcatttagatggctggagccgagtgagaggagactccaggtgtag

SEQ ID NO: 173598 - DNA, 411 bp, Artificial Sequence
  derived and/or modified sequence
atgcacgcaaggggacctcacggccagctgtcgccggctcttccactggccagtagtgtgttgatgttgctcatgagtacactctggcttgtgggtgctggtccagggctcgtgctggccccagagttgctgctcgacccttggcaggtgcacaggctcctaacgcacgccctgggccacaccgctctgccagggctgctcttgtccctgttattgctgccaacggtgggttggcagcaggagtgtcatcttggcaccttaagattcctccatgcctccgctctgttggcgctggcctccgggttgctcgccgtgctcctggctggactggggctttcctccgcagctggttcatgtgggtatatgcctgtgcacctggccatgctggctggagaaggccaccgcccttag

SEQ ID NO: 173599 - DNA, 588 bp, Artificial Sequence
  derived and/or modified sequence
atgcacgctcgtgggccacatgggcaactttcccccgcacttcccctggcatcgagtgtccttatgctactcatgagcaccctttggctagttggcgcaggtccaggcctggttctggcccctgagcttctattggatccttggcaggtgcaccgtctgctgacccacgccttgggacataccgcgttaccaggcctgctgttgtcacttctcttgctgcccacagtgggttggcagcaggagtgtcatctcggtaccctgcggtttctgcatgcatccgctctgttggctctcgcgagcggactgttggcggtactgctggcagggctggggctgtctagtgctgccggatcctgtggctacatgcctgtacaccttgctatgcttgccggagaggggcaccggccacgccgaccaagaggcgctctgccaccgtggctgtctccctggttgcttttggctctgacgcccctcctgagtagcgagccaccatttctgcagctgctttgtggtctcttggccggtcttgcatatgccgctggggcattcaggtggttagagccgtccgaaagaaggcttcaggtctag

SEQ ID NO: 173600 - DNA, 1794 bp, Artificial Sequence
  derived and/or modified sequence
gggagacggagatcggcgggagggctgggggaagggacccggactagaacaactgctgactaatccgcgggccgcggggaatgggtggcgcgccagccggtcggcaggggtcacgcggccgggtgtgcgcggaatggattcagggttctcgggtcgcgcccgggagctagagtcctgactcccagccggggtccccgaccggcctttcggggttgccgggcgcgctctgcaaaggggaaactgaggcccaaggaaattgagtatctctgcaaagtcaccagctgagttcgaaccagacagatcctgggaccccctactctatccgccaccggaagaatctccgtccttgtctttccattctgccctcccggcttcccagtaagcacacagccccaggaccacccttgaccgtcctcaaccaagcgatgcatgccaggggcccccatggccaactgtccccagcactgcctctggcctcctcagtcctgatgctgctgatgagcaccctgtggctggtgggggccggccccggcctggtcctggccccggagctgttgctggacccctggcaggtgcaccggctgctgacccatgccctgggccacacggccctgccaggcctgctcctgagcctgctgctcctgcccactgtgggctggcagcaggagtgccacctgggcacgctgagattcctgcatgcctcagccctgctcgccctggcttctgggctgctggcagtgctgctggcaggccttgggctgtccagtgcagccggcagctgtggatacatgcctgtccacctggccatgctggctggggagggacaccgccctagacggccccgtggggcactgccaccgtggctgtcgccgtggctgctgcttgccctgaccccactgctcagctctgagccacccttcctgcagctcctttgcggcctccttgccggcctggcctatgcagctggggccttccggtggctggaaccctcagagcgacggctgcaggtgctgcaggagggcgtcttgtgcaggaccttggcggggtgctggcccctgaggctccttgccaccccgggtagcctggcggagctgcctgtcacccatcctgccggagtgaggcctcccatccctggaccgccttatgtggcctcccctgacctctggtcccactgggaagactcagccctgcccccaccaagcctgaggcctgtgcagcccacctgggagggctcctcagaggcaggcctggactgggctggggccagcttctccccagggactccgatgtgggcggccttggatgagcagatgctgcaggagggcatccaggcctcgcttcttgacgggccagcccaggaaccccagagcgcaccatggctgtccaagtcctctgtctcctctctgcggctgcagcagctggagcgcatgggcttccctacggagcaggcggtggtggcactggcagccacaggccgtgtggagggtgccgtgtcactgttggttggaggacaagtgggcactgagaccctggtgacccatggaaagggtgggcctgcccactccgagggtcctgggcctccctagcccaggcagagagtggggcacaggcaggcccttgggtgctaagggctgggctgcatgtgggtagcccgagctcctactctgtctaaagagggccacagtggggagcaggggcacctctggaggcaggagaggccccccagcatgctgccctagtacgtgtttagaataaaaaccagtttgtttttcaacctggacctccttggaggca

SEQ ID NO: 173601 - DNA, 755 bp, Artificial Sequence
  derived and/or modified sequence
ggcccgggccagcggggaagggtccccaaggccggtcggctgggtgggaggcctcgaacgccgtgcctggccccgagaccctatccccggtaacggtcgaggtggagcaggccctttaatcatccctcatccgatatccttgtttctacagaaggggaaactgaggcccaaggaaattgagtatctctgcaaagtcaccagctgagttcgaaccagacagatcctgggaccccctactctatccgccaccggaagaatctccgtccttgtctttccattctgccctcccggcttcccagtaagcacacagccccaggaccacccttgaccgtcctcaaccaagcgatgcatgccaggggcccccatggccaactgtccccagcactgcctctggcctcctcagtcctgatgctgctgatgagcaccctgtggctggtgggggccggccccggcctggtcctggccccggagctgttgctggacccctggcaggtgcaccggctgctgacccatgccctgggccacacggccctgccaggcctgctcctgagcctgctgctcctgcccactgtgggctggcagcaggagtgccacctgggcacgctgagattcctgcatgcctcagccctgctcgccctggcttctgggctgctggcagtgctgctggcaggccttgggctgtccagtgcagccggcagctgtggatacatgcctgtccacctggccatgctggctggggagggacaccgccctag

SEQ ID NO: 173602 - DNA, 900 bp, Artificial Sequence
  derived and/or modified sequence
tcaggagggatgaaccaccgcttactcgttcttcgcgtccgcaactcttgtcccagtcctctctaaagagcgcccgacgtgacactcgggccaaaatagcatctaaggggccagagcggggaaggggaaactgaggcccaaggaaattgagtatctctgcaaagtcaccagctgagttcgaaccagacagatcctgggaccccctactctatccgccaccggaagaatctccgtccttgtctttccattctgccctcccggcttcccagtaagcacacagccccaggaccacccttgaccgtcctcaaccaagcgatgcatgccaggggcccccatggccaactgtccccagcactgcctctggcctcctcagtcctgatgctgctgatgagcaccctgtggctggtgggggccggccccggcctggtcctggccccggagctgttgctggacccctggcaggtgcaccggctgctgacccatgccctgggccacacggccctgccaggcctgctcctgagcctgctgctcctgcccactgtgggctggcagcaggagtgccacctgggcacgctgagattcctgcatgcctcagccctgctcgccctggcttctgggctgctggcagtgctgctggcaggccttgggctgtccagtgcagccggcagctgtggatacatgcctgtccacctggccatgctggctggggagggacaccgccctagacggccccgtggggcactgccaccgtggctgtcgccgtggctgctgcttgccctgaccccactgctcagctctgagccacccttcctgcagctcctttgcggcctccttgccggcctggcctatgcagctggggccttccggtggctggaaccctcagagcgacggctgcaggtg

SEQ ID NO: 173603 - DNA, 1161 bp, Artificial Sequence
  derived and/or modified sequence
atgcacgccagaggcccccacggccagctgagccccgccctgcccctggccagcagcgtgctgatgctgctgatgagcaccctgtggctggtgggcgccggccccggcctggtgctggcccccgagctgctgctggacccctggcaggtgcacagactgctgacccacgccctgggccacaccgccctgcccggcctgctgctgagcctgctgctgctgcccaccgtgggctggcagcaggagtgccacctgggcaccctgagattcctgcacgccagcgccctgctggccctggccagcggcctgctggccgtgctgctggccggcctgggcctgagcagcgccgccggcagctgcggctacatgcccgtgcacctggccatgctggccggcgagggccacagacccagaagacccagaggcgccctgcccccctggctgagcccctggctgctgctggccctgacccccctgctgagcagcgagccccccttcctgcagctgctgtgcggcctgctggccggcctggcctacgccgccggcgccttcagatggctggagcccagcgagagaagactgcaggtgctgcaggagggcgtgctgtgcagaaccctggccggctgctggcccctgagactgctggccacccccggcagcctggccgagctgcccgtgacccaccccgccggcgtgagaccccccatccccggccccccctacgtggccagccccgacctgtggagccactgggaggacagcgccctgcccccccccagcctgagacccgtgcagcccacctgggagggcagcagcgaggccggcctggactgggccggcgccagcttcagccccggcacccccatgtgggccgccctggacgagcagatgctgcaggagggcatccaggccagcctgctggacggccccgcccaggagccccagagcgccccctggctgagcaagagcagcgtgagcagcctgagactgcagcagctggagagaatgggcttccccaccgagcaggccgtggtggccctggccgccaccggcagagtggagggcgccgtgagcctgctggtgggcggccaggtgggcaccgagaccctggtgacccacggcaagggcggccccgcccacagcgagggccccggccccccctag

SEQ ID NO: 173604 - DNA, 1161 bp, Artificial Sequence
  derived and/or modified sequence
atgcacgcacggggtccccatggtcaactgtcaccagccttgcccctcgctagttcagtgctaatgttgttgatgagtaccctgtggctggtaggcgccgggcctggattagtgctcgccccagaactcctgttggacccttggcaagtccataggctgctgacccacgcacttgggcacacagctctcccggggttgctgctgagcctcttgctgctgccaactgttggctggcagcaagaatgtcaccttggcaccctccgattcctgcatgcctctgctctgctcgccttggcctcaggactgctcgctgttctgctggccgggctggggctctcttctgctgccggctcatgcggatatatgccggttcatcttgcaatgctggccggcgaaggtcatcggccaaggcgccctcgaggagcacttcccccatggctgtcaccatggctgctgctggccttaacacctttattgtcctcggagccaccttttctgcagctcctgtgcggccttctggctggcctggcgtacgccgccggggcctttcggtggttggagccatcagaacgcaggcttcaggttttacaggagggtgtcctttgtaggacactggctggctgttggccgctgcgtctgctcgctacaccaggctcactggccgaacttccggtcactcaccctgcgggagtgcggcctcccatccctggacctccatatgtagccagcccagacctctggtcccattgggaagattctgccctcccaccccctagtcttaggcccgttcagccaacttgggaaggtagctcagaagccggcttggactgggcaggagcctcattctctcccggaactccgatgtgggccgccctcgatgagcagatgcttcaggagggcatccaggcctcactgttagacgggcccgcacaggagcctcagagcgccccatggttgagtaagtcatccgtgtccagcctccgcctccaacaactggagcgtatggggtttcccaccgaacaagcggttgtggcacttgcagctactggacgggtagaaggcgctgtctctctgctcgtgggaggacaggtcggcactgaaactctggtcacgcacggcaagggggggcctgctcattccgaaggacccggcccaccgtag

SEQ ID NO: 173605 - DNA, 1161 bp, Artificial Sequence
  derived and/or modified sequence
atgcacgcccggggcccccacggccagctgagccctgccctgcccctggccagctctgtgctgatgctgctgatgagcaccctgtggctggtgggcgccggccctggcctggtgctggcccctgagctgctgctggacccctggcaggtgcaccggctgctgacccacgccctgggccacacagccctgcccggcctgctgctgagcctgctgctgctgcccaccgtgggctggcagcaggagtgccacctgggcaccctgcgcttcctgcacgccagcgccctgctggccctggccagcggcctgctggccgtgctgctggccggcctgggcctgagcagcgctgctggcagctgtggctacatgcctgtgcacctggccatgctggccggggagggccaccggccccggcggcccaggggggccctgcccccctggctgagcccctggctgctgctggccctgacccccctgctgagcagcgagccccccttcctgcagctgctgtgtggcctgctggccggcctggcctatgctgctggggccttccgctggctggagcccagcgagcggcggctgcaggtgctgcaggagggcgtgctgtgcaggaccctggccggctgctggcccctgcggctgctggccaccccaggcagcctggccgagctgcctgtgacccaccctgctggggtgcggccccccatccctggccccccctacgtggccagcccagacctgtggagccactgggaggacagcgccctgcccccacccagcctgcggcctgtgcagcccacctgggagggcagcagcgaggccggcctggactgggccggggccagcttcagccctggcacccccatgtgggccgccctggatgagcagatgctgcaggagggcatccaggccagcctgctggatggccctgcccaggagccccagagcgccccctggctgagcaagagctctgtgagcagcctgcggctgcagcagctggagaggatgggcttccccacagagcaggccgtggtggccctggccgccaccggccgggtggagggcgctgtgtccctgctggtgggcggccaggtgggcacagagaccctggtgacccacggcaagggcggccctgcccacagcgagggccctggccccccatag

SEQ ID NO: 173606 - DNA, 1161 bp, Artificial Sequence
  derived and/or modified sequence
atgcacgcccggggcccccacggccagctgagccccgccctgcccctggccagctctgtgctgatgctgctgatgtccaccctttggctagtaggagctggtcctgggcttgtgctggctcctgagctgctgcttgacccctggcaggttcacagactcttgacgcatgcattgggacataccgccctccctggcctgttgttgagcctgctgctgcttccaactgtgggctggcaacaagaatgccatctcggaacgctgcgattccttcatgccagcgcgttactagctctggccagtggccttttggccgttttgctggccggactcgggctctcatcagctgcgggctcatgtggctacatgccggtgcatcttgccatgctggccggagagggacatcggcccaggaggcccaggggagccctgcctccctggctgagcccttggttactactggcccttacccctctgttatcttcagaacccccctttctgcagttattgtgtgggctccttgcagggctggcctacgcagctggggccttcagatggctggagccttctgaacgccgtctgcaagtcctgcaagaaggcgtcttgtgcaggactcttgcaggttgctggccattgagattgttggcgacgcccgggtcgctcgccgaactacccgttacccatccggcgggagtgagaccaccaataccagggcccccttatgttgcatcccctgacttgtggagtcactgggaggactctgcactgccacccccatctctaagacccgtacagccaacatgggaaggaagcagtgaagcaggtcttgattgggccggcgcttcgttcagcccaggaacccctatgtgggcggcgctggatgaacaaatgctccaagaagggatacaggcaagtctgctggatggtcccgcgcaggagccacagagcgctccctggctctctaaatctagtgtttctagcctccgcttgcagcaactggagcgaatgggatttccaactgagcaggcagtggtggctttggctgccaccggcagagtggaaggcgcagtgtctctcctggttggcgggcaggtgggaacagaaacgctggtcactcatggtaagggcggccccgcacattctgaaggccctgggcctccttag

SEQ ID NO: 173607 - DNA, 1161 bp, Artificial Sequence
  derived and/or modified sequence
atgcatgcgaggggccctcacggacagctgagccccgcactgcccctggcatctagtgtgcttatgctcctcatgagtacactttggctggtcggcgctggacccggtctggtgttagccccagaactgttactggatccatggcaggtgcatcgcctactgacgcatgctctagggcatactgccctacctggattactcctctcgcttctactgctgcctaccgttggatggcagcaggaatgccaccttggcactctgagatttttgcacgccagcgcactgctggcactggcgtctggactgctagccgttctgctcgctggccttgggctgagctcagctgctggatcatgcggatatatgcctgttcacctggctatgcttgcaggagaggggcatcggcctcgaagaccacgtggggctctccccccatggctgagcccatggctgctcctcgcgctcactcctttgttatcctcagagcctccattcctgcagctactgtgtgggctgttagccggacttgcctacgcggcaggagctttcagatggctggaaccgagcgaaaggcggctgcaggtcctgcaagaaggcgtcttatgtagaaccctggcaggctgttggcctttgagactgctggcgacaccaggatcactcgctgagcttcctgtaactcacccggctggcgtaagacccccaatccccggacccccatatgtggcatctcccgatctctggtctcactgggaagattcagcgttgcctccgccttccctcaggcctgtgcaacctacttgggagggctccagcgaggctggcctggactgggcaggggcatcgtttagtcccggaacccctatgtgggctgccttggacgaacagatgctgcaagaaggcattcaggcatctctgctggacggcccagcccaagaaccccaaagcgcaccatggctgagcaaaagtagtgtcagcagcctgcgcttgcagcagctggaacgcatgggctttccaacagaacaggctgtggtcgccttggccgctacaggtcgagtggagggagccgtgtctcttcttgtcggcggacaggtcggtactgaaacccttgtgacccacggcaaggggggaccagcccacagtgagggtcctggcccaccctag

SEQ ID NO: 173608 - DNA, 1161 bp, Artificial Sequence
  derived and/or modified sequence
atgggcaaggactactacaagatcctgggcatccccagcggcgccaacgaggacgagatcaagaaggcctacagaaagatggccctgaagtaccaccccgacaagaacaaggagcccaacgccgaggagaagttcaaggagatcgccgaggcctacgacgtgctgagcgaccccaagaagagaggcctgtacgaccagtacggcgaggagggcctgaagaccggcggcggcaccagcggcggcagcagcggcagcttccactacaccttccacggcgacccccacgccaccttcgccagcttcttcggcggcagcaaccccttcgacatcttcttcgccagcagcagaagcaccagacccttcagcggcttcgaccccgacgacatggacgtggacgaggacgaggaccccttcggcgccttcggcagattcggcttcaacggcctgagcagaggccccagaagagcccccgagcccctgtaccccagaagaaaggtgcaggacccccccgtggtgcacgagctgagagtgagcctggaggagatctaccacggcagcaccaagagaatgaagatcaccagaagaagactgaaccccgacggcagaaccgtgagaaccgaggacaagatcctgcacatcgtgatcaagagaggctggaaggagggcaccaagatcaccttccccaaggagggcgacgccacccccgacaacatccccgccgacatcgtgttcgtgctgaaggacaagccccacgcccacttcagaagagacggcaccaacgtgctgtacagcgccctgatcagcctgaaggaggccctgtgcggctgcaccgtgaacatccccaccatcgacggcagagtgatccccctgccctgcaacgacgtgatcaagcccggcaccgtgaagagactgagaggcgagggcctgcccttccccaaggtgcccacccagagaggcgacctgatcgtggagttcaaggtgagattccccgacagactgaccccccagaccagacagatcctgaagcagcagtacccccagcacagcctgcacagcatgtgcacccagctggacgtgcactggaccctggccaccttcagcaagatgcagaagaaggccaccggcttccaggagaacgtgcccgtgcccgaccccttctag

SEQ ID NO: 173609 - DNA, 468 bp, Artificial Sequence
  derived and/or modified sequence
atgggcaaggactactacaagatcctgggcatccccagcggcgccaacgaggacgagatcaagaaggcctacagaaagatggccctgaagtaccaccccgacaagaacaaggagcccaacgccgaggagaagttcaaggagatcgccgaggcctacgacgtgctgagcgaccccaagaagagaggcctgtacgaccagtacggcgaggagggcctgaagaccggcggcggcaccagcggcggcagcagcggcagcttccactacaccttccacggcgacccccacgccaccttcgccagcttcttcggcggcagcaaccccttcgacatcttcttcgccagcagcagaagcaccagacccttcagcggcttcgaccccgacgacatggacgtggacgaggacgaggaccccttcggcgccttcggcagattcggcttcaacggcctgagcagaggccccagaagatag

SEQ ID NO: 173610 - DNA, 1047 bp, Artificial Sequence
  derived and/or modified sequence
atgggcaaagactattacaaaatacttggtatccccagcggcgcgaatgaagacgaaattaaaaaagcttacaggaaaatggcgctgaagtatcaccccgacaagaacaaggaacccaatgccgaagagaaatttaaggagattgctgaggcttacgatgttctctccgaccccaagaaaaggggcctgtatgaccaatatggtgaggaagggctgaaaaccggtggaggtacatccggcggatcttctggaagcttccattacactttccatggggatccgcacgctacgtttgcctccttttttggtggctctaacccgttcgatatcttttttgcttcttcacgctctaccaggcccttttctggtttcgacccagatgatatggacgtcgacgaggatgaagatccttttggcgcttttggtcgctttggatttaatggactgagccgcggccctcgacgcgctccggaacccctgtacccccgcagaaaagttcaggatcctcctgtcgtacacgaactgagagtgtcgctggaagagatctaccatggatccactaagcggatgaaaatcactcggcgccggttgaatccagacggaagaactgtgcgcaccgaagacaaaatcctacacatcgttatcaagagaggttggaaggaagggaccaagataacttttcccaaggaaggagacgctaccccagataacattcccgccgatattgtcttcgtcctcaaagataaaccacacgcacatttccgcagagacgggaccaacgtgctgtactctgccctgatctcactcaaagaggccctctgtggatgcactgtgaacatcccaactattgatggtcgagtgataccactcccttgcaacgatgtcatcaagcctggcactgtaaaaagacttagaggcgagggcctgccttttccaaaagtccctacacaacgcggggacctcatagtagagtttaaagtgcgctttccagatcggctcaccccacagaccaggcagatactgaagcagcatttaccttgtagctag

SEQ ID NO: 173611 - DNA, 1161 bp, Artificial Sequence
  derived and/or modified sequence
atggggaaagactactacaaaattctggggatccccagcggcgccaatgaagacgaaataaagaaagcctatcggaaaatggctcttaaatatcaccctgacaaaaacaaagaaccaaacgcagaggaaaaattcaaggaaatcgcagaagcctatgacgtcttgagtgatcccaagaaaaggggattatacgaccagtacggtgaagagggtctgaaaaccggaggcggaacttccgggggaagcagtggtagctttcattacactttccacggtgatccccacgctacctttgctagttttttcggaggaagcaaccccttcgatatcttttttgctagctctcgtagcaccagaccattctctggattcgacccagatgacatggacgtggacgaggatgaggatccctttggagcctttggaagattcgggttcaacggtctttcgagagggccacggcgcgcaccagaacccctataccctagacgcaaggtgcaggatccaccagtggttcacgaactccgtgtctcacttgaggagatctaccacggttcaactaagaggatgaagatcactcgccggaggttgaacccagatgggagaactgtgagaaccgaagacaaaatacttcacattgtgattaagcgaggctggaaggaagggaccaaaataacgtttccaaaggaaggagatgccactccagataatatccccgccgatatcgtattcgtgctaaaggataaaccccacgcccatttcagacgggacggcaccaacgtactgtacagcgccctgatatctctgaaggaagcactgtgtggctgtacggtcaatatccccacaatcgacggacgggtgatacccctgccttgcaacgacgtgattaagcctggcaccgtgaagaggctacgtggagaaggtctgcctttccccaaggtacccactcaacgcggagacctaatcgtcgagttcaaagtccgctttccggaccggcttacccctcagacccggcagatcctcaaacagcaatacccacaacatagcctgcacagcatgtgcacacagttagatgtccattggactctggccacattcagtaaaatgcagaagaaggcaaccgggtttcaggagaacgtgccagttcctgatccgttctag

SEQ ID NO: 173612 - DNA, 468 bp, Artificial Sequence
  derived and/or modified sequence
atgggcaaagattactacaaaattctcggcatccctagcggagcaaatgaggacgagatcaaaaaagcttatagaaagatggccctgaaataccaccccgacaagaataaggagccgaatgcggaagaaaaattcaaagagattgccgaggcttatgacgtgctgagtgaccctaagaagagagggctttacgaccagtatggggaggagggtctcaagacgggtggcggcaccagcgggggcagttccggcagttttcattataccttccatggcgatccccacgcaacctttgctagtttctttggtggctccaacccttttgacatcttcttcgctagttcccggtccaccagaccgttcagtggctttgacccggacgatatggatgtggacgaggatgaagaccccttcggtgcctttggacgctttggctttaatgggttgagtcgcgggccacgccggtag

SEQ ID NO: 173613 - DNA, 1047 bp, Artificial Sequence
  derived and/or modified sequence
atgggcaaagactactataaaattctgggtatcccttctggtgctaatgaagacgaaattaagaaggcctacaggaaaatggctctcaagtaccacccagacaagaacaaggagcctaacgctgaggagaaatttaaggagatagccgaggcctacgatgtgcttagtgaccccaaaaagaggggtttatacgatcaatatggcgaggagggcttgaaaaccgggggcgggacttcagggggatccagcggatcctttcactacacttttcacggagatcctcacgcaacctttgcgtcgtttttcggaggtagcaatccctttgacatttttttcgcatcctctcgtagcacaaggccatttagtggattcgaccccgatgatatggatgtggacgaggacgaggatccctttggggcttttggccgattcggtttcaatggtctgtcccgggggccgagacgcgctcctgagccactctatccccggcgcaaggtgcaggacccacctgtagtgcatgaattacgggtgtctcttgaggagatctaccacgggagcaccaagagaatgaaaattactcgaagaagattgaatccggatggtcggactgttcgaacagaggacaaaattctgcacattgtaataaagcggggatggaaagaaggaaccaagattacattcccaaaagagggagatgcgaccccggacaacattcccgcagatatagtgttcgtccttaaagataagccccacgcccacttcaggcgtgacggcacaaatgtactgtacagcgccctgatctcattgaaggaggcactgtgtggctgtaccgttaacatcccaaccatcgacggaagggttatacccctaccatgtaacgacgtaatcaagcctggtaccgtgaagcgactacggggtgaaggccttcccttccctaaagtgccgacccagagaggtgacttgattgtggaattcaaggttcggttccctgatcgacttacccctcaaacccgacagattcttaagcaacacctgccgtgctcttag

SEQ ID NO: 173614 - DNA, 1047 bp, Artificial Sequence
  derived and/or modified sequence
atgggcaaagattactacaagattctgggcatcccatcaggcgccaacgaagatgaaatcaaaaaagcttatcggaagatggccctaaagtaccatccagataaaaataaagagccaaacgccgaagagaaatttaaggaaatcgcggaagcctatgatgtcctgagtgatccaaaaaaacgtgggctgtatgaccagtacggcgaagagggtttgaagaccggggggggcacatcagggggttcttctggttcgttccactacacctttcacggggatccccacgcaacattcgcctcttttttcggcggctccaatcccttcgatatcttttttgcctcatcacgctccacgcgtcccttcagtgggtttgatcctgacgatatggacgtagatgaggacgaggatcctttcggagcattcggcagatttggttttaatggactgtcccgaggtccccgtcgtgccccggagcctttatacccgaggaggaaagtgcaggacccacctgtcgtccacgaactaagagtctccctcgaagagatctatcacgggagcacaaagcgcatgaagatcactcgcaggcggctgaaccctgacgggaggacggttcgaacggaagataaaattcttcacatcgtaattaagagaggatggaaagagggcacgaaaataacctttcccaaggagggcgatgcaactccagacaatatacctgctgacattgtcttcgtgctgaaggataaaccgcacgctcattttcggagagacggcaccaatgtcctatacagcgccctaatctctctgaaggaagctttatgtggctgtaccgtaaacatccctacaatagacggtagggtaatcccattaccgtgtaatgatgtcatcaaacccggtacagtgaagagattgaggggggaaggccttcctttccccaaagtccccacacaacgcggcgatctgatcgtggagttcaaggtgcggtttcctgaccgacttacgccccagacccggcagatcctcaaacaacatctgccatgctcctag

SEQ ID NO: 173615 - DNA, 1047 bp, Artificial Sequence
  derived and/or modified sequence
atgggcaaggactactacaagatcctgggcatccccagcggggccaatgaagatgagatcaagaaggcctacaggaagatggccctgaagtaccacccagacaagaacaaggagcccaatgctgaggagaagttcaaggagattgctgaggcctatgatgtgctgagtgaccccaagaagaggggcctgtatgaccagtatggagaggagggcctgaagacaggaggcggcaccagcggcggcagcagcggcagcttccactacaccttccatggagacccccacgccacctttgccagcttcttcggcggcagcaacccctttgacatcttctttgccagcagccgcagcacccggcccttcagcggctttgatcctgatgacatggatgtggatgaagatgaggacccctttggagccttcggccgcttcggcttcaacggcctgagccggggcccccggcgggcccctgagcccctgtaccccaggaggaaggtgcaggacccccctgtggtgcatgagctgcgggtgtccctggaggagatctaccacggcagcaccaagaggatgaagatcacccggcggcggctgaacccagatggccgcacagtgaggacagaggacaagatcctgcacatcgtcatcaagaggggctggaaggagggcaccaagatcaccttccccaaggagggagatgccaccccagacaacatcccagctgacatcgtgtttgtgctgaaggacaagccccacgcccacttcagaagagatggcaccaacgtgctgtacagcgccctgatcagcctgaaggaggccctgtgtggctgcaccgtgaacatccccaccattgatggccgggtcatccccctgccctgcaatgatgtgatcaagccaggcaccgtgaagaggctgcggggggagggcctgcccttccccaaggtgcccacccagagaggagacctgattgtggagttcaaggtgcgcttcccagaccggctgaccccccagacccggcagatcctgaagcagcacctgccctgcagctag

SEQ ID NO: 173616 - DNA, 1161 bp, Artificial Sequence
  derived and/or modified sequence
atgggcaaggactactacaagatcctgggcatccccagcggggccaatgaagatgagatcaagaaggcctacaggaagatggccctgaagtaccacccagacaagaacaaggagcccaatgctgaggagaagttcaaggagattgctgaggcctatgatgtgctgagtgaccccaagaagaggggcctgtatgaccagtatggagaggagggcctgaagacaggaggcggcaccagcggcggcagcagcggcagcttccactacaccttccatggagacccccacgccacctttgccagcttcttcggcggcagcaacccctttgacatcttctttgccagcagccgcagcacccggcccttcagcggctttgatcctgatgacatggatgtggatgaagatgaggacccctttggagccttcggccgcttcggcttcaacggcctgagccggggcccccggcgggcccctgagcccctgtaccccaggaggaaggtgcaggacccccctgtggtgcatgagctgcgggtgtccctggaggagatctaccacggcagcaccaagaggatgaagatcacccggcggcggctgaacccagatggccgcacagtgaggacagaggacaagatcctgcacatcgtcatcaagaggggctggaaggagggcaccaagatcaccttccccaaggagggagatgccaccccagacaacatcccagctgacatcgtgtttgtgctgaaggacaagccccacgcccacttcagaagagatggcaccaacgtgctgtacagcgccctgatcagcctgaaggaggccctgtgtggctgcaccgtgaacatccccaccattgatggccgggtcatccccctgccctgcaatgatgtgatcaagccaggcaccgtgaagaggctgcggggggagggcctgcccttccccaaggtgcccacccagagaggagacctgattgtggagttcaaggtgcgcttcccagaccggctgaccccccagacccggcagatcctgaagcagcagtacccccagcacagcctgcacagcatgtgcacccagctggatgtgcactggaccctggccaccttcagcaagatgcagaagaaggccaccggcttccaggagaatgtgcctgtgcctgaccccttctag

SEQ ID NO: 173617 - DNA, 468 bp, Artificial Sequence
  derived and/or modified sequence
atgggcaaggactactacaagatcctgggcatccccagcggggccaatgaagatgagatcaagaaggcctacaggaagatggccctgaagtaccacccagacaagaacaaggagcccaatgctgaggagaagttcaaggagattgctgaggcctatgatgtgctgagtgaccccaagaagaggggcctgtatgaccagtatggagaggagggcctgaagacaggaggcggcaccagcggcggcagcagcggcagcttccactacaccttccatggagacccccacgccacctttgccagcttcttcggcggcagcaacccctttgacatcttctttgccagcagccgcagcacccggcccttcagcggctttgatcctgatgacatggatgtggatgaagatgaggacccctttggagccttcggccgcttcggcttcaacggcctgagccggggccccaggaggtag

SEQ ID NO: 173618 - DNA, 1047 bp, Artificial Sequence
  derived and/or modified sequence
atgggcaaggactactacaagatcctgggcatccccagcggcgccaatgaggacgaaatcaagaaggcctaccggaagatggcgttgaagtaccatcccgataaaaacaaagaacccaatgcggaggaaaaatttaaggaaattgctgaggcctacgatgttctgagtgatcctaagaaacggggactgtatgatcagtacggtgaggaggggttaaagaccggtggggggacttcaggcggcagctccggatcctttcattacactttccacggggatccccacgcaacatttgcctctttttttggaggatccaatcccttcgatatctttttcgcatcatccaggagcaccaggccgttttccggctttgaccccgatgacatggatgttgatgaagacgaagatcctttcggagcatttggacgcttcgggtttaacgggctgagccggggccctcgcagggccccagagccactttatccccggcgcaaagtgcaagacccccccgttgttcacgagctgcgtgtcagtcttgaagaaatctatcacggatctacaaagagaatgaagatcactagacgaagattaaatcccgatggaagaactgtgcggactgaggacaagatactgcacatcgttatcaagcgtgggtggaaggagggcaccaagatcacatttccaaaagagggcgacgccacaccggataacatccccgccgatatcgtattcgtgctaaaggacaagcctcatgctcatttccggagagacggaactaacgtactgtactcagcattgatatctttgaaagaagccctttgcggctgcactgtgaatatccccaccatcgatgggagagtaatcccgctcccatgtaatgacgtcatcaaaccggggacagtcaaaaggttgcgaggcgagggactgcccttccccaaagtgcccacccaaaggggggatctgatcgttgaattcaaggttcgcttcccagaccggctcaccccacagaccaggcagatcctaaaacagcatctcccctgttcctag

SEQ ID NO: 173619 - DNA, 1161 bp, Artificial Sequence
  derived and/or modified sequence
atgggcaaggactactacaagatcctgggcatccccagcggcgccaatgaggacgagattaagaaagcttaccgaaagatggcactaaagtaccaccccgataagaataaggagcccaatgccgaggaaaagttcaaggagattgctgaagcgtacgacgtactctccgatccaaaaaaacgggggctttacgatcagtacggcgaagagggccttaagaccggcggcggaacatccggcggcagttccggttccttccactacacctttcacggagatccacatgcaacattcgcttccttcttcgggggaagcaatcctttcgatatcttctttgcctcgtctaggtctacaagacctttctccggtttcgacccggatgacatggatgtggatgaagacgaagaccccttcggtgcatttgggagattcggctttaacgggcttagcagagggcccaggagggcccccgaaccattgtatccacgtcgaaaggttcaggacccccccgttgtgcacgaactgcgggtaagccttgaggagatctatcacggcagcactaagagaatgaagataacgaggaggcggctgaaccctgatggtcgcacggtcagaaccgaggacaaaatcctgcacattgttattaagcgggggtggaaagaaggaaccaaaatcacctttcctaaggaaggggacgcgactcctgataacattccagccgatatcgtgtttgttctcaaagacaaaccgcacgctcactttcggagagatggaaccaacgtgctctattccgctctaattagtctgaaagaggctctctgcggctgcactgttaatattccaaccatagacggccgtgttattccactcccctgcaacgatgtgatcaagcctgggacggtcaagcgcctgcggggagaggggcttccctttcctaaggtgcctactcaacgcggagatctgatcgttgaatttaaggtgcggtttcctgataggttgacaccacaaacacggcagatcctaaaacaacagtatccacaacacagtcttcactccatgtgtacccagctcgacgtacattggactctggccaccttcagcaagatgcagaaaaaggcgaccgggttccaagaaaacgtacctgttcctgacccattctag

SEQ ID NO: 173620 - DNA, 468 bp, Artificial Sequence
  derived and/or modified sequence
atgggcaaggactactacaagatcctgggcatccccagcggcgccaacgaagatgagattaagaaggcatacaggaagatggcactcaagtaccaccccgataagaataaagagccaaacgcagaggagaaatttaaggaaatcgccgaggcctacgatgttctctccgatccgaaaaaacgaggtctgtacgatcaatatggggaagaaggacttaaaacgggcggggggacctctggcggctctagtgggtctttccattacacctttcacggcgacccacacgcaacgttcgcctcttttttcggagggagcaatcccttcgacattttctttgcttcaagccggagcactagaccattttcgggttttgatccagacgatatggatgtcgatgaggacgaagatccatttggggccttcggcagatttggttttaacggactttctcgcggaccacggagatag

SEQ ID NO: 173621 - DNA, 1047 bp, Artificial Sequence
  derived and/or modified sequence
atgggcaaggactactacaagatcctgggcatccccagcggcgccaatgaagatgaaatcaaaaaagcctatcgcaagatggccctgaagtaccatccggataagaataaagagccaaacgccgaggaaaaatttaaggagatcgcggaagcatatgacgttctgtcggatccaaaaaagagaggcctctatgaccagtacggcgaggaagggttgaaaacaggaggcgggacctccggcggctcctcaggctcattccactacaccttccatggcgaccctcacgccacattcgccagcttttttgggggctccaatccctttgacatcttcttcgctagttctcgaagcaccaggccgttcagtgggtttgatcccgacgatatggacgttgatgaagatgaggatcccttcggtgccttcgggaggttcggttttaacggcctctcccgggggcctagacgggctcccgaaccactttacccccgccgtaaggtacaggatccacctgtcgtgcacgagctccgcgtaagcctggaggagatctatcatggatctacgaaacgcatgaagatcactcgcagacgcttgaaccctgacggacgtacagtacgtaccgaggataagattttgcacatcgtcatcaaacggggatggaaggaggggaccaaaatcaccttcccgaaggaaggggatgcgacccctgacaacatacctgcggatatcgtatttgtgcttaaagataagccccacgcccatttcaggcgcgatggcacaaatgtgctttattctgccctcatctccttaaaggaagccttgtgcgggtgcacagtgaacatccctaccattgacggccgtgtgattcctctcccctgcaatgatgtgatcaagccagggaccgtgaaaaggctcaggggggagggcctaccattccccaaagtgccaacgcaaaggggcgacctaatcgtggagttcaaggtgaggttcccagatcggctcacgccccagaccagacagatactcaagcagcatctaccttgctcatag

SEQ ID NO: 173622 - DNA, 1047 bp, Artificial Sequence
  derived and/or modified sequence
atgggcaaggactactacaagatcctgggcatccccagcggcgccaacgaggacgagattaagaaggcctaccgcaaaatggcactgaaataccaccccgataaaaataaggagccaaatgctgaagaaaaatttaaagaaatagcagaagcctatgatgtgttgagtgacccgaagaagaggggtctgtatgaccagtacggcgaggagggtctaaagactggtggaggaactagcggaggaagctctggctcgttccactacacatttcacggcgatcctcacgcaacgtttgcatcatttttcggaggcagtaacccctttgacatcttttttgccagcagccggagtacccggcctttttcagggttcgaccctgatgatatggatgtggatgaggacgaggatcctttcggcgcgttcgggcgatttggctttaacggtctaagccgcgggcccagaagagctcctgagccgctgtaccctagacgtaaggtgcaggacccccctgttgtacacgaactgagagtgtcattggaagaaatatatcatggctctacaaagcgcatgaaaattactaggaggaggctgaatccagacggccgtaccgtgcgaactgaggataagattctgcacattgtaattaagcggggttggaaggaaggtaccaagatcactttcccgaaggagggcgatgccacaccggacaacatccctgccgacatcgtgtttgtgcttaaagataaaccacatgcacattttcggagagatggcactaatgtgctgtacagtgctttgatctccctaaaagaggcattgtgcgggtgtacagtgaacattcccacgatcgatggaagagtgattccgttgccctgcaacgatgtgataaagcccgggactgtaaaacgcctgcggggagaaggtctgcctttccccaaggtgcccacccagcggggcgatctcatcgtggagtttaaagtccgctttccggatagactgactcctcagactcgacagattttgaagcagcacctgccatgcagttag

SEQ ID NO: 173623 - DNA, 1047 bp, Artificial Sequence
  derived and/or modified sequence
atgggcaaagactactataaaatcctgggaataccaagcggggctaatgaagatgaaattaaaaaagcgtataggaaaatggccctgaaatatcaccccgacaagaataaagaaccgaacgccgaggagaaatttaaggagattgcggaagcttatgatgttctgtcagatcccaagaaacggggattgtatgatcagtacggagaggagggcctgaagacaggaggcggtacgtctggcggttcaagcgggtctttccactacacttttcatggagatcctcatgcaacatttgcaagtttttttgggggatccaatccattcgacatttttttcgcgtcatcccggtctacacgccctttctccggatttgaccctgacgatatggatgtcgacgaggacgaagatccctttggtgcctttggtagattcggctttaacggactgtcgaggggtccacgacgcgctccagagcctctttatcccagacgcaaagttcaggaccctccggtggtgcacgagctgcgagtgagcctcgaagaaatttatcacggctcaacaaaacgcatgaagattactcgcaggcggcttaacccagatggtcgtaccgtgagaaccgaagacaagattttgcatatcgtaattaaacggggttggaaggaagggacaaaaatcacctttccgaaagaaggcgacgctacccctgacaacatcccagccgacatagtgttcgttctgaaagataaaccacatgcacactttaggcgggatgggaccaatgtactgtatagcgccctgataagtctgaaagaggccctgtgtgggtgtacagtaaatattcccaccatcgatggtagggtcattcctctcccctgtaatgatgtcataaagccaggaacagtgaagaggctgagaggggaaggcttgcccttccccaaggttccgactcagcggggagatttgatcgttgaattcaaagtcagattcccagaccgcctgacaccacagactcggcaaatcctgaagcagcatctgccatgcagctag

SEQ ID NO: 173624 - DNA, 1161 bp, Artificial Sequence
  derived and/or modified sequence
atgggaaaggactattataaaatcctcggcatccccagcggcgcaaatgaagacgagataaagaaggcatatagaaagatggccctgaagtatcaccctgataagaataaggaacccaacgcagaggagaaatttaaagaaatcgctgaagcctacgacgtgttgtcagatccgaagaaacgcggactctacgatcagtatggcgaagaggggctcaagaccggaggtggtacctccggaggctcctcaggctcgttccactatacattccacggcgatccccacgcgacattcgccagcttttttggcggatctaacccttttgatatcttttttgcctcctcccgaagcacccggccattctctgggttcgaccctgatgatatggatgtggacgaggatgaagacccattcggagcgttcggcagatttggattcaatggacttagtcgcggacctcggagagctcccgagcctctctatccacgtcgaaaggtccaagacccaccagtggtgcatgagttgagggtgtctctggaggaaatctaccatgggtctacaaaacgaatgaagataacgagaagacggttgaatcccgacgggagaaccgttaggaccgaagataagatcctgcacattgtcataaagagaggttggaaggagggtaccaagattacttttccgaaggaaggagatgccaccccggataacattccagccgatatcgttttcgttcttaaagacaagcctcacgctcatttccggagagatggaaccaatgtattgtattctgcactgatctccctgaaagaggccctctgcggctgcaccgtgaacatccctactatcgatgggagggtgatcccacttccttgcaacgacgtgataaagcccggaacggttaagcgccttcggggtgagggactgcctttccctaaagttccgacccagcgcggagacctcatcgtggagtttaaggtacggtttccggaccgattgaccccacagactcgacaaatcttaaaacagcagtacccacaacacagtcttcactcgatgtgtacacagctggacgtgcactggactctagccactttctccaaaatgcagaagaaggccactggctttcaagaaaacgtgcccgtccccgaccctttctag

SEQ ID NO: 173625 - DNA, 468 bp, Artificial Sequence
  derived and/or modified sequence
atgggcaaggattactacaagattctggggattccaagcggggctaatgaagacgaaattaagaaggcttaccggaagatggcccttaaataccatccagacaaaaacaaagagccaaacgcagaagagaaattcaaggagatcgcagaggcgtacgacgtgctcagcgaccccaaaaaacgaggattgtacgaccagtatggtgaagaaggactgaaaaccggcggaggtacatccggtggctcgtccggcagcttccactataccttccatggggatcctcatgccacctttgcctcctttttcggagggagcaacccatttgacatcttctttgcgtccagccgcagcacgagacccttcagcggtttcgacccagacgacatggacgtggatgaggacgaggatccatttggggcttttggacgctttggtttcaatgggttaagccggggtccaaggcgctag

SEQ ID NO: 173626 - DNA, 1047 bp, Artificial Sequence
  derived and/or modified sequence
atggggaaggactattataagattctaggtattccatcaggggctaatgaggacgaaatcaagaaagcttatcgcaaaatggcactgaaataccatcccgataagaacaaggaaccgaacgctgaggagaaatttaaggaaatcgccgaagcctatgacgtgctgtccgacccaaagaagcgtggcctgtatgatcagtacggcgaggaaggccttaaaacgggagggggtacaagtgggggaagtagcggtagctttcactacacctttcacggcgatccccatgcaacatttgctagcttctttggcggatctaacccattcgacatttttttcgcgtcctcccgatcgacacgccctttttctggatttgatccagatgatatggacgtagacgaggacgaagaccccttcggtgcttttggcaggtttgggttcaatggcctcagccgcggacccagaagggcaccggaacctctgtaccctcggaggaaggtacaagatccaccggttgtccatgaactgagggtatccctggaggagatctaccatggttccacaaagaggatgaagataactcgcagacgacttaacccagatgggagaacagtgaggacggaagataagatattacacattgtgatcaaaagaggttggaaggaaggcacaaagattacttttcctaaggaaggggatgcaacgcctgacaatattcctgccgatatagtatttgtattgaaggataaaccccatgcccacttccggcgtgacggcaccaatgtgttatacagcgcactgattagtttgaaagaagctctgtgtgggtgtaccgtaaatattccaacaatagatggcagggtaatccctctaccatgcaatgatgtcatcaagcccggaacggtgaaaaggctgcggggagagggtctgcctttcccgaaagtccctacccagaggggggatttgattgttgaatttaaagtgagatttccagatcggcttactccccagacgaggcagattctgaaacagcacctcccatgcagctag

SEQ ID NO: 173627 - DNA, 1047 bp, Artificial Sequence
  derived and/or modified sequence
atgggtaaggattattataaaatcttgggcatacccagtggagctaatgaagacgaaataaagaaggcctataggaagatggctcttaaataccacccagacaagaataaggaaccgaacgccgaagagaagttcaaggaaattgcagaggcgtacgacgtactgtctgaccccaagaagagaggactctatgaccaatatggagaagaaggtctgaagacgggcggaggcacaagcggcggttcctctggcagctttcactatacattccacggcgatcctcatgcaacttttgcctccttctttggtgggagcaatccatttgacatctttttcgctagctctaggtccacacggcctttctcagggtttgaccccgatgatatggacgtggacgaggacgaggacccattcggggcatttggcaggttcgggttcaacgggctgagcagaggtcctcgacgagctcccgagcctctctaccctaggcggaaggtgcaagaccccccagtagttcatgaacttcgtgtttcactggaggagatctaccacgggtcgactaaaagaatgaaaattacacgcaggcgcctcaacccggatggccgtaccgtccggaccgaagacaagatcttgcacattgtgatcaagcgaggatggaaggaaggtaccaagattacgtttcctaaagagggagacgccacccctgataatatacccgctgacatagttttcgtgctcaaggacaaaccccacgcacattttcggagagacgggactaacgttctgtatagcgcattgatttccttgaaggaggccctgtgcggttgtacagttaatatccccaccatcgacgggagggtgatccccttaccttgtaacgacgtgatcaagccgggaaccgtgaagcgtctgcgtggagaggggctgccctttcctaaggtcccgactcagcgtggagacctgattgtggaattcaaggtcagatttccagaccgtttgactccgcagactcgtcaaatcctgaaacagcatcttccctgcagttag

SEQ ID NO: 173628 - DNA, 1047 bp, Artificial Sequence
  derived and/or modified sequence
atgggcaaggactactacaagatcctgggcatccccagcggcgccaacgaggacgagatcaagaaggcctacagaaagatggccctgaagtaccaccccgacaagaacaaggagcccaacgccgaggagaagttcaaggagatcgccgaggcctacgacgtgctgagcgaccccaagaagagaggcctgtacgaccagtacggcgaggagggcctgaagaccggcggcggcaccagcggcggcagcagcggcagcttccactacaccttccacggcgacccccacgccaccttcgccagcttcttcggcggcagcaaccccttcgacatcttcttcgccagcagcagaagcaccagacccttcagcggcttcgaccccgacgacatggacgtggacgaggacgaggaccccttcggcgccttcggcagattcggcttcaacggcctgagcagaggccccagaagagcccccgagcccctgtaccccagaagaaaggtgcaggacccccccgtggtgcacgagctgagagtgagcctggaggagatctaccacggcagcaccaagagaatgaagatcaccagaagaagactgaaccccgacggcagaaccgtgagaaccgaggacaagatcctgcacatcgtgatcaagagaggctggaaggagggcaccaagatcaccttccccaaggagggcgacgccacccccgacaacatccccgccgacatcgtgttcgtgctgaaggacaagccccacgcccacttcagaagagacggcaccaacgtgctgtacagcgccctgatcagcctgaaggaggccctgtgcggctgcaccgtgaacatccccaccatcgacggcagagtgatccccctgccctgcaacgacgtgatcaagcccggcaccgtgaagagactgagaggcgagggcctgcccttccccaaggtgcccacccagagaggcgacctgatcgtggagttcaaggtgagattccccgacagactgaccccccagaccagacagatcctgaagcagcacctgccctgcagctag

SEQ ID NO: 173629 - protein, 117 aa, Artificial Sequence
  derived and/or modified sequence
MSEKKNCKNSSTNNNQTQDPSRNELQVPRSFVDRVVQDERDVQSQSSSTINTLLTLLDCLADYIMERVGLEASNNGSMRNTSQDREREVDNNREPHSAESDVTRFLFDEMPKSRKND

SEQ ID NO: 173630 - DNA, 354 bp, Artificial Sequence
  derived and/or modified sequence
atgagcgagaagaagaactgcaagaacagcagcaccaacaacaaccagacccaggaccccagcagaaacgagctgcaggtgcccagaagcttcgtggacagagtggtgcaggacgagagagacgtgcagagccagagcagcagcaccatcaacaccctgctgaccctgctggactgcctggccgactacatcatggagagagtgggcctggaggccagcaacaacggcagcatgagaaacaccagccaggacagagagagagaggtggacaacaacagagagccccacagcgccgagagcgacgtgaccagattcctgttcgacgagatgcccaagagcagaaagaacgactag

SEQ ID NO: 173631 - DNA, 500 bp, Artificial Sequence
  derived and/or modified sequence
gagagccaaacccagcaaacatcatgtcagagaaaaagaactgtaagaactcgtctacaaataacaaccagactcaagacccttctagaaatgagctacaggtccctaggagcttcgtggaccgcgttgtgcaagatgaacgagacgtccaaagccagagttcctccacaataaataccctccttaccttgctcgattgccttgctgactacatcatggagcgggtaggcttggaggccagcaacaatggcagtatgcgcaacacttcacaagatagggagagagaagtggacaacaaccgtgagccccacagcgctgagagtgatgtgactcgctttttgtttgatgagatgcccaaatccaggaagaatgactgaagactgggtcccagagccttgaagggaacctcacaggcttagccagggcaaaaatgtgtcacagctgaggaatatctgctgttgtcatcaacaagtgctattaaaggatgtaaatccatgagt

SEQ ID NO: 173632 - DNA, 354 bp, Artificial Sequence
  derived and/or modified sequence
atgtccgaaaagaaaaactgtaagaattccagcaccaacaataaccagacccaagacccttcaaggaacgaacttcaggtgccccgatcctttgtagatcgtgtagtgcaagatgagagggatgttcagtcccaatcgtctagtacaattaacacattgttaaccttattggattgcctggccgattatattatggagcgcgtaggtcttgaagcaagtaacaatggcagcatgcgaaatacaagccaggatcgggagagggaagtcgacaacaatcgagagccacactcagccgaaagcgacgtgactcgtttcctgtttgatgagatgccaaaatctcggaagaacgactag

SEQ ID NO: 173633 - DNA, 354 bp, Artificial Sequence
  derived and/or modified sequence
atgtctgagaagaagaactgcaagaacagcagcaccaacaacaaccagacccaggaccccagcagaaatgagctgcaggtgcccaggagctttgtggacagagtggtgcaggatgaaagagatgtgcagagccagagcagcagcaccatcaacaccctgctgaccctgctggactgcctggccgactacatcatggagcgggtgggcctggaggccagcaacaacggctccatgaggaacaccagccaggaccgggagcgggaggtggacaacaaccgggagccccacagcgctgagagtgatgtgacccgcttcctgtttgatgagatgcccaagagcaggaagaatgactag

SEQ ID NO: 173634 - DNA, 354 bp, Artificial Sequence
  derived and/or modified sequence
atgagcgagaagaagaactgcaagaacagcagcaccaacaacaaccagactcaagatccaagccgcaacgaattgcaggtgccccggagcttcgttgatcgagtggtacaggacgagagggacgtacagtcccagtcttcaagcacaattaacactctgttaacgctccttgactgtctcgccgattacattatggaacgagtcggactggaggcttctaacaatggttctatgcggaacacaagccaggatagagaacgggaggtggacaacaatagggagccccacagcgcggagagcgacgtgactcgctttcttttcgacgagatgccaaagtcacgaaaaaacgattag

SEQ ID NO: 173635 - DNA, 354 bp, Artificial Sequence
  derived and/or modified sequence
atgtcagaaaaaaagaactgtaaaaactcctccaccaataataaccagacccaagacccttcgcgcaatgagctgcaggttcctcggagctttgttgaccgcgtcgtccaggacgagagagacgtgcagagtcagagttcctccaccattaacaccctgctcaccctgctagactgtcttgccgactacatcatggagcgggtcggcctcgaagcctctaacaacggctctatgagaaacacctcccaggatcgggagagagaagtggataataaccgggagccacacagcgctgagagcgatgtcactcggttcctcttcgacgaaatgccaaaaagcaggaagaacgattag

SEQ ID NO: 173636 - protein, 499 aa, Artificial Sequence
  derived and/or modified sequence
MTLILTSLLFFGLSLGPRTRVQAENLPKPILWAEPGPVITWHNPVTIWCQGTLEAQGYRLDKEGNSMSRHILKTLESENKVKLSIPSMMWEHAGRYHCYYQSPAGWSEPSDPLELVVTAYSRPTLSALPSPVVTSGVNVTLRCASRLGLGRFTLIEEGDHRLSWTLNSHQHNHGKFQALFPMGPLTFSNRGTFRCYGYENNTPYVWSEPSDPLQLLVSGVSRKPSLLTLQGPVVTPGENLTLQCGSDVGYIRYTLYKEGADGLPQRPGRQPQAGLSQANFTLSPVSRSYGGQYRCYGAHNVSSEWSAPSDPLDILIAGQISDRPSLSVQPGPTVTSGEKVTLLCQSWDPMFTFLLTKEGAAHPPLRLRSMYGAHKYQAEFPMSPVTSAHAGTYRCYGSRSSNPYLLSHPSEPLELVVSGATETLNPAQKKSDSKTAPHLQDYTVENLIRMGVAGLVLLFLGILLFEAQHSQRSPPRCSQEANSRKDNAPFRVVEPWEQI

SEQ ID NO: 173637 - DNA, 1500 bp, Artificial Sequence
  derived and/or modified sequence
atgaccctgatcctgaccagcctgctgttcttcggcctgagcctgggccccagaaccagagtgcaggccgagaacctgcccaagcccatcctgtgggccgagcccggccccgtgatcacctggcacaaccccgtgaccatctggtgccagggcaccctggaggcccagggctacagactggacaaggagggcaacagcatgagcagacacatcctgaagaccctggagagcgagaacaaggtgaagctgagcatccccagcatgatgtgggagcacgccggcagataccactgctactaccagagccccgccggctggagcgagcccagcgaccccctggagctggtggtgaccgcctacagcagacccaccctgagcgccctgcccagccccgtggtgaccagcggcgtgaacgtgaccctgagatgcgccagcagactgggcctgggcagattcaccctgatcgaggagggcgaccacagactgagctggaccctgaacagccaccagcacaaccacggcaagttccaggccctgttccccatgggccccctgaccttcagcaacagaggcaccttcagatgctacggctacgagaacaacaccccctacgtgtggagcgagcccagcgaccccctgcagctgctggtgagcggcgtgagcagaaagcccagcctgctgaccctgcagggccccgtggtgacccccggcgagaacctgaccctgcagtgcggcagcgacgtgggctacatcagatacaccctgtacaaggagggcgccgacggcctgccccagagacccggcagacagccccaggccggcctgagccaggccaacttcaccctgagccccgtgagcagaagctacggcggccagtacagatgctacggcgcccacaacgtgagcagcgagtggagcgcccccagcgaccccctggacatcctgatcgccggccagatcagcgacagacccagcctgagcgtgcagcccggccccaccgtgaccagcggcgagaaggtgaccctgctgtgccagagctgggaccccatgttcaccttcctgctgaccaaggagggcgccgcccacccccccctgagactgagaagcatgtacggcgcccacaagtaccaggccgagttccccatgagccccgtgaccagcgcccacgccggcacctacagatgctacggcagcagaagcagcaacccctacctgctgagccaccccagcgagcccctggagctggtggtgagcggcgccaccgagaccctgaaccccgcccagaagaagagcgacagcaagaccgccccccacctgcaggactacaccgtggagaacctgatcagaatgggcgtggccggcctggtgctgctgttcctgggcatcctgctgttcgaggcccagcacagccagagaagcccccccagatgcagccaggaggccaacagcagaaaggacaacgcccccttcagagtggtggagccctgggagcagatctag

SEQ ID NO: 173638 - DNA, 1500 bp, Artificial Sequence
  derived and/or modified sequence
atgacacttattctcactagcctgctgttctttggcctcagtttgggcccaaggactcgggtccaggcggagaatttgcctaaacccattttgtgggcagagcctgggcctgtgatcacatggcataatccggtgaccatttggtgccagggaactctggaagctcagggttaccgtttggacaaggagggcaactcgatgtcaagacacatcctgaagaccttggagtctgagaacaaagtgaaactgtctattccttccatgatgtgggagcatgctggacgctaccactgctactaccagtccccggcgggatggtccgaacccagtgatcccctggaattagtggtgactgcctactccaggccaaccctttcagctctcccatccccggtggttacctctggggtgaatgtcaccttgagatgcgctagtcggttggggcttggacggtttaccctgattgaagaaggtgatcacagactgagctggaccctcaattcacaccagcataatcacggcaagtttcaagcattgtttcccatgggaccacttactttctcaaacaggggaaccttccgctgttacggatacgagaataacaccccttacgtttggtctgaaccgtccgatcccctgcagctgctggtcagtggtgtgtcccggaagcccagtcttctcacactccagggccccgtagtgacacctggtgagaatttaaccctgcaatgcggatcagatgtgggctacattcgatacaccctgtataaggaaggggcagatggcttaccccagcggcccgggcgtcaaccgcaggcgggcctgagtcaggcaaactttacactgtccccagtcagtcggagctacggaggtcaatacaggtgttacggtgcacataatgtgagctccgagtggagcgcgccgagcgacccgctggacatcttaatcgctggtcagattagcgatagaccaagcctttccgtccagcccggaccgactgttaccagcggagaaaaagttactctgctgtgccaaagctgggatccgatgttcacattcctgttgacgaaggagggagcagcccacccaccgctgaggctgcgctctatgtatggggcacataagtatcaggcagagtttcccatgtctcctgtgactagcgcacacgctggaacatatagatgttatggctccaggtcttcaaacccttaccttctcagccatccctcagagcccttggagctagtggtaagcggcgcaaccgagacactgaacccggcccagaaaaaatctgacagtaagactgcgccacatctgcaggattatacagtcgagaacctcatacggatgggcgtggctggcctcgttctgctctttcttggtatcctgttatttgaggctcagcattcccagcgtagccctcccagatgctcccaggaggctaactccaggaaggacaacgccccatttcgcgttgtggaaccatgggagcagatctag

SEQ ID NO: 173639 - DNA, 1944 bp, Artificial Sequence
  derived and/or modified sequence
ctacgggcaccgtggccacacctgcctgcacagccagggccaggaggaggagatgccatgaccctcattctcacaagcctgctcttctttgggctgagcctgggccccaggacccgggtgcaggcagaaaacctacccaaacccatcctgtgggccgagccaggtcccgtgatcacctggcataaccccgtgaccatctggtgtcagggcaccctggaggcccaggggtaccgtctggataaagagggaaactcaatgtcgaggcacatattaaaaacactggagtctgaaaacaaggtcaaactctccatcccatccatgatgtgggaacatgcagggcgatatcactgttactatcagagccctgcaggctggtcagagcccagcgaccccctggagctggtggtgacagcctacagcagacccaccctgtccgcactgccaagccctgtggtgacctcaggagtgaacgtgaccctccggtgtgcctcacggctgggactgggcaggttcactctgattgaggaaggagaccacaggctctcctggaccctgaactcacaccaacacaaccatggaaagttccaggccctgttccccatgggccccctgaccttcagcaacaggggtacattcagatgctacggctatgaaaacaacaccccatacgtgtggtcggaacccagtgaccccctgcagctactggtgtcaggcgtgtctaggaagccctccctcctgaccctgcagggccctgtcgtgacccccggagagaatctgaccctccagtgtggctctgatgtcggctacatcagatacactctgtacaaggagggggccgatggcctcccccagcgccctggccggcagccccaggctgggctctcccaggccaacttcaccctgagccctgtgagccgctcctacgggggccagtacagatgctacggcgcacacaacgtctcctccgagtggtcggcccccagtgaccccctggacatcctgatcgcaggacagatctctgacagaccctccctctcagtgcagccgggccccacggtgacctcaggagagaaggtgaccctgctgtgtcagtcatgggacccgatgttcactttccttctgaccaaggagggggcagcccatcccccgttgcgtctgagatcaatgtacggagctcataagtaccaggctgaattccccatgagtcctgtgacctcagcccacgcggggacctacaggtgctacggctcacgcagctccaacccctacctgctgtctcaccccagtgagcccctggagctcgtggtctcaggagcaactgagaccctcaatccagcacaaaagaagtcagattccaagactgccccacacctccaggattacacagtggagaatctcatccgcatgggtgtggctggcttggtcctgctgttcctcgggattctgttatttgaggctcagcacagccagagaagccccccaaggtgcagccaggaggcaaacagcagaaaggacaatgcacccttcagagtggtggagccttgggaacagatctgatgatctgaggaggttctggaagactggggcagcagttggggaagtgtctgctgagaatatcaaggggaagaagcatgggtcaggtgcaggaagatgtctgggtgtctgtagaagatgcttcctccattaaactgtggtgctttcctcctcattgtcgactctccttgactgccccttccttcgtttttcttccctatgatgtaaggcttcacccctatggtgggtttgggtccgcccctctgtgacctcatgctctgctccactttcaggtaatacacctttctttatttctaactactgcattttctaatgtgtattactgggactatctcttcagctcataacatggaatttgcttttgataattaaatccatgggcaaaaatca

SEQ ID NO: 173640 - DNA, 1500 bp, Artificial Sequence
  derived and/or modified sequence
atgaccctcatcctgaccagcctgctcttcttcggcctgagcctgggccccaggaccagggtgcaggccgagaacctgcccaagcccatcctgtgggccgagcccggccctgtgatcacctggcacaaccctgtgaccatctggtgccagggcaccctggaggcccagggctaccgcctggacaaggagggcaacagcatgagccgccacatcctgaagaccctggagagcgagaacaaggtgaagctgagcatccccagcatgatgtgggagcacgccggccgctaccactgctactaccagagccctgctggctggagcgagcccagcgaccccctggagctggtggtgacagcctacagccggcccaccctgagcgccctgcccagccctgtggtgaccagcggcgtgaatgtgaccctgcgctgtgccagccggctgggcctgggccgcttcaccctgattgaggagggggaccaccggctgtcctggaccctgaacagccaccagcacaaccacggcaagttccaggccctcttccccatgggccccctgaccttcagcaacagaggcaccttccgctgctacggctatgagaacaacaccccctacgtgtggagcgagcccagcgaccccctgcagctgctggtgtctggagtgtccaggaagcccagcctgctgaccctgcagggccctgtggtgaccccaggagagaacctgaccctgcagtgtggcagtgatgtgggctacatccgctacaccctgtacaaggagggcgcagatggcctgccccagaggcctggccggcagccccaggccggcctgagccaggccaacttcaccctgagccctgtgagccgctcctatggaggccagtaccgctgctacggggcccacaacgtgtcctctgagtggagcgcccccagcgaccccctggacatcctgattgctggccagatcagtgaccggcccagcctgtctgtgcagcccggccccaccgtgaccagcggggagaaggtgaccctgctgtgccagagctgggaccccatgttcaccttcctgctgaccaaggagggcgccgcccacccccccctgcggctgcgctccatgtatggagcccacaagtaccaggccgagttccccatgagccctgtgaccagcgcccacgccggcacctaccgctgctacggcagccgcagcagcaacccctacctgctgagccaccccagcgagcccctggagctggtggtgtctggggccacagagaccctgaacccagcccagaagaagagtgacagcaagacagccccccacctgcaggactacacagtggagaacctgatccgcatgggcgtggccggcctggtgctgctcttcctgggcatcctgctgtttgaggcccagcacagccagaggagccccccacgctgcagccaggaggccaacagcaggaaggacaatgcccccttccgggtggtggagccctgggagcagatctag

SEQ ID NO: 173641 - DNA, 1500 bp, Artificial Sequence
  derived and/or modified sequence
atgaccctgatcctgaccagcctgctgttcttcggcctgagcctgggaccccgtacaagggtgcaggccgagaacttacctaaaccgattctgtgggccgagcccggaccggttatcacatggcacaacccagtgacgatttggtgccaggggacactagaggcccagggctaccgactggacaaagaggggaattccatgagcagacacatcttgaaaacccttgagtcggaaaataaggttaaactgtccattcccagcatgatgtgggaacatgcaggccgctatcactgctattaccagtcccctgctggatggtctgagcccagtgacccattagaacttgtggtgaccgcgtatagtaggcccaccttgtccgcgctgccgtcacccgtggttacctccggggtcaatgttacccttcggtgtgccagcaggctcgggttgggcaggttcactttgatcgaagagggtgatcataggctgagttggactctgaattctcaccaacataaccacggaaagtttcaggctctgttccctatgggccctctgactttttcgaatcggggaaccttccgctgctacggatacgaaaacaatactccttatgtttggagtgagcccagcgaccctctgcagctattggtgtctggggttagccggaagccaagcctgttgaccctacagggccccgtggtcacccctggagaaaacctgactctccagtgtggaagtgatgttgggtacatccgctataccctgtacaaggagggcgcggacggacttccgcagaggccaggacgccagccccaggccggtctgtcccaggctaactttaccctcagcccagttagtcggtcatatggcggccagtatagatgttacggagcacataatgtctcctccgagtggtctgcgccgtccgaccctctagatatactcatcgcaggtcagatctccgatcggccatccctatctgttcagcccggaccaacagtgacctcaggcgagaaagtgacgctgctttgccaatcctgggacccaatgtttactttccttttgacaaaggagggcgctgcacatccccccctgcggctgcggtctatgtacggcgctcacaagtatcaggccgagtttccaatgtcgcctgtgacatccgcacatgcagggacttacaggtgctatggttcgagaagctccaacccttatctgttatcccaccctagtgaaccactggaactggtagtgtctggggctactgagacgctcaaccccgcacagaagaaatctgattccaaaaccgctccccatttgcaggactacacggtcgaaaatctgatccggatgggggttgccgggcttgtgctattgttcctcggaatcctgctatttgaggcgcagcacagccagaggtctccgccaaggtgtagccaggaggccaacagcagaaaagacaatgccccctttcgagtcgtggaaccttgggaacaaatatag

SEQ ID NO: 173642 - DNA, 1500 bp, Artificial Sequence
  derived and/or modified sequence
atgacgctcatattgacatcgctgttgttttttggcctgtcactaggcccacgaacacgggtgcaagccgagaatcttcctaagccgattctatgggccgagcctggccctgtgattacctggcataaccctgtcactatttggtgccagggaaccctggaggctcaaggatatcgcctcgataaagaggggaactcgatgtccagacatatcctgaaaacccttgagtccgaaaataaagtcaaactcagcatcccttctatgatgtgggagcatgccggacgataccattgctattaccagtcccctgccggatggtctgaaccctctgacccgctggaacttgtcgttactgcttactcccgccctacattaagcgctctcccttccccggtcgtgactagtggtgtcaacgtgaccttacgctgtgccagccgccttggactcggtagattcactctgatcgaagagggggaccatcggctctcttggaccctgaattcacatcagcacaaccatggaaaattccaggctcttttccctatggggccacttacatttagcaatcggggtacatttcgttgctacggttatgagaacaataccccctacgtttggagcgagccttcagacccactgcaattgctcgtgtctggcgtgtccagaaaaccgtctctccttacacttcaaggacccgtcgtaacacccggagaaaatttaactctacagtgcggctctgacgttggttacattagatatactttgtacaaggaaggcgcagatggcttgccccaacgccctggcagacagccccaggcgggtctctcacaagctaacttcacactatcaccagttagccgatcctatggaggccaatacaggtgctatggagctcacaacgtgagcagcgaatggagcgctccttcagatcctttggacattctgatcgccggacagatctccgatcgtccatccctctctgtccagccagggcctaccgtgacaagtggcgagaaggtgacattgctctgtcagtcctgggacccgatgttcacgtttctgcttacaaaggagggtgctgcacatcccccactgcggctacgatcaatgtacggggcacacaagtatcaggcagagttccctatgtcaccagttactagtgcacacgctggtacatatcgctgctacggcagcagatcttctaacccttatctcctgtctcacccctccgaaccactggagttagtggttagcggggcaaccgaaacgctgaaccctgcacagaaaaagtcagactcgaaaacagctccccacttgcaggactataccgtcgagaatctcattaggatgggggtagcaggtctagttctgctcttcctcgggatcctactatttgaggctcagcactctcagcgaagcccccctcggtgcagccaagaggcgaacagtcgcaaggataatgcacccttccgtgttgtggaaccttgggagcagatttag

SEQ ID NO: 173643 - protein, 329 aa, Artificial Sequence
  derived and/or modified sequence
MGRTSKDKRDVYYRLAKENGWRARSAFKLLQLDKEFQLFQGVTRAVDLCAAPGSWSQVLSQKIGGQGSGHVVAVDLQAMAPLPGVVQIQGDITQLSTAKEIIQHFKGCPADLVVCDGAPDVTGLHDVDEYMQAQLLLAALNIATHVLKPGGCFVAKIFRGRDVTLLYSQLQVFFSSVLCAKPRSSRNSSIEAFAVCQGYDPPEGFIPDLSKPLLDHSYDPDFNQLDGPTRIIVPFVTCGDLSSYDSDRSYPLDLEGGSEYKYTPPTQPPISPPYQEACTLKRKGQLAKEIRPQDCPISRVDTFPQPLAAPQCHTLLAPEMEDNEMSCSP

SEQ ID NO: 173644 - protein, 192 aa, Artificial Sequence
  derived and/or modified sequence
MALNIATHVLKPGGCFVAKIFRGRDVTLLYSQLQVFFSSVLCAKPRSSRNSSIEAFAVCQGYDPPEGFIPDLSKPLLDHSYDPDFNQLDGPTRIIVPFVTCGDLSSYDSDRSYPLDLEGGSEYKYTPPTQPPISPPYQEACTLKRKGQLAKEIRPQDCPISRVDTFPQPLAAPQCHTLLAPEMEDNEMSCSP

SEQ ID NO: 173645 - DNA, 1892 bp, Artificial Sequence
  derived and/or modified sequence
ggatacgtcgacaatagatgacggggctcacgttgtacgttcacatcaggtcccggcccgccggaacctgggcgatccacgatgccgagtttgccacgctgcgacagcccataggcttgcccccccgggcattcgggtggactacgaacacaaactgaagccctaggacttgtcgcccgtttgcgctctcgccgaggcacaggctgctcgcggaccaccctgctccgaaaactaagaggtaggtggtagcccattcatctggttactgatactggccggcatcagtggactgtcggcaggtccttgagcaactggtgtgtgaaatgggacggacgtcaaaggacaagcgggatgtctactaccgcctggccaaggagaatggctggcgtgctcgcagcgccttcaaactgctacaactggataaggaattccaactcttccaaggcgtgacacgggcagttgacctgtgtgcagccccaggcagctggagccaggtgctgagccagaagatcgggggccaagggtccggccacgtggtggctgtggacctgcaggctatggctccactaccaggtgtggtacagatccagggggacatcacccagctgtccactgccaaggagatcatccagcactttaagggctgccctgcggacctagtggtgtgtgacggggctcctgatgtaaccggtctccatgatgttgatgagtatatgcaggcccagctcctcctagctgctctgaacattgctacacatgtcctgaagccagggggctgctttgtggccaagatattccgaggccgggatgtgacgctcctctacagccagctgcaggtcttcttctccagcgtgctgtgtgccaagcccaggagcagccggaactctagcatcgaggccttcgctgtctgtcagggctatgaccctcccgagggcttcatcccggacctgagcaaacccctgctggaccattcttacgacccagatttcaaccagctggatggtcccacccgcatcattgtgccttttgtgacctgtggggacctgagctcctatgattcggaccgcagttacccactggacctagagggcggctcagagtacaagtacactccacccacacagccccccatctcgccaccataccaggaggcctgcacgttgaagaggaaggggcagctggccaaggagatccgcccccaggactgccccatcagcagagtggacacgtttccccagcccctggccgcccctcagtgccacaccctgctggcccctgagatggaagacaatgaaatgagttgttcaccttaacccattacgctggcaaactgatacaactcagaaactgctcaatgtcaggaaaaccggaacttgttgatgaacttgttttcaaaatatcatctcatcaacgaggcctggacaaacaagccctgaggagggatctgcaacaaccctgaagacaacaaggaaagaaaccatgaaagtctgtctgtactgcagtgggaattcttgagtgaggtcttacctcttctttaaacctcttcaggagtgtcctgattatgtccagaattttccctaaaggcagggattcttaacctggatagaagccaggggtaaccatgaacttgatggaagaaaatgttacatctttattttcagcaatgaaactgaaatttagccttactcccaagttataaatgctggcaacaaatcacagtagtaaaagcagtacctgggattttcccaccaatacaaaccagttacagcaactgtaatgtaacataaaaagggcatcttgaagtattgttcatatttgtcacctcttggaatgatagcagatcctgtaagttgatgtattaattaaaaagcccatatattactgcatctcaa

SEQ ID NO: 173646 - DNA, 990 bp, Artificial Sequence
  derived and/or modified sequence
atgggcaggacgtcaaaggataagcgggatgtttactatcggttagccaaggagaacggctggcgtgcaagaagtgcgtttaagttgttgcagttggataaagagtttcagctgtttcagggcgtaacccgcgctgtcgatctgtgtgccgcgcctggcagctggtctcaagtcctctcacagaagatcggaggccaagggtcggggcatgtagtcgctgtggacctgcaggcaatggcacccctccccggagtggttcagattcagggagacattacccagctcagtaccgccaaggaaattatccaacacttcaagggctgcccagcggatcttgtcgtgtgtgacggcgcacccgatgtgactggcctgcacgacgttgatgagtatatgcaagcacagctgcttctggctgccctgaacatcgcgacgcacgtcttgaagccaggcggctgctttgtcgccaaaatttttcgtggaagggacgtgacgctcttgtattcccagctgcaagtattcttttccagcgtgctgtgcgcaaagcctcgtagtagcaggaattcgagtatcgaggcattcgcagtttgccagggctatgatcctcccgaaggttttatccccgatctctccaagcccctgctggaccattcctatgatcctgattttaatcaacttgacggcccgacacgcatcattgtgccattcgtcacatgtggtgacctgtcgtcttacgacagtgatagatcataccccctggatttagaagggggctctgaatacaaatatacccctcctacccagccaccgatttcccccccttaccaggaggcctgtactcttaagcgcaagggccagctggcaaaggagattcgcccgcaggattgccccataagcagggtggacaccttcccccagcctttagcggccccccaatgtcataccctgctggctcccgagatggaggacaacgagatgtcatgctcaccatag

SEQ ID NO: 173647 - DNA, 990 bp, Artificial Sequence
  derived and/or modified sequence
atgggccgcaccagcaaggacaagagagatgtgtactaccgcctggccaaggaaaatggctggagggcccggagcgccttcaagctgctgcagctggacaaggagttccagctgttccagggcgtgaccagggctgtggacctgtgtgccgcccctggctcctggagccaggtgctgagccagaagattggaggccagggcagcggccacgtggtggccgtggacctgcaggccatggcccccctgcccggggtggtgcagatccagggcgacatcacccagctgagcacagccaaggagatcatccagcacttcaagggctgcccagctgacctggtggtgtgtgatggagccccagatgtgacaggcctgcatgatgtggatgagtacatgcaggcccagctgctgctggccgccctgaacatcgccacccacgtgctgaagccaggcggctgctttgtggccaagatcttccggggcagagatgtgaccctgctgtacagccagctgcaggtgttcttcagctctgtgctgtgtgccaagcccaggagcagcaggaacagcagcattgaggcctttgctgtgtgccagggctatgaccccccagagggcttcatcccagacctgagcaagcccctgctggaccacagctatgaccctgacttcaaccagctggatggccccacccgcatcatcgtgccctttgtgacctgtggggacctgagcagctatgacagcgacaggagctaccccctggacctggagggcggcagcgagtacaagtacaccccacccacccagccccccatcagccccccctaccaggaggcctgcaccctgaagaggaagggccagctggccaaggagatccggccccaggactgccccatcagccgggtggacaccttcccccagcccctggccgccccccagtgccacaccctgctggcccctgagatggaggacaatgagatgagctgcagcccctag

SEQ ID NO: 173648 - DNA, 990 bp, Artificial Sequence
  derived and/or modified sequence
atgggccggaccagcaaggacaagcgggacgtgtactaccggctggctaaggagaacggttggcgggctcgttcggctttcaaactgttacaactggacaaagaatttcagctgtttcagggggtgacaagggccgttgacctttgcgcagccccggggtcgtggtcgcaggtcctgagccaaaagatcggtggccagggttccggccacgtggttgctgtggacctgcaggcaatggcccctctacccggtgtcgttcagattcaaggggatattacccagttaagcacagccaaggaaattattcaacattttaagggatgccccgcggaccttgtggtgtgtgatggtgctccggacgtaaccggcttgcacgatgttgacgaatatatgcaggcccagcttctgcttgccgccctgaatatagccacccacgtactgaaacccggaggatgcttcgttgcaaaaatatttcgaggccgggatgtgacactgctgtattctcaactgcaggtgtttttctcttccgtcctgtgcgctaaacctcgaagcagccgcaacagttccatcgaggcgtttgctgtatgccaagggtatgacccaccggagggttttatcccagacctatccaagcctctcctggatcacagttatgatccagactttaaccagctggatggacccacacggattatcgtcccttttgttacctgcggagacctgagttcgtatgattccgatcggtcttaccccctggatcttgaaggtgggagtgagtataagtacacccctcctactcagcctccgatcagcccgccataccaggaggcgtgtacacttaaacggaagggtcaattggcaaaagagattcggccccaagactgcccaatctcacgggtggacacatttccacagccgttggccgctccacagtgccacaccttgctggctccagaaatggaggataatgagatgtcttgtagcccttag

SEQ ID NO: 173649 - DNA, 990 bp, Artificial Sequence
  derived and/or modified sequence
atgggccgaacgtccaaggacaagcgggacgtttactaccggctggctaaagagaacggttggagagcacgcagtgcctttaagctgctccagctcgacaaggagtttcagctcttccagggcgttacgcgtgctgtggacctttgtgccgctcccggaagctggtcgcaagtcctgtcccagaaaataggtggacagggttctggccatgtggtggccgtggatctccaggcaatggctccattgccgggtgtggtccagattcaaggcgacattacccaactatccacggctaaggaaatcattcagcattttaaaggctgcccggctgacctggtggtgtgcgatggagccccagacgtgactggcctacacgatgtggacgagtacatgcaggcacaactactgctggcagcactgaacattgcaacacacgttttgaaacccggaggctgctttgttgcaaagattttccgtggccgtgacgtgacccttctgtatagccaactgcaggttttcttttccagcgtgctttgcgctaaacccagatcatcccgcaatagctctatcgaagcctttgcagtctgtcaaggatatgacccaccagaaggctttattcccgacttgagtaagcctctgctggaccattcatacgacccagatttcaatcagctagacggaccaactagaattattgttccattcgtaacgtgcggcgatctgtctagctatgattccgacagaagttatcctctagacctcgaagggggttctgaatataagtataccccccctacccagccgccaattagtccgccttatcaggaagcctgcactctgaagcgaaagggtcagttggcgaaagaaatacgtcctcaagactgccctatctccagagttgatacctttccgcagccactcgctgctcctcaatgccacaccttgctagctcctgagatggaggacaacgagatgagctgttccccctag

SEQ ID NO: 173650 - DNA, 990 bp, Artificial Sequence
  derived and/or modified sequence
atgggcagaaccagcaaggacaagagagacgtgtactacagactggccaaggagaacggctggagagccagaagcgccttcaagctgctgcagctggacaaggagttccagctgttccagggcgtgaccagagccgtggacctgtgcgccgcccccggcagctggagccaggtgctgagccagaagatcggcggccagggcagcggccacgtggtggccgtggacctgcaggccatggcccccctgcccggcgtggtgcagatccagggcgacatcacccagctgagcaccgccaaggagatcatccagcacttcaagggctgccccgccgacctggtggtgtgcgacggcgcccccgacgtgaccggcctgcacgacgtggacgagtacatgcaggcccagctgctgctggccgccctgaacatcgccacccacgtgctgaagcccggcggctgcttcgtggccaagatcttcagaggcagagacgtgaccctgctgtacagccagctgcaggtgttcttcagcagcgtgctgtgcgccaagcccagaagcagcagaaacagcagcatcgaggccttcgccgtgtgccagggctacgacccccccgagggcttcatccccgacctgagcaagcccctgctggaccacagctacgaccccgacttcaaccagctggacggccccaccagaatcatcgtgcccttcgtgacctgcggcgacctgagcagctacgacagcgacagaagctaccccctggacctggagggcggcagcgagtacaagtacaccccccccacccagccccccatcagccccccctaccaggaggcctgcaccctgaagagaaagggccagctggccaaggagatcagaccccaggactgccccatcagcagagtggacaccttcccccagcccctggccgccccccagtgccacaccctgctggcccccgagatggaggacaacgagatgagctgcagcccctag

SEQ ID NO: 173651 - protein, 630 aa, Artificial Sequence
  derived and/or modified sequence
MAAGVAAWLPFARAAAIGWMPVASGPMPAPPRQERKRTQDALIVLNVSGTRFQTWQDTLERYPDTLLGSSERDFFYHPETQQYFFDRDPDIFRHILNFYRTGKLHYPRHECISAYDEELAFFGLIPEIIGDCCYEEYKDRRRENAERLQDDADTDTAGESALPTMTARQRVWRAFENPHTSTMALVFYYVTGFFIAVSVIANVVETVPCGSSPGHIKELPCGERYAVAFFCLDTACVMIFTVEYLLRLAAAPSRYRFVRSVMSIIDVVAILPYYIGLVMTDNEDVSGAFVTLRVFRVFRIFKFSRHSQGLRILGYTLKSCASELGFLLFSLTMAIIIFATVMFYAEKGSSASKFTSIPAAFWYTIVTMTTLGYGDMVPKTIAGKIFGSICSLSGVLVIALPVPVIVSNFSRIYHQNQRADKRRAQKKARLARIRAAKSGSANAYMQSKRNGLLSNQLQSSEDEQAFVSKSGSSFETQHHHLLHCLEKTTNHEFVDEQVFEESCMEVATVNRPSSHSPSLSSQQGVTSTCCSRRHKKTFRIPNANVSGSHQGSIQELSTIQIRCVERTPLSNSRSSLNAKMEECVKLNCEQPYVTTAIISIPTPPVTTPEGDDRPESPEYSGGNIVRVSAL

SEQ ID NO: 173652 - DNA, 1893 bp, Artificial Sequence
  derived and/or modified sequence
atggcagcaggcgtcgccgcttggttgccctttgccagggctgctgccatcggctggatgccggtggccagtggcccaatgcctgctcccccaaggcaggaacggaagcgaacccaggatgccctgattgttctgaatgtcagcgggacgcgctttcagacctggcaggatacattggaacggtatccagataccctcctgggcagcagcgagagggattttttttaccacccggaaactcagcagtatttcttcgatcgcgatccagatatcttcagacacatcctcaatttttaccgcacaggaaagctgcattaccctaggcacgaatgtatctctgcctacgacgaggagcttgcctttttcggtctcatcccggagataataggtgattgttgctacgaggagtataaagataggcgccgagaaaacgcagaaagacttcaagacgacgcggataccgataccgctggcgagtccgccctcccaactatgacggcccgacaaagggtttggagggcgttcgagaatccgcatacgtccacaatggcattggtgttttattacgtaactgggttttttattgctgtttccgtgatcgctaatgtggtcgagacagtgccatgcggttcttctccagggcatataaaggagctgccatgtggcgagcgctatgccgtggctttcttttgcctagatacggcatgtgtcatgatcttcaccgtcgagtacctgttaaggctcgccgccgccccctcccgttaccgattcgtgcgcagcgttatgagcattattgacgtagtggcgattcttccatattacataggacttgtgatgacagataacgaagatgtgtccggggccttcgtgaccctacgcgtctttcgagtcttccgcattttcaaattcagcagacacagtcaaggcctgagaatacttggctacacgttaaagagttgcgcttctgaattagggttccttttgttttcgctgacaatggccataatcatttttgcaactgtgatgttctatgctgagaagggttcctcggcctctaagttcacctcgatccctgcagccttctggtacaccattgtcaccatgacaaccctcgggtatggcgacatggtgccaaaaactatcgccggaaagatattcggcagcatttgcagtttgtcaggggtgctcgtcatcgctcttccagtacctgtcatcgtttccaatttcagtcgcatctaccaccagaaccagagggctgacaaacgaagggcacagaagaaagcaaggctggctcgcatcagagccgcaaaaagcggctcagcaaacgcttatatgcagtctaagcggaatggccttctgtcaaaccagctgcagagcagtgaggacgagcaggcttttgttagtaagtctgggtcttcattcgaaacccagcaccaccacctgttacactgtcttgagaaaaccacaaatcacgaattcgtggacgagcaggtcttcgaagagtcctgcatggaggttgcgactgttaaccgacctagctcccattctccgtccctgtctagccagcaaggagtgacctcaacttgctgtagccgccgccataagaagacttttcgaatacccaatgcaaatgtgtcaggatcacatcagggatctatccaggagctgtctacgatacagatacggtgcgttgagagaacacctctgtcaaattcacggagctctctgaacgccaaaatggaagagtgcgttaaacttaactgcgagcagccttatgtaactacggcaattatctccatccctaccccccctgtgaccactcctgagggcgatgatcggccagagtccccggagtattcgggtggaaatattgtgcgcgtgtcagccctgtag

SEQ ID NO: 173653 - DNA, 1893 bp, Artificial Sequence
  derived and/or modified sequence
atggctgctggggtggccgcctggctgccctttgcccgggctgctgccatcggctggatgcctgtggccagcggccccatgcctgccccaccccggcaggagaggaagaggacccaggatgccctgattgtgctgaatgtgtctggcacccgcttccagacctggcaggacaccctggagcgctacccagacaccctgctgggcagcagcgagcgggacttcttctaccaccctgagacccagcagtacttctttgaccgggaccctgacatcttccgccacatcctgaacttctacagaacaggcaagctgcactaccccaggcatgagtgcatcagcgcctatgatgaggagctggccttcttcggcctcatccctgagatcattggagactgctgctatgaggagtacaaggacagaagaagagaaaatgctgagcggctgcaggatgatgctgacacagacacagctggggagagcgccctgcccaccatgacagcccggcagagggtgtggagggcctttgagaacccccacaccagcaccatggccctggtgttctactacgtgacaggcttcttcatcgctgtgtctgtcatcgccaacgtggtggagaccgtgccctgtggcagcagccctggccacatcaaggagctgccctgtggggagagatatgctgtggccttcttctgcctggacacagcctgtgtgatgatcttcaccgtggagtacctgctgcggctggccgccgcccccagccgctacagatttgtgcgctctgtgatgagcatcattgatgtggtggccatcctgccctactacatcggcctggtgatgacagacaatgaagatgtgtctggggcctttgtgaccctgcgggtcttccgggtcttccgcatcttcaagttcagccgccacagccagggcctgcgcatcctgggctacaccctgaagagctgtgccagcgagctgggcttcctgctcttcagcctgaccatggccatcatcatctttgccaccgtgatgttttatgcagagaagggcagcagcgccagcaagttcaccagcatcccagctgccttctggtacaccatcgtgaccatgaccaccctgggctatggagacatggtgcccaagaccatcgccggcaagatcttcggcagcatctgcagcctgtctggagtgctggtgattgccctgcctgtgcctgtgattgtgagcaacttcagccgcatctaccaccagaaccagagagctgacaagaggcgggcccagaagaaggcccggctggcccgcatccgggccgccaagagcggcagcgccaatgcctacatgcagagcaagagaaatggcctgctgagcaaccagctgcagagcagtgaagatgagcaggcctttgtgtccaagagcggcagcagctttgagacccagcaccaccacctgctgcactgcctggagaagaccaccaaccatgaatttgtggatgagcaggtgtttgaggagagctgcatggaggtggccaccgtgaaccggcccagcagccacagccccagcctgagcagccagcagggcgtgaccagcacctgctgcagccgccgccacaagaagaccttccgcatccccaatgccaacgtgtctggcagccaccagggcagcatccaggagctgagcaccatccagatccgctgtgtggagaggacccccctgagcaacagccgcagcagcctgaatgccaagatggaggagtgtgtgaagctgaactgtgagcagccctacgtgaccacagccatcatcagcatccccaccccacctgtgaccaccccagaaggagatgacaggcctgagagccctgagtacagcggcggcaacatcgtgcgggtgtctgccctgtag

SEQ ID NO: 173654 - DNA, 1893 bp, Artificial Sequence
  derived and/or modified sequence
atggccgccggcgtggccgcctggctgcccttcgcccgggccgccgcgattggctggatgcccgtcgcctcggggccaatgcctgccccacctcgacaggaacgcaaacggacccaagatgctctgatagttttaaatgtcagcggaacaagatttcagacatggcaggacaccttggaacggtaccccgacactttactgggctcatctgagcgtgactttttttaccaccctgagacccaacagtacttcttcgacagggatccagacattttcaggcatattctcaatttttatcggacaggcaagctacactaccctagacacgaatgtatcagtgcctatgatgaggagctggcattttttggcctcattcctgagatcatcggggactgctgctatgaggagtacaaagaccgcagacgggaaaatgcagaacgactgcaggatgacgccgacacagacactgcaggggagagtgccctgcccacaatgactgcccgtcagagagtctggcgggcctttgagaacccccatacctcaactatggccctggttttttactacgttaccggcttttttatcgcggtctcagttatcgcaaatgttgttgagactgttccatgtggcagcagtcccggacacatcaaagaactgccttgtggggaaaggtacgcagttgcgttcttttgcttagatacggcctgcgtgatgatattcaccgtagagtacttattgcgcttggcagcagcgccatcccgctacagatttgtccggagcgtaatgagcatcattgacgtcgtcgctatccttccttattacatcggactcgtgatgacggacaatgaagacgtctctggcgcttttgtcacactcagggtttttcgcgtctttaggatttttaagtttagccgtcattcacagggactgagaattttgggatacacgctgaaatcttgtgctagtgaactgggcttcttgctcttctctctgacaatggccattatcattttcgccaccgtcatgttttatgccgagaaaggttcctccgcctcaaaattcacatccattcctgcagccttttggtataccatcgtcactatgacaaccctgggctacggagatatggtgcccaagaccatcgctggaaaaatctttggctcaatttgcagtctaagtggagtgctggtcatcgccctgccagttcctgtcattgtttccaatttctccaggatctatcaccaaaatcagcgcgctgacaagaggcgcgcacagaagaaggctcggctggcacgcataagagcagctaagagtggaagtgcgaacgcctatatgcagagcaaaaggaatggcctactgtccaatcagcttcagagctccgaggatgagcaggcttttgtcagtaagagcgggagcagcttcgagacgcagcaccaccatttactgcattgcctggaaaagactaccaaccatgagtttgtcgacgagcaggtcttcgaggagagctgcatggaggtcgccacagtgaatcgacctagttcccattccccctctttgtcctctcagcagggagtcacttctacctgttgttccagacgccacaagaaaacgtttagaatccccaacgccaacgtatctggctctcatcaggggtcgattcaggagttgtctacaattcaaataagatgcgtagagcgtacacctcttagcaatagccggagttccctcaacgcgaaaatggaagagtgtgtcaaactgaactgtgagcagccatatgtgactacagctattattagtatccccacacctccagtcacgacccccgaaggtgatgacagaccagaatcccctgagtatagtggggggaacattgtgcgggtctccgccctttag

SEQ ID NO: 173655 - DNA, 5331 bp, Artificial Sequence
  derived and/or modified sequence
cggctgctcgcgagctgctttctctcctcttccctttccgggtgcacggcgaggagaaagtctctatgcaactaagccccggcgcgcacttggccaggtatgtaccgcgggagcggcgcgttctgcgcggaagcagatgctgctgccgccacggcggcggcggctgccagctcctgagctctgtaactgtcacactgcacctgagctgaacttgaaaagagagtgaaggggcgattgggcgaacgcttttggcagacacagagggtgtttgtagacgtgggggaggagaatctctattaacgccccccaccgtaaccactgcacatcacctccatctctgcaaatacagcccgaggagtagaggcagcagcagctggacccccaaagagagacgtggggcagcggctgtgaccgcatctcctgagctacaacaacaggtcgcctttttgagactcctttggcgggaagggctacttggaaaggaaggtttgaaagagtgagaagggtaggtgtaagggttccctaattcgtcgaaagaattctattgggtgactctcgttcgtcttctctatcctacactccacatactgaccctatattatccagactgtgccggggagaaatcaaaaacacctgtttgaagaaacggctgcacctgtgtgcttatttgtgccagagggtggcctagcccacctgcaggaagagatttggctgggttctgttgagggtgattgttaggacgttgtattttgttgccattattccaaatacctgtcttggagggaaagttgcccttctgagaactgtgactttaccaggagccctatcttggaataagagttacacctctggaccacgtttctcactagtactttgcttgactggaggaagtgggtgacttttggctgcttcggtgacccattgtagacgcctcgttacccttcttccttccgcttcaagtaatcatggcggcgggggtggcagcgtggctgccttttgcaagggcagcggctatcgggtggatgcctgtggcctcggggcctatgccggctcccccgaggcaggagaggaaaaggacccaagatgctctcattgtgctgaatgtgagtggcacccgcttccagacgtggcaggacaccctggaacgttacccagacactctactgggcagttctgagagggactttttctaccacccagaaactcagcagtatttctttgaccgtgacccagacatcttccgccacatcctgaatttctaccgcactgggaagctccactatcctcgccacgagtgcatctctgcttacgatgaagaactggccttctttggcctcatcccggaaatcatcggcgactgctgttatgaggagtacaaggatcgcaggcgagagaacgccgagcgcctgcaggacgacgcggataccgacaccgctggggagagcgccttgcccaccatgactgcaaggcagagggtctggagggccttcgagaacccccacaccagcacgatggccctggtgttctactatgtcacggggtttttcattgccgtctctgtcatcgcgaatgtggtggaaacagtgccgtgcggatcaagcccaggtcacattaaagaactgccctgtggagagcggtatgctgtggccttcttctgcttggacacggcctgcgtcatgatcttcacagttgagtatttgcttcgcctggctgcagcgcctagtcgttaccgttttgtgcgtagtgtcatgagtatcatcgacgtggtggccatcctgccttattacattgggctggtgatgacagacaatgaggacgtcagcggagcctttgtcacactccgagtcttccgggtcttcaggatctttaagttttcccgccactctcaaggcctgcgcatcctggggtacacactgaagagttgtgcctcagaattgggcttcttgcttttctcgctcaccatggctatcatcatcttcgctacagttatgttctacgcagagaaggggtcttcggctagcaagttcaccagcatccctgcagccttctggtataccatcgtcaccatgacaacactagggtatggtgacatggtgccaaaaaccatagcagggaagatttttggttctatctgttcgctgagtggggtcttggtcattgctctacctgttccggtgattgtatccaacttcagtcgcatctaccaccagaatcaacgagcagacaaacgaagggcacaaaagaaagctagactggccaggatccgggcagccaaaagcggaagcgcaaatgcttacatgcagagcaaacggaatggtttactcagtaatcagctgcagtcctcagaggatgagcaggcttttgttagcaaatccggctccagctttgaaacccagcaccaccacctgcttcactgcctggaaaaaaccacgaatcacgagtttgtggacgaacaagtctttgaagaaagctgcatggaagttgcaactgttaatcgtccttcaagtcacagtccttcactgtcttcacaacaaggagtcaccagcacctgctgttcacgacgacacaaaaaaacttttcgcatcccaaatgccaatgtatcaggaagccatcaaggtagtatacaagaactcagcacgattcagatcagatgtgtggagagaacacctctgtctaacagccgatccagtttaaatgccaaaatggaagagtgtgttaaactaaactgtgaacaaccttatgtgactacagcaataataagcatcccaacacctccagtaaccacaccagaaggagacgataggccagaatcccctgagtactcaggaggaaatattgtcagagtttctgctttgtaagacaattggaataaggtctaagagaattcgagccctggctgtgaaaagaatctcaacatagaagaaagaagaaacaataaatattctgcagattaatgcagcaaagaaagaaggttggtagtgaaacacaaagcttccaatcttaaggatgtgaataaaaccaccaaatggcatttctagacagtttgacctgttatacagagtaatattctgtggccctttgactttgtgaatgagcacaatgaaatgccgcctactgatgcttcttatgatcagaactcttttttaataaaataaataacataaatcgttgaacataatgttccagttgaatgcaaaacaaaaaaaatatggaaaacattttgataaaattttttcctgttaaaaccatgaacattggctatgatgaagattattacatatgaaaaaaaaactcacacaacatatttgtattgactgaaggaaaccatcataatgcatgctagaattctttgaagcagtgatctcagtttccttatgttgtcttcagaataggcatgataaactataattgtagaaaggggtaatttctgtgcacttacaacaagctgagtgttcatgttccatggtgggctgtgcaaataaactccttttagacctgcagtatttctcatggggatgctcattagtaaatctaaagtgttcagatagttcagtattcattatcgtttaactttgcacctagatactgttacaactgcaataatttgttgtacaactgttgtatcaggaatcaggatttttttgttgttgtactttccagatccttatagatacggtaagagccacattcgtagaaaaacttctggtgtggccaggttttaggtaactttttaatccaaaactattgtgccataaatgtttttcagtaatattttttggtccactgtattcctgtgacacagtgcattatctgttcttgtatttctatagcacctctctattgggtttatcatcatcaacaagactactgtttactgtagttcaagtgactttcctacttttgtatttccaaaaaaaattatcttgtaagtagcttgtcatcaatccccttgtcgaaaactagaaaaaaaggagttgacccatataaattatctctaacgtctttgttgtttatggaaaagcccagatactggatatatcactatgtattttatgaacagaattgactgggactaatatcacaggatcaatcatctcagaatcttacttgatgcattatttattttgctttagatcttgaatacattttgagaataactaatgtggattgaaatgtagagatacactggagtgctttatttagcaatatttgatgaaagcatgctttctacgccattcaggaaggcagcacaaatttatctcagaaaggttcctgtgtattgcaaggtacaattttctccaataaatcaggagaacaggagtttgatgatgcaaagttgatctctgtacatttaagtgaaaagtctttataacttttcacccttaaaatatttcagcagacatgtctgcacatgacagtgtaaaaaagtttaatgtcaaatgcaaagtttttattcattccaagccaccactgtaaggaataaagcttagcttctgtacatggaaagagctaataattatccctctgtcagagatgagatttttaaatgcttatgatatttaatcataaaaagggattaatccaaccattttctagtaaagccagaaattcttgcttcccatttctagaatagtttctagaacagtgctatgcacatattagatcttaataaacatttgctgagtgaaagtaagataaactcaactatctcttgggaagaactggcttcattcctagtacatcttttaaaaagttactaattttccagcagtacaaatattaacaattatattaacacctgcctcatgtcagtttatgcttctagagcaatgtctagtgaaacttatctgatggcatttattgaaaaccttctaaaaagtagactaaggaaaccataatcagaattactatgtcttttgattcccaatgagaagttctattttcatgttcttaatattacatacaagaaaatgcagttaggttatttcaattgacaattctgcctcctcttttgatttatcacttacccaaaattattaattttattaggcttttggaaaagaaaaaaaactttttgatgttttaggtgatttaaaaatataccgtgttggtggtgaatgactattgatgactgtgttaagtgcatctgtattgtaagtgaaatgtaattatttctgtgtaccatatggagtaactaaggtcattgtttttgacaattttgtttgaaattcatatatcttatttcaaaggatagcataatatctgcattatgctggaaaaaaatagacctttggagaatacttaaataaaacatgtgcatgcttgaacagg

SEQ ID NO: 173656 - DNA, 1893 bp, Artificial Sequence
  derived and/or modified sequence
atggctgcaggagtcgccgcttggttaccctttgcaagggcggctgccatcgggtggatgcccgtggcctctggtcccatgccagcacccccacgacaggagagaaagagaacacaggatgcccttatcgtcctgaacgtcagtggaacacgtttccagacttggcaggacactcttgaacgctaccccgacactctcttggggtcaagtgagcgggactttttctatcaccccgaaacacaacaatatttctttgacagagaccccgacatattcagacatatcctgaacttctatcgaaccggaaaacttcattatcctcgccacgagtgtatcagtgcatacgatgaagagctggcctttttcggtctgatacctgagatcattggagactgttgctatgaggagtacaaggacagaaggcgggagaatgccgaacggttgcaagatgacgctgacaccgacaccgctggtgaatctgcgttacccaccatgaccgcccgtcagagggtctggagggcctttgagaacccacacacatctacgatggcgctcgtgttctactatgtcacaggtttttttatagcggtgagcgtgatcgccaacgtcgtggagaccgtgccctgcggctcctcccccggtcacatcaaagagcttccttgcggggagagatatgccgtagcctttttctgcctggataccgcttgcgtcatgatcttcaccgtcgaatacctgttacgtctagctgccgcaccttcccggtatcggttcgtgaggtccgtaatgagcataatagacgtcgtcgccatacttccttactacattggcctcgtaatgactgacaatgaggatgtgtccggggcttttgtgacactgagggtgtttcgggtatttcgcattttcaagttctctaggcatagccagggcctcaggatcttaggctataccctcaagagctgtgccagcgagttgggattccttttattcagcctgacaatggctatcattattttcgccaccgttatgttctacgccgaaaagggctcgtctgctagcaagtttacctcaattccagccgctttctggtataccattgtcactatgacaacactcggttatggcgacatggtgcccaagaccatcgccggaaaaatctttggctccatttgttccttgtccggggttctggttattgcactgccagtccctgtcattgtttccaatttctcacgtatataccaccaaaaccagagggctgataagcggcgtgcccaaaagaaggcgcgactggcccgaattcgtgcagccaagagcggctcagcgaacgcatatatgcagtctaagaggaacgggctcctttccaaccagctgcagtcaagtgaggacgaacaggctttcgtgagtaaaagtgggtcttcattcgagacccagcatcatcatctgctgcattgtctcgagaaaaccactaaccacgagtttgtggacgagcaggttttcgaggagagttgcatggaagtggcgacagttaatcgtccttcaagccactctccctctctctccagtcaacagggcgtcacaagtacttgctgcagccggcgacataaaaagacattcaggataccaaatgccaatgtgagcggaagccaccagggtagcatccaggagttatcaacaatccagatccggtgtgtagagaggaccccactgtccaacagtaggtcttctctaaacgcgaaaatggaggagtgcgtgaaactcaattgtgagcagccttatgtgactactgctatcatttctatccccacccctcccgtaactacccctgagggggatgacagacccgagtccccggagtactctggcggtaatattgtaagagtttcagctctctag

SEQ ID NO: 173657 - DNA, 1893 bp, Artificial Sequence
  derived and/or modified sequence
atggccgccggcgtggccgcctggctgcccttcgccagagccgccgccatcggctggatgcccgtggccagcggccccatgcccgccccccccagacaggagagaaagagaacccaggacgccctgatcgtgctgaacgtgagcggcaccagattccagacctggcaggacaccctggagagataccccgacaccctgctgggcagcagcgagagagacttcttctaccaccccgagacccagcagtacttcttcgacagagaccccgacatcttcagacacatcctgaacttctacagaaccggcaagctgcactaccccagacacgagtgcatcagcgcctacgacgaggagctggccttcttcggcctgatccccgagatcatcggcgactgctgctacgaggagtacaaggacagaagaagagagaacgccgagagactgcaggacgacgccgacaccgacaccgccggcgagagcgccctgcccaccatgaccgccagacagagagtgtggagagccttcgagaacccccacaccagcaccatggccctggtgttctactacgtgaccggcttcttcatcgccgtgagcgtgatcgccaacgtggtggagaccgtgccctgcggcagcagccccggccacatcaaggagctgccctgcggcgagagatacgccgtggccttcttctgcctggacaccgcctgcgtgatgatcttcaccgtggagtacctgctgagactggccgccgcccccagcagatacagattcgtgagaagcgtgatgagcatcatcgacgtggtggccatcctgccctactacatcggcctggtgatgaccgacaacgaggacgtgagcggcgccttcgtgaccctgagagtgttcagagtgttcagaatcttcaagttcagcagacacagccagggcctgagaatcctgggctacaccctgaagagctgcgccagcgagctgggcttcctgctgttcagcctgaccatggccatcatcatcttcgccaccgtgatgttctacgccgagaagggcagcagcgccagcaagttcaccagcatccccgccgccttctggtacaccatcgtgaccatgaccaccctgggctacggcgacatggtgcccaagaccatcgccggcaagatcttcggcagcatctgcagcctgagcggcgtgctggtgatcgccctgcccgtgcccgtgatcgtgagcaacttcagcagaatctaccaccagaaccagagagccgacaagagaagagcccagaagaaggccagactggccagaatcagagccgccaagagcggcagcgccaacgcctacatgcagagcaagagaaacggcctgctgagcaaccagctgcagagcagcgaggacgagcaggccttcgtgagcaagagcggcagcagcttcgagacccagcaccaccacctgctgcactgcctggagaagaccaccaaccacgagttcgtggacgagcaggtgttcgaggagagctgcatggaggtggccaccgtgaacagacccagcagccacagccccagcctgagcagccagcagggcgtgaccagcacctgctgcagcagaagacacaagaagaccttcagaatccccaacgccaacgtgagcggcagccaccagggcagcatccaggagctgagcaccatccagatcagatgcgtggagagaacccccctgagcaacagcagaagcagcctgaacgccaagatggaggagtgcgtgaagctgaactgcgagcagccctacgtgaccaccgccatcatcagcatccccaccccccccgtgaccacccccgagggcgacgacagacccgagagccccgagtacagcggcggcaacatcgtgagagtgagcgccctgtag

SEQ ID NO: 173658 - protein, 142 aa, Artificial Sequence
  derived and/or modified sequence
MNCSESQRLRTLLSRLLLELHHRGNASGLGAGPRPSMGMGVVPDPFVGREVTSAKGDDAYLYILLIMIFYACLAGGLILAYTRSRKLVEAKDEPSQACAEHEWAPGGALTADAEAAAGSQAEGRRQLASEGLPALAQGAERV

SEQ ID NO: 173659 - DNA, 429 bp, Artificial Sequence
  derived and/or modified sequence
atgaattgtagcgagagccaaaggctgcggaccctacttagcaggctgctgcttgaattacaccaccgcggcaacgcaagcggcttaggagccggccctcgcccaagcatggggatgggcgttgtgcccgatcctttcgtgggtagagaggtaacatccgctaagggcgatgacgcttatctgtacattctgttaatcatgattttctatgcttgccttgctggcgggctaattctggcctataccagatcccgcaaactagttgaggcgaaggacgaacctagccaggcctgcgccgaacacgaatgggcaccgggaggtgcattgaccgccgacgctgaggctgctgccgggtcacaggcagagggcagacgccagttggcctcagaggggctgccagcccttgcccagggcgccgagcgcgtatag

SEQ ID NO: 173660 - DNA, 1465 bp, Artificial Sequence
  derived and/or modified sequence
cgcgctcgccggagagctgggtgctaccgctgtttccgctgctgagccctgcccgccggccggcccgctcgctagctcgcttcccctcgcccagggggaaaggtcagcagcgtcctggagccgccgtgtcactccccgaaagccatgaactgcagcgagagccagcggctgcgaacccttctgagccgcctgttgctcgagctgcaccaccggggtaatgccagcggcttgggcgctggccctcgtcccagcatgggcatgggggtcgtgcctgaccctttcgtgggccgcgaggtgaccagcgccaagggcgacgacgcctatctctacatcctgctcatcatgatcttctacgcctgcttggccggaggcctcatcctggcctacacccgctcccgtaagctcgtcgaggccaaggacgagccgtcccaggcttgcgccgagcacgaatgggccccgggaggcgccctgaccgccgacgccgaggctgccgcgggctcccaggccgagggccgccgccagcttgcctccgaggggctgcctgccctcgcccagggcgctgagcgggtctaaaaccacagccccagattgctggttcgcgccctcctcatctcgctcatccctgggcgcgcctcccaccttccacccccaactcccttccagggttcgcctcatctgaggcccagataatggtgagaggccaggagaccttgtctggaaggccctggaaggagaagcaccaccttacccattcgggccagtttctccctcttcacccctgcgcctccacccctaccccgcacatccaactgcactaaactgcctctgctctcttgtcttcagacagccctgacagcacgctccagccctctgggaactgaatccaacacgtccaacacttggcactgaactgaagcaatgcattctatcagaactctgggccgtctaactggcagctgctccaggggctgccagggactgctcactctgcagagccaacgggcttgccaggccgactgcagcagctccagcttccagttgccttagggacagagacaaaggaaatgaagagacctcagacatcttttccctccctctctctttcagcagggagctagcaggacactaggaccagtctgtgggatagaatgaacttaatgggggacggaagggggaggagtgctcaacggggagggaaatgatctatgactccaaccgtatgattttcttgcctccccagttttcatcccagtggtaacgcctgatttttggtagctatgccatcttctgctgaggattaccattactgggtgtatcaccccagtacttccaaatgcctctcctctattgattcagttgttattgcagtgtctgcttcatccgtggaacttgaggctcagatgccccctgctctgtaaccctggggaatgtcagaggcaggtaataaaggttgtttaaacaataa

SEQ ID NO: 173661 - DNA, 429 bp, Artificial Sequence
  derived and/or modified sequence
atgaactgcagcgagagccagaggctgcggaccctgctgagccggctgctgctggagctgcaccacagaggaaatgccagcggcctgggcgccggcccccggcccagcatgggcatgggcgtggtgcctgacccctttgtgggccgggaggtgaccagcgccaagggagatgatgcctacctgtacatcctgctgatcatgatcttctacgcctgcctggccggcggcctcatcctggcctacaccaggagcaggaagctggtggaggccaaggatgagcccagccaggcctgtgccgagcacgagtgggcccctggaggagccctgacagcagatgctgaggccgctgctggcagccaggccgagggccggcggcagctggccagcgagggcctgcctgccctggcccagggcgctgagcgggtgtag

SEQ ID NO: 173662 - DNA, 429 bp, Artificial Sequence
  derived and/or modified sequence
atgaactgcagcgagagccagcggctgcggaccctgctgagccggttactcctcgagttacatcatagaggtaatgcatcaggcctgggcgccggtcccagaccttcgatgggcatgggagtcgtgccagatccatttgtgggccgggaggtgacctccgccaagggtgatgacgcctacctgtatattctcttgatcatgatcttctacgcatgcctagcgggaggactgatactggcttatactcgttccaggaagctggtggaggccaaagatgagccatcgcaggcttgtgctgaacacgagtgggcgcccggaggggccttgacagccgatgcagaggcagccgctggttctcaggcagaagggagacggcagctggcctcggaaggactgcccgccttggcccagggcgctgagagagtctag

SEQ ID NO: 173663 - DNA, 429 bp, Artificial Sequence
  derived and/or modified sequence
atgaattgcagtgagagccagcggttgcggacattattgagccgactcctcttggagttacaccacagagggaatgcctcaggactaggcgcaggacctcgaccatccatgggaatgggcgtcgtgcctgacccgttcgtgggtcgtgaagtaacaagcgcaaagggcgatgacgcttacctgtatatcctactcatcatgattttctacgcttgcctagctggagggctgatcttggcgtacaccaggtcaagaaagctcgtggaagctaaagacgagcctagccaggcctgtgccgaacatgaatgggcgccagggggagccctcaccgctgatgctgaagcggcagctgggtcacaggccgagggacggaggcagcttgcctctgagggactccccgctttagcccaaggcgctgagagggtgtag

SEQ ID NO: 173664 - DNA, 429 bp, Artificial Sequence
  derived and/or modified sequence
atgaactgcagcgagagccagagactgagaaccctgctgagcagactgctgctggagctgcaccacagaggcaacgccagcggcctgggcgccggccccagacccagcatgggcatgggcgtggtgcccgaccccttcgtgggcagagaggtgaccagcgccaagggcgacgacgcctacctgtacatcctgctgatcatgatcttctacgcctgcctggccggcggcctgatcctggcctacaccagaagcagaaagctggtggaggccaaggacgagcccagccaggcctgcgccgagcacgagtgggcccccggcggcgccctgaccgccgacgccgaggccgccgccggcagccaggccgagggcagaagacagctggccagcgagggcctgcccgccctggcccagggcgccgagagagtgtag

SEQ ID NO: 173665 - protein, 1083 aa, Artificial Sequence
  derived and/or modified sequence
MPAMRGLLAPQNTFLDTIATRFDGTHSNFVLGNAQVAGLFPVVYCSDGFCDLTGFSRAEVMQRGCACSFLYGPDTSELVRQQIRKALDEHKEFKAELILYRKSGLPFWCLLDVIPIKNEKGEVALFLVSHKDISETKNRGGPDRWKETGGGRRRYGRARSKGFNANRRRSRAVLYHLSGHLQKQPKGKHKLNKGVFGEKPNLPEYKVAAIRKSPFILLHCGALRATWDGFILLATLYVAVTVPYSVCVSTAREPSAARGPPSVCDLAVEVLFILDIVLNFRTTFVSKSGQVVFAPKSICLHYVTTWFLLDVIAALPFDLLHAFKVNVYFGAHLLKTVRLLRLLRLLPRLDRYSQYSAVVLTLLMAVFALLAHWVACVWFYIGQREIESSESELPEIGWLQELARRLETPYYLVGRRPAGGNSSGQSDNCSSSSEANGTGLELLGGPSLRSAYITSLYFALSSLTSVGFGNVSANTDTEKIFSICTMLIGALMHAVVFGNVTAIIQRMYARRFLYHSRTRDLRDYIRIHRIPKPLKQRMLEYFQATWAVNNGIDTTELLQSLPDELRADIAMHLHKEVLQLPLFEAASRGCLRALSLALRPAFCTPGEYLIHQGDALQALYFVCSGSMEVLKGGTVLAILGKGDLIGCELPRREQVVKANADVKGLTYCVLQCLQLAGLHDSLALYPEFAPRFSRGLRGELSYNLGAGGGSAEVDTSSLSGDNTLMSTLEEKETDGEQGPTVSPAPADEPSSPLLSPGCTSSSSAAKLLSPRRTAPRPRLGGRGRPGRAGALKAEAGPSAPPRALEGLRLPPMPWNVPPDLSPRVVDGIEDGCGSDQPKFSFRVGQSGPECSSSPSPGPESGLLTVPHGPSEARNTDTLDKLRQAVTELSEQVLQMREGLQSLRQAVQLVLAPHREGPCPRASGEGPCPASTSGLLQPLCVDTGASSYCLQPPAGSVLSGTWPHPRPGPPPLMAPWPWGPPASQSSPWPRATAFWTSTSDSEPPASGDLCSEPSTPASPPPSEEGARTGPAEPVSQAEATSTGEPPPGSGGLALPWDPHSLEMVLIGCHGSGTVQWTQEEGTGV

SEQ ID NO: 173666 - DNA, 3252 bp, Artificial Sequence
  derived and/or modified sequence
atgcccgctatgcgcggactgctggcaccacagaacacattcctcgatacaatcgccactcggttcgatggaacccacagcaatttcgtgctgggaaatgcacaagtggctggcctattcccagtcgtctactgttccgatggattttgtgatcttacaggcttctccagggcggaggtgatgcaacgggggtgcgcgtgctcttttctttatggccctgacacttccgaactggtgagacagcagatacgcaaagccctcgacgaacataaggagtttaaggcagaattgatcctctatcgaaaatccggcctgcctttttggtgtctcctcgacgtcatccctattaaaaatgaaaaaggggaagtggcattgtttctggtgtcgcataaggacatctctgagacgaaaaatcggggcggaccggatcgctggaaggagacaggcggtgggcgaaggagatacggacgagctcgctctaaggggtttaacgcaaaccggaggcggtcaagagcggtactataccatctgtccggacatctgcagaaacaacccaaaggcaagcacaaattaaacaagggggtgttcggcgaaaagcccaatttaccagagtacaaggtggcagccattagaaagtcacctttcatcttgctccactgcggtgctttgcgggccacatgggacggatttatactattggcaaccttatacgtggccgtcaccgtaccatactcagtgtgtgtgagtaccgctagagagccatcggccgcccgaggacctcctagcgtttgtgacctggccgtagaggtcttatttatactggacattgtgctaaatttccgcacaacattcgtgagcaagtccggccaagtcgtgttcgcgccgaaatcaatctgtctacactacgtgactacgtggttccttttagatgtaatcgcagcgttgccatttgacctgctgcacgcattcaaagtgaacgtgtactttggggcgcacctcttgaagacagtgagactgctgcggctgctgaggctgctgccacgtctggaccgttactcccaatactcagctgttgtgctaaccctgttgatggcagtgtttgctctgctcgcccattgggtggcctgcgtgtggttttacatcggccagagggaaatcgaatcttccgagagcgagctcccagagattggctggctgcaggagcttgctcgacgcttggaaaccccctactatctggtggggcgcagaccagccggcgggaatagctcggggcagagcgataattgctcctcatcctcggaggccaacggtaccggactggaactgctcggtggaccctcgctgcggagcgcatatattaccagtttgtactttgctcttagctctctgaccagtgtcggcttcggcaatgtttcagctaatacagacacagaaaaaatctttagcatctgtactatgcttataggcgctctgatgcatgccgtagtgtttgggaatgtgacagctatcattcagcgcatgtacgctcgtagattcctctatcactccagaacccgggacttacgggattacattaggattcaccgcattccaaaaccgctcaaacaacgtatgcttgagtactttcaggccacctgggccgtaaacaatggcatcgataccaccgaactcctccaatcccttccagatgaattgcgcgccgacattgccatgcatctgcataaagaggtgctacagctcccgctgtttgaggccgcaagcagggggtgtctccgcgccttgtcactggctctgagacccgccttttgcacccctggtgaatatttgatccaccagggtgatgctctgcaggctctttatttcgtgtgttctggctcaatggaagtcttgaagggggggactgttcttgctatattaggcaaaggcgatttgataggctgcgagctgcctcgccgggagcaggtcgtcaaggccaacgcagacgtcaagggactcacttattgtgtgctacagtgcctccagctggctggtttgcacgactcactggccctgtaccccgagttcgcccctcgtttttcgcgcggactccggggggagctgtcttacaatctgggcgctggcggtggctcagccgaggtggatacctctagtctgtctggggataatacactgatgtctacgttggaggagaaagagactgatggcgaacaagggcccacggtaagccccgctccggcagacgagccctctagcccgcttctctcccctgggtgtaccagctccagttcagccgcaaaactgctcagcccccggagaacagcgcccagacccagattaggaggaagaggaagacccgggcgtgcgggagccctgaaagctgaagcagggccgtctgccccacccagagcgctggaagggctcagactccccccaatgccttggaacgtgccaccagatttgagcccacgagtggtggacggaatcgaagatggatgtggatctgaccaacccaaattcagttttagagtgggccagagcggacccgaatgctccagctccccctcccctggacctgagtctggcctacttaccgtaccgcacggcccatcagaggccagaaacaccgatacattggacaaactgcgacaggctgttacggaattatccgagcaagtgctccagatgcgggagggattacaatcactccggcaggcggttcagcttgtcctcgctcctcacagagagggcccctgtccccgtgcatccggggaaggaccctgcccagctagcactagtggcctcttgcagcccctgtgtgtcgatactggagctagcagctactgtctgcaacctcctgccggctcagttctgtcaggcacatggccccatccaagacccgggccaccgccactcatggccccctggccatggggaccccccgcttcccagtcctcaccgtggccacgggctaccgccttttggacgagcacatcagacagtgaaccccctgccagtggcgatctatgctctgagccttccaccccggcatctcctcctcccagtgaggaaggggcgcgcacaggtccagccgaacctgtatctcaggccgaggctacatccactggtgagcctccgccaggcagcgggggcctggcactgccctgggatccccattccctcgaaatggtgcttataggctgtcatggctccggaactgtgcagtggactcaggaggagggtaccggtgtctag

SEQ ID NO: 173667 - DNA, 3252 bp, Artificial Sequence
  derived and/or modified sequence
atgcctgccatgaggggcctgctggccccccagaacaccttcctggacaccatcgccaccaggtttgatggcacccacagcaactttgtgctgggcaatgcccaggtggccggcctcttccctgtggtgtactgcagtgatggcttctgtgacctgaccggcttcagcagagctgaggtgatgcagaggggctgtgcctgcagcttcctgtatggccctgacaccagcgagctggtgcggcagcagatcaggaaggccctggatgagcacaaggagttcaaggccgagctgatcctgtacaggaagagcggcctgcccttctggtgcctgctggatgtgatccccatcaagaatgagaagggggaggtggccctcttcctggtgagccacaaggacatcagcgagaccaagaacagaggaggccctgaccgctggaaggagaccggcggcggcagaagaagatatggccgggcccggagcaagggcttcaatgccaacagaagaagaagcagagctgtgctgtaccacctgagcggccacctgcagaagcagcccaagggcaagcacaagctgaacaagggcgtgtttggagagaagcccaacctgcctgagtacaaggtggccgccatcaggaagagccccttcatcctgctgcactgtggggccctgcgggccacctgggatggcttcatcctgctggccaccctgtatgtggccgtgacagtgccctacagcgtgtgtgtgtccacagcccgggagcccagcgctgcccggggcccccccagcgtgtgtgacctggccgtggaggtgctcttcatcctggacatcgtgctgaacttccgcaccacctttgtgtccaagagcggccaggtggtgtttgcccccaagagcatctgcctgcactacgtgaccacctggttcctgctggatgtgattgctgccctgccctttgacctgctgcacgccttcaaggtgaatgtgtactttggagcccacctgctgaagacagtgcggctgctgcggctgctgcggctgctgccccggctggaccgctacagccagtacagcgctgtggtgctgaccctgctgatggctgtgtttgccctgctggcccactgggtggcctgtgtgtggttctacatcggccagcgggagattgagagcagcgagagcgagctgcctgagatcggctggctgcaggagctggcccggcggctggagaccccctactacctggtgggcagaagacctgctgggggcaacagcagcggccagagcgacaactgcagcagcagcagcgaggccaacggcaccggcctggagctgctgggcggccccagcctgcggagcgcctacatcaccagcctgtactttgccctgagcagcctgacctctgtgggctttggaaatgtgtctgccaacacagacacagagaagatcttcagcatctgcaccatgctgattggagccctgatgcatgctgtggtgtttggaaatgtgacagccatcatccagaggatgtatgcccggcgcttcctgtaccacagcaggacccgggacctgcgggactacatccgcatccaccgcatccccaagcccctgaagcagaggatgctggagtacttccaggccacctgggccgtgaacaacggcatcgacaccacagagctgctgcagagcctgcctgatgagctgcgggctgacatcgccatgcacctgcacaaggaggtgctgcagctgcccctgtttgaagctgccagccggggctgcctgcgggccctgagcctggccctgcggcctgccttctgcaccccaggagagtacctgatccaccagggagatgccctgcaggccctgtactttgtgtgcagcggctccatggaggtgctgaagggcggcaccgtgctggccatcctgggcaaaggagacctgattggctgtgagctgccccggcgggagcaggtggtgaaggccaatgctgatgtgaagggcctgacctactgtgtgctgcagtgcctgcagctggccggcctgcatgacagcctggccctgtacccagagtttgccccccgcttcagccggggcctgcggggggagctgagctacaacctgggcgctgggggcggcagcgctgaggtggacaccagcagcctgagcggggacaacaccctgatgagcaccctggaggagaaggagacagatggagagcagggccccaccgtgtccccagccccagcagatgagcccagcagccccctgctgagccctggctgcaccagcagcagcagcgctgccaagctgctgagccccaggagaacagccccccggccccggctgggcggccggggccggcccggccgggccggggccctgaaggccgaggccggccccagcgccccaccccgggccctggagggcctgcggctgccccccatgccctggaatgtgcccccagacctgagcccccgggtggtggatggcattgaagatggctgcggcagtgaccagcccaagttctccttccgggtgggccagagcggcccagaatgtagcagcagccccagccctggccctgagagcggcctgctgactgtgccccacggccccagcgaggccaggaacacagacaccctggacaagctgcggcaggccgtgacagagctgtctgagcaggtgctgcagatgagggagggcctgcagagcctgcggcaggccgtgcagctggtgctggccccccaccgggagggcccctgcccccgggccagcggggagggcccctgcccagccagcaccagcggcctgctgcagcccctgtgtgtggacaccggggccagcagctactgcctgcagcccccagctggctctgtgctgagcggcacctggccccacccccggcccggccccccacccctgatggccccctggccctggggccccccagccagccagagcagcccctggccccgggccacagccttctggaccagcaccagtgacagcgagcccccagccagcggggacctgtgcagcgagcccagcaccccagccagccccccaccttctgaggagggcgccaggactggacctgctgagcctgtgtcccaggccgaggccaccagcactggagagcccccacctggcagcggcggcctggccctgccctgggacccccacagcctggagatggtgctgattggctgccacggcagcggcaccgtgcagtggacccaggaggagggcactggagtgtag

SEQ ID NO: 173668 - DNA, 3252 bp, Artificial Sequence
  derived and/or modified sequence
atgcccgccatgcggggcctgctggccccccagaacaccttcctggataccatagcaactagattcgacggaacccactccaattttgtgttaggcaatgcacaggtggccgggcttttccccgtggtctattgcagcgatggcttctgtgacctcactggcttctcccgggccgaggtgatgcaacgtggctgcgcatgctcatttctctacggccccgacacctctgagctggtgaggcaacagataaggaaagccttagacgagcataaggaatttaaggccgaactgatcctatataggaagtccggcttaccattctggtgcctgctggacgtgattcctataaagaacgaaaagggggaggttgctctcttcctcgtgtctcataaggacatctccgaaacgaaaaatcgcggtggtcctgatcgctggaaggagacaggtggaggtcggcggcgctatggacgagctcgatccaagggatttaacgctaatcgtagacgctcacgcgccgtgttgtaccatctgtcagggcatctgcaaaaacagcctaaggggaagcacaaacttaataaaggggtttttggagaaaaacccaaccttcctgagtacaaagtcgcggcaatacggaagagtccatttatccttctgcattgcggcgccctccgtgcaacctgggacggctttattctactggcaacactttacgttgcagtcactgttccttacagtgtgtgcgtcagcacggctcgggaaccatcagctgcccgaggacctcctagtgtgtgtgacctggcagtggaggtactgttcatcctcgatatcgtcctgaacttcaggacaaccttcgtgagcaaaagtggtcaggttgtctttgcccccaagtccatctgcctgcactacgtcaccacctggtttttgctggacgtgattgcggcgctgccctttgaccttttgcacgcatttaaggtcaacgtctactttggtgcccaccttctcaagactgtgaggctcctgcgactgctgcgacttctgccaaggctggatagatattcccagtacagcgctgttgtacttacgttgctcatggccgtattcgccttgctggcccactgggtggcctgtgtgtggttttacatcggtcagcgggagatcgaaagttcagagtcagagttgccggaaatcggctggctgcaagagcttgcgcgccgcttggagaccccatactacctcgtcggtagacggcccgccggggggaactcctctgggcaaagcgataattgttctagctccagcgaggctaacggcaccgggctggagctcctgggtggcccaagtttgcgctctgcatatattacaagcttgtatttcgcactgtctagcctcacctcagtcggctttggtaacgtgtctgctaataccgacactgagaaaattttcagcatctgtaccatgctaatcggggccctgatgcacgctgtcgtgttcggcaatgttaccgccatcattcagcgcatgtacgcacgaagattcctgtaccactcccggacacgtgacctgcgcgattatatccgcatacataggatcccgaagccgctgaagcagcgcatgcttgaatactttcaggccacatgggctgtcaacaatgggattgataccacagagctgctgcaaagcctacctgacgaactgcgggccgacattgccatgcatctacataaggaagtgctgcagctgccactcttcgaagccgcctcaagagggtgccttcgcgcactttctctggccctgaggccagccttttgtactccgggcgagtaccttatccatcaaggcgacgcccttcaggctctgtactttgtgtgttcaggcagtatggaggttctgaaaggcggcacggtgctggctatccttggcaaaggagatcttatcggatgtgaactgccacgccgtgaacaggtagttaaagccaacgcagacgtcaagggactcacatactgcgttctgcagtgtctgcagttagctggcctccatgacagccttgccctctatcctgaatttgctcccaggtttagtaggggcctgaggggggagttgtcatataatctgggggcaggcgggggcagtgccgaggtggacacttccagcttgtccggagacaatacactgatgtccaccttagaggaaaaagaaactgacggcgagcaaggccccacagttagccctgctccagctgatgaaccatcttcgcccctcctgtcgccaggatgtacgtcaagttctagcgccgcgaagctgctttccccacggcgcacagccccacggcctcggctgggcggtcgtggcagacccggacgtgcaggtgcactcaaggcggaggcaggaccctctgctccaccaagggcactcgaagggctgagattgccccccatgccttggaatgtgcctcctgacctgtcccctagagtggtggacggtatagaggatgggtgtggaagcgatcagccaaaattctcttttagggtaggccaatccggccctgagtgctcttcctcgccctccccaggaccggagtcgggactgttaacagtacctcacggcccatccgaggccaggaatacggatacactggataagctccgccaggcagttaccgaactgtctgaacaagtactccagatgagagaggggctgcagtccctaaggcaggcggtacagctggttctggcaccccatcgggagggcccgtgcccacgtgcctcaggtgaaggaccctgtcccgcttctaccagcggcttattgcagcctctgtgcgtggacacaggggcgagttcttattgtcttcaacccccggcagggtccgtcctgagcggaacctggccccacccaaggcccggccccccacccctaatggctccctggccatggggtccaccagcctctcagagcagtccctggccgcgagctaccgctttctggacctccacaagtgactcagagcccccagcttccggggacttatgtagcgaaccgtcaacaccagcttcccctcccccttccgaagagggggctcggacggggccggctgagccggtgtctcaggcggaggctacttcgacaggggagccaccccccggctctggcggtctggccttaccttgggatcctcattctctcgaaatggtacttattgggtgccatggatccgggacagtgcagtggactcaggaggaaggcacaggcgtgtag

SEQ ID NO: 173669 - DNA, 3853 bp, Artificial Sequence
  derived and/or modified sequence
ggccgcggggcctggagcccgggatttgtgggcggcgagggcgcgaggggccgcgcgccatgctccgggccccgacggcgcggacgccccctcgcgcgccagcgtccggcgcgaccccggatcccggtctgcgcattgccccccgacggctgcgctagggagcgcggggcccggcggggggcggccgagctgggcgccctcccccggcgcggagtccccgcaccccggagggatggggcgggcagccgcgggcgcctaagatgccggccatgcggggcctcctggcgccgcagaacaccttcctggacaccatcgctacgcgcttcgacggcacgcacagtaacttcgtgctgggcaacgcccaggtggcggggctcttccccgtggtctactgctctgatggcttctgtgacctcacgggcttctcccgggctgaggtcatgcagcggggctgtgcctgctccttcctttatgggccagacaccagtgagctcgtccgccaacagatccgcaaggccctggacgagcacaaggagttcaaggctgagctgatcctgtaccggaagagcgggctcccgttctggtgtctcctggatgtgatacccataaagaatgagaaaggggaggtggctctcttcctagtctctcacaaggacatcagcgaaaccaagaaccgagggggccccgacagatggaaggagacaggtggtggccggcgccgatatggccgggcacgatccaaaggcttcaatgccaaccggcggcggagccgggccgtgctctaccacctgtccgggcacctgcagaagcagcccaagggcaagcacaagctcaataagggggtgtttggggagaaaccaaacttgcctgagtacaaagtagccgccatccggaagtcgcccttcatcctgttgcactgtggggcactgagagccacctgggatggcttcatcctgctcgccacactctatgtggctgtcactgtgccctacagcgtgtgtgtgagcacagcacgggagcccagtgccgcccgcggcccgcccagcgtctgtgacctggccgtggaggtcctcttcatccttgacattgtgctgaatttccgtaccacattcgtgtccaagtcgggccaggtggtgtttgccccaaagtccatttgcctccactacgtcaccacctggttcctgctggatgtcatcgcagcgctgccctttgacctgctacatgccttcaaggtcaacgtgtacttcggggcccatctgctgaagacggtgcgcctgctgcgcctgctgcgcctgcttccgcggctggaccggtactcgcagtacagcgccgtggtgctgacactgctcatggccgtgttcgccctgctcgcgcactgggtcgcctgcgtctggttttacattggccagcgggagatcgagagcagcgaatccgagctgcctgagattggctggctgcaggagctggcccgccgactggagactccctactacctggtgggccggaggccagctggagggaacagctccggccagagtgacaactgcagcagcagcagcgaggccaacgggacggggctggagctgctgggcggcccgtcgctgcgcagcgcctacatcacctccctctacttcgcactcagcagcctcaccagcgtgggcttcggcaacgtgtccgccaacacggacaccgagaagatcttctccatctgcaccatgctcatcggcgccctgatgcacgcggtggtgtttgggaacgtgacggccatcatccagcgcatgtacgcccgccgctttctgtaccacagccgcacgcgcgacctgcgcgactacatccgcatccaccgtatccccaagcccctcaagcagcgcatgctggagtacttccaggccacctgggcggtgaacaatggcatcgacaccaccgagctgctgcagagcctccctgacgagctgcgcgcagacatcgccatgcacctgcacaaggaggtcctgcagctgccactgtttgaggcggccagccgcggctgcctgcgggcactgtctctggccctgcggcccgccttctgcacgccgggcgagtacctcatccaccaaggcgatgccctgcaggccctctactttgtctgctctggctccatggaggtgctcaagggtggcaccgtgctcgccatcctagggaagggcgacctgatcggctgtgagctgccccggcgggagcaggtggtaaaggccaatgccgacgtgaaggggctgacgtactgcgtcctgcagtgtctgcagctggctggcctgcacgacagccttgcgctgtaccccgagtttgccccgcgcttcagtcgtggcctccgaggggagctcagctacaacctgggtgctgggggaggctctgcagaggtggacaccagctccctgagcggcgacaatacccttatgtccacgctggaggagaaggagacagatggggagcagggccccacggtctccccagccccagctgatgagccctccagccccctgctgtcccctggctgcacctcctcatcctcagctgccaagctgctatccccacgtcgaacagcaccccggcctcgtctaggtggcagagggaggccaggcagggcaggggctttgaaggctgaggctggcccctctgctcccccacgggccctagaggggctacggctgccccccatgccatggaatgtgcccccagatctgagccccagggtagtagatggcattgaagacggctgtggctcggaccagcccaagttctctttccgcgtgggccagtctggcccggaatgtagcagcagcccctcccctggaccagagagcggcctgctcactgttccccatgggcccagcgaggcaaggaacacagacacactggacaagcttcggcaggcggtgacagagctgtcagagcaggtgctgcagatgcgggaaggactgcagtcacttcgccaggctgtgcagcttgtcctggcgccccacagggagggtccgtgccctcgggcatcgggagaggggccgtgcccagccagcacctccgggcttctgcagcctctgtgtgtggacactggggcatcctcctactgcctgcagcccccagctggctctgtcttgagtgggacttggccccaccctcgtccggggcctcctcccctcatggcaccctggccctggggtcccccagcgtctcagagctccccctggcctcgagccacagctttctggacctccacctcagactcagagccccctgcctcaggagacctctgctctgagcccagcacccctgcctcccctcctccttctgaggaaggggctaggactgggcccgcagagcctgtgagccaggctgaggctaccagcactggagagcccccaccagggtcagggggcctggccttgccctgggacccccacagcctggagatggtgcttattggctgccatggctctggcacagtccagtggacccaggaagaaggcacaggggtctgagtaccagccctagaactcagcgttgccaggtgtgctgccatctgctgttcggcccaacctcagagtgaaggcagggtggcagcctccccacggactccatgcggcccgctggctcagggcagggagcctggaagcaaaggaggacctggctcctgactctcagagaggataggctggatccctggggcaggcctctcctcggcctgctcctctgacctcccggtctccctctgcaggctgggggcagaggcctgaggacaaggaagagctttgccatcccctgcatgtgcccctgcctctacctgtccccaaatttttatattaaaaaaaaaaaataaaat

SEQ ID NO: 173670 - DNA, 3252 bp, Artificial Sequence
  derived and/or modified sequence
atgcctgccatgcgcggtctgcttgccccacaaaacactttcttggacactatagccacaagattcgatggaacacacagcaattttgtgctaggcaacgcacaggtcgccggactctttcccgtagtctattgctctgacggcttttgtgatttgactggattttctcgcgctgaggtgatgcagcgtggctgcgcctgctcctttctctacggcccagatacttctgaattggtgcggcagcagatccggaaggcactggatgaacataaggaattcaaggccgagctcatcctctatcggaaatctggattacctttctggtgcttgcttgacgttatccccatcaaaaacgaaaagggcgaagtggcactttttctcgttagccacaaggatatctccgagaccaaaaatagaggtgggcctgatcgctggaaagagacagggggtggcaggaggagatacggacgcgctcgttccaaaggtttcaacgcaaatcggagacgtagtagggccgtcctgtatcacctttctggacatttacagaagcaaccaaagggcaaacataaactgaataagggggtcttcggtgaaaaaccgaaccttcctgaatacaaagtcgctgctatccggaagtccccttttatccttctgcactgtggcgctttgcgcgctacttgggatggttttatcttgctggccaccctttatgtggctgtgacagtgccctattctgtgtgcgtgtccactgcccgtgagccctccgctgcaagaggacccccatctgtctgcgacctggctgtcgaggtgctgtttatacttgacattgtgttgaatttcagaacaacatttgtgtctaaaagtggtcaggtcgtgtttgccccaaagtcaatatgccttcactacgtgaccacatggttccttctggacgttatcgcggctctgcctttcgatcttcttcatgctttcaaggttaacgtgtattttggagcacatctcctgaagaccgtgcgcctgctccgactattgagattactgccgaggctcgacaggtactctcagtactccgccgtggttctgacgctgttaatggcggtatttgcactgcttgctcattgggtggcctgtgtatggttttatattgggcagcgcgaaattgagtccagtgaatcagagctcccagagattgggtggctgcaggaattggctagacgtcttgagaccccctactaccttgtggggcgtcgacctgccggaggaaactcctcaggccagtcagacaactgctcttcatcatctgaggccaacggcactgggctagaactgttgggtggcccttccctccggtccgcctacatcactagtctgtacttcgctctcagctcactcacctcggtgggctttggcaatgtttctgctaacactgataccgagaagatattcagtatatgcaccatgcttattggagcacttatgcatgctgtcgtttttgggaacgtgaccgcaatcatacagagaatgtacgctagacgcttcctctaccacagcaggacacgggatttaagggactatattcgaatacatagaatcccaaaaccacttaaacagcgcatgctagagtacttccaggccacgtgggcggtgaataacggtatcgacaccacagagctgctgcagtccctgcctgatgaactcagagccgacatcgctatgcaccttcataaggaggtactccagctgcctctgtttgaagcagcatctcgtggctgcttgagagctctcagtttggccctgaggccagccttctgtactccgggtgagtatctgatccaccagggggacgccttacaggcactctattttgtgtgttctggatccatggaagttcttaagggaggcacagttctggctatcctggggaagggggacctgattggatgcgagcttccacgcagagagcaggttgtgaaggcaaacgcagatgtcaaaggtctcacttattgtgtgcttcagtgtctgcaactggcaggacttcacgactctctagcgctgtacccagagttcgctccacggtttagtcggggtttgcgcggagagttgagctacaatctgggtgcaggcggaggctcagctgaggttgacacaagctctctatctggggataacacgctcatgtcaactcttgaagaaaaggagacagatggggaacagggaccaaccgtgtcacccgcaccagcagatgaacctagttctccattgctgtctcccggttgcacatcttctagctccgcagccaagctactttctcctcgcaggacagctccccgacccagactgggagggagaggtcggccaggccgagccggagccctgaaggctgaagcaggcccatctgcccctccaagggcactcgagggcctgcgcctgccacctatgccatggaatgtaccaccagatctctctccacgggtggttgacgggattgaggatggctgcggaagcgaccagccgaaattctccttcagagtcggtcagagtggacctgaatgctctagctcccctagccccggacctgaaagcgggcttctcacggtcccgcatgggccaagcgaggcgcgtaacacagatacactcgacaaactgcgccaggccgtgaccgagctttcagagcaagttctacagatgagggagggcctgcagagcctgaggcaggcggtgcagcttgttctagctccacacagggaggggccttgtccaagggcatctggggaaggcccatgccccgcttccacctctggtcttctccagcctctttgcgtggatacaggtgcgtcgtcctattgtttgcagcccccagccggtagcgtgctctctggaacttggccccaccccagaccaggcccacctcctctgatggccccatggccttggggaccaccagccagtcagagcagtccctggcctcgagccactgccttttggacctcaacctccgacagcgagccccctgcaagcggggatctctgctctgaaccctctactcctgcctctcccccaccttctgaagagggagcccgaaccggacctgccgaaccggtgtcccaggccgaggctaccagcacaggcgaaccccctcccggaagtggcggtttagcgctgccctgggacccacactccttggagatggtcctcattggctgccacgggtctggaaccgtgcagtggacccaggaagaaggcaccggggtatag

SEQ ID NO: 173671 - DNA, 3252 bp, Artificial Sequence
  derived and/or modified sequence
atgcccgccatgagaggcctgctggccccccagaacaccttcctggacaccatcgccaccagattcgacggcacccacagcaacttcgtgctgggcaacgcccaggtggccggcctgttccccgtggtgtactgcagcgacggcttctgcgacctgaccggcttcagcagagccgaggtgatgcagagaggctgcgcctgcagcttcctgtacggccccgacaccagcgagctggtgagacagcagatcagaaaggccctggacgagcacaaggagttcaaggccgagctgatcctgtacagaaagagcggcctgcccttctggtgcctgctggacgtgatccccatcaagaacgagaagggcgaggtggccctgttcctggtgagccacaaggacatcagcgagaccaagaacagaggcggccccgacagatggaaggagaccggcggcggcagaagaagatacggcagagccagaagcaagggcttcaacgccaacagaagaagaagcagagccgtgctgtaccacctgagcggccacctgcagaagcagcccaagggcaagcacaagctgaacaagggcgtgttcggcgagaagcccaacctgcccgagtacaaggtggccgccatcagaaagagccccttcatcctgctgcactgcggcgccctgagagccacctgggacggcttcatcctgctggccaccctgtacgtggccgtgaccgtgccctacagcgtgtgcgtgagcaccgccagagagcccagcgccgccagaggcccccccagcgtgtgcgacctggccgtggaggtgctgttcatcctggacatcgtgctgaacttcagaaccaccttcgtgagcaagagcggccaggtggtgttcgcccccaagagcatctgcctgcactacgtgaccacctggttcctgctggacgtgatcgccgccctgcccttcgacctgctgcacgccttcaaggtgaacgtgtacttcggcgcccacctgctgaagaccgtgagactgctgagactgctgagactgctgcccagactggacagatacagccagtacagcgccgtggtgctgaccctgctgatggccgtgttcgccctgctggcccactgggtggcctgcgtgtggttctacatcggccagagagagatcgagagcagcgagagcgagctgcccgagatcggctggctgcaggagctggccagaagactggagaccccctactacctggtgggcagaagacccgccggcggcaacagcagcggccagagcgacaactgcagcagcagcagcgaggccaacggcaccggcctggagctgctgggcggccccagcctgagaagcgcctacatcaccagcctgtacttcgccctgagcagcctgaccagcgtgggcttcggcaacgtgagcgccaacaccgacaccgagaagatcttcagcatctgcaccatgctgatcggcgccctgatgcacgccgtggtgttcggcaacgtgaccgccatcatccagagaatgtacgccagaagattcctgtaccacagcagaaccagagacctgagagactacatcagaatccacagaatccccaagcccctgaagcagagaatgctggagtacttccaggccacctgggccgtgaacaacggcatcgacaccaccgagctgctgcagagcctgcccgacgagctgagagccgacatcgccatgcacctgcacaaggaggtgctgcagctgcccctgttcgaggccgccagcagaggctgcctgagagccctgagcctggccctgagacccgccttctgcacccccggcgagtacctgatccaccagggcgacgccctgcaggccctgtacttcgtgtgcagcggcagcatggaggtgctgaagggcggcaccgtgctggccatcctgggcaagggcgacctgatcggctgcgagctgcccagaagagagcaggtggtgaaggccaacgccgacgtgaagggcctgacctactgcgtgctgcagtgcctgcagctggccggcctgcacgacagcctggccctgtaccccgagttcgcccccagattcagcagaggcctgagaggcgagctgagctacaacctgggcgccggcggcggcagcgccgaggtggacaccagcagcctgagcggcgacaacaccctgatgagcaccctggaggagaaggagaccgacggcgagcagggccccaccgtgagccccgcccccgccgacgagcccagcagccccctgctgagccccggctgcaccagcagcagcagcgccgccaagctgctgagccccagaagaaccgcccccagacccagactgggcggcagaggcagacccggcagagccggcgccctgaaggccgaggccggccccagcgccccccccagagccctggagggcctgagactgccccccatgccctggaacgtgccccccgacctgagccccagagtggtggacggcatcgaggacggctgcggcagcgaccagcccaagttcagcttcagagtgggccagagcggccccgagtgcagcagcagccccagccccggccccgagagcggcctgctgaccgtgccccacggccccagcgaggccagaaacaccgacaccctggacaagctgagacaggccgtgaccgagctgagcgagcaggtgctgcagatgagagagggcctgcagagcctgagacaggccgtgcagctggtgctggccccccacagagagggcccctgccccagagccagcggcgagggcccctgccccgccagcaccagcggcctgctgcagcccctgtgcgtggacaccggcgccagcagctactgcctgcagccccccgccggcagcgtgctgagcggcacctggccccaccccagacccggccccccccccctgatggccccctggccctggggcccccccgccagccagagcagcccctggcccagagccaccgccttctggaccagcaccagcgacagcgagccccccgccagcggcgacctgtgcagcgagcccagcacccccgccagccccccccccagcgaggagggcgccagaaccggccccgccgagcccgtgagccaggccgaggccaccagcaccggcgagcccccccccggcagcggcggcctggccctgccctgggacccccacagcctggagatggtgctgatcggctgccacggcagcggcaccgtgcagtggacccaggaggagggcaccggcgtgtag

SEQ ID NO: 173672 - protein, 1017 aa, Artificial Sequence
  derived and/or modified sequence
MPVMKGLLAPQNTFLDTIATRFDGTHSNFLLANAQGTRGFPIVYCSDGFCELTGYGRTEVMQKTCSCRFLYGPETSEPALQRLHKALEGHQEHRAEICFYRKDGSAFWCLLDMMPIKNEMGEVVLFLFSFKDITQSGSPGLGPQGGRGDSNHENSLGRRGATWKFRSARRRSRTVLHRLTGHFGRRGQGGMKANNNVFEPKPSVPEYKVASVGGSRCLLLHYSVSKAIWDGLILLATFYVAVTVPYNVCFSGDDDTPITSRHTLVSDIAVEMLFILDIILNFRTTYVSQSGQVISAPRSIGLHYLATWFFIDLIAALPFDLLYIFNITVTSLVHLLKTVRLLRLLRLLQKLERYSQCSAVVLTLLMSVFALLAHWMACIWYVIGRREMEANDPLLWDIGWLHELGKRLEVPYVNGSVGGPSRRSAYIAALYFTLSSLTSVGFGNVCANTDAEKIFSICTMLIGALMHAVVFGNVTAIIQRMYSRRSLYHSRMKDLKDFIRVHRLPRPLKQRMLEYFQTTWAVNSGIDANELLRDFPDELRADIAMHLNREILQLPLFGAASRGCLRALSLHIKTSFCAPGEYLLRRGDALQAHYYVCSGSLEVLRDNMVLAILGKGDLIGADIPEPGQEPGLGADPNFVLKTSADVKALTYCGLQQLSSRGLAEVLRLYPEYGAAFRAGLPRDLTFNLRQGSDTSGLSRFSRSPRLSQPRSESLGSSSDKTLPSITEAESGAEPGGGPRPRRPLLLPNLSPARPRGSLVSLLGEELPPFSALVSSPSLSPSLSPALAGQGHSASPHGPPRCSAAWKPPQLLIPPLGTFGPPDLSPRIVDGIEDSGSTAEAPSFRFSRRPELPRPRSQAPPTGTRPSPELASEAEEVKEKVCRLNQEISRLNQEVSQLSRELRHIMGLLQARLGPPGHPAGSAWTPDPPCPQLRPPCLSPCASRPPPSLQDTTLAEVHCPASVGTMETGTALLDLRPSILPPYPSEPDPLGPSPVPEASPPTPSLLRHSFQSRSDTFH

SEQ ID NO: 173673 - DNA, 3054 bp, Artificial Sequence
  derived and/or modified sequence
atgcccgtgatgaagggcctgctggccccccagaacaccttcctggacaccatcgccaccagattcgacggcacccacagcaacttcctgctggccaacgcccagggcaccagaggcttccccatcgtgtactgcagcgacggcttctgcgagctgaccggctacggcagaaccgaggtgatgcagaagacctgcagctgcagattcctgtacggccccgagaccagcgagcccgccctgcagagactgcacaaggccctggagggccaccaggagcacagagccgagatctgcttctacagaaaggacggcagcgccttctggtgcctgctggacatgatgcccatcaagaacgagatgggcgaggtggtgctgttcctgttcagcttcaaggacatcacccagagcggcagccccggcctgggcccccagggcggcagaggcgacagcaaccacgagaacagcctgggcagaagaggcgccacctggaagttcagaagcgccagaagaagaagcagaaccgtgctgcacagactgaccggccacttcggcagaagaggccagggcggcatgaaggccaacaacaacgtgttcgagcccaagcccagcgtgcccgagtacaaggtggccagcgtgggcggcagcagatgcctgctgctgcactacagcgtgagcaaggccatctgggacggcctgatcctgctggccaccttctacgtggccgtgaccgtgccctacaacgtgtgcttcagcggcgacgacgacacccccatcaccagcagacacaccctggtgagcgacatcgccgtggagatgctgttcatcctggacatcatcctgaacttcagaaccacctacgtgagccagagcggccaggtgatcagcgcccccagaagcatcggcctgcactacctggccacctggttcttcatcgacctgatcgccgccctgcccttcgacctgctgtacatcttcaacatcaccgtgaccagcctggtgcacctgctgaagaccgtgagactgctgagactgctgagactgctgcagaagctggagagatacagccagtgcagcgccgtggtgctgaccctgctgatgagcgtgttcgccctgctggcccactggatggcctgcatctggtacgtgatcggcagaagagagatggaggccaacgaccccctgctgtgggacatcggctggctgcacgagctgggcaagagactggaggtgccctacgtgaacggcagcgtgggcggccccagcagaagaagcgcctacatcgccgccctgtacttcaccctgagcagcctgaccagcgtgggcttcggcaacgtgtgcgccaacaccgacgccgagaagatcttcagcatctgcaccatgctgatcggcgccctgatgcacgccgtggtgttcggcaacgtgaccgccatcatccagagaatgtacagcagaagaagcctgtaccacagcagaatgaaggacctgaaggacttcatcagagtgcacagactgcccagacccctgaagcagagaatgctggagtacttccagaccacctgggccgtgaacagcggcatcgacgccaacgagctgctgagagacttccccgacgagctgagagccgacatcgccatgcacctgaacagagagatcctgcagctgcccctgttcggcgccgccagcagaggctgcctgagagccctgagcctgcacatcaagaccagcttctgcgcccccggcgagtacctgctgagaagaggcgacgccctgcaggcccactactacgtgtgcagcggcagcctggaggtgctgagagacaacatggtgctggccatcctgggcaagggcgacctgatcggcgccgacatccccgagcccggccaggagcccggcctgggcgccgaccccaacttcgtgctgaagaccagcgccgacgtgaaggccctgacctactgcggcctgcagcagctgagcagcagaggcctggccgaggtgctgagactgtaccccgagtacggcgccgccttcagagccggcctgcccagagacctgaccttcaacctgagacagggcagcgacaccagcggcctgagcagattcagcagaagccccagactgagccagcccagaagcgagagcctgggcagcagcagcgacaagaccctgcccagcatcaccgaggccgagagcggcgccgagcccggcggcggccccagacccagaagacccctgctgctgcccaacctgagccccgccagacccagaggcagcctggtgagcctgctgggcgaggagctgccccccttcagcgccctggtgagcagccccagcctgagccccagcctgagccccgccctggccggccagggccacagcgccagcccccacggcccccccagatgcagcgccgcctggaagcccccccagctgctgatcccccccctgggcaccttcggcccccccgacctgagccccagaatcgtggacggcatcgaggacagcggcagcaccgccgaggcccccagcttcagattcagcagaagacccgagctgcccagacccagaagccaggccccccccaccggcaccagacccagccccgagctggccagcgaggccgaggaggtgaaggagaaggtgtgcagactgaaccaggagatcagcagactgaaccaggaggtgagccagctgagcagagagctgagacacatcatgggcctgctgcaggccagactgggcccccccggccaccccgccggcagcgcctggacccccgaccccccctgcccccagctgagacccccctgcctgagcccctgcgccagcagacccccccccagcctgcaggacaccaccctggccgaggtgcactgccccgccagcgtgggcaccatggagaccggcaccgccctgctggacctgagacccagcatcctgcccccctaccccagcgagcccgaccccctgggccccagccccgtgcccgaggccagcccccccacccccagcctgctgagacacagcttccagagcagaagcgacaccttccactag

SEQ ID NO: 173674 - DNA, 3054 bp, Artificial Sequence
  derived and/or modified sequence
atgccagtgatgaaggggctcctggccccgcagaacacctttctggatacgatagctactagatttgacggaacccactccaacttcctccttgccaacgcccagggtaccagaggttttcctattgtttactgcagcgatgggttttgcgagttaacaggatacgggcggacagaggtaatgcagaagacatgttcctgccggtttctttatgggcctgagaccagcgaaccagcactccagcgattacacaaggctctggagggccaccaagagcacagagcagaaatctgcttttacagaaaggatggatccgccttctggtgtctcctcgatatgatgcctattaaaaatgaaatgggcgaagtggttctgtttctgttcagcttcaaggacatcacccagagcggctcgcccgggctcgggcctcagggggggcgtggcgactctaaccatgaaaactctctgggtcgccgtggcgctacatggaaatttaggtcggcgcggcggagatcccgtacggtcctacataggcttacgggacacttcggtaggagaggacaagggggaatgaaagcaaataataacgtgttcgagcccaaacccagcgttcccgagtacaaagtggccagcgtgggaggctcccgctgcctgctgttacactactcggtgtcaaaagccatatgggacggactgatattattagctacattttatgtcgctgtgactgtcccctataacgtttgctttagtggagatgatgatactccaattacttctcgccataccctggtatcagatattgcggtggaaatgttattcatcttggacataattctgaacttccgtaccacctacgtttctcagtccggacaagttatctctgctcccagatcgatcgggcttcactatctggccacctggttttttatcgatttgattgcagcccttccatttgatcttctgtatatcttcaatattaccgtgacctctcttgttcacctgctcaagaccgtcaggctcctgagacttctgcgattgctccagaagttggagcgatattcacaatgttccgcagtggttctgaccctcctcatgtcggtcttcgctctcctggcccattggatggcttgcatctggtacgtgataggacgccgtgagatggaagcaaacgacccactgctttgggacatcggatggctgcacgagcttggcaaaaggctcgaggttccgtacgttaacggatccgttggcggtccaagtcgaaggtctgcgtatattgctgccctctacttcactttgtcaagcctgacctccgtgggcttcggcaacgtctgcgctaatacagacgccgagaagatcttttccatctgcacaatgctcataggcgcattgatgcacgcagtggtctttggcaacgtgactgctatcattcaacgaatgtatagcaggaggagcctgtaccacagcaggatgaaagatctgaaagacttcatccgcgtgcaccgcctgccacggcctctaaagcagagaatgctcgagtacttccagaccacctgggccgtaaattcgggtattgatgctaacgagctgctccgggacttccccgacgaactgagagccgacattgcaatgcatctgaacagggaaatccttcagctcccattgtttggtgcagccagccggggctgtctgcgcgcgctaagcctgcatatcaagacctctttctgtgcacctggagaatatttgctccggaggggagatgcgcttcaggcacattattatgtttgctccggtagtttggaggttctccgagataacatggtgctcgccatcctgggaaagggtgaccttatcggagccgacatacctgagcctggccaagagcccggcttgggagctgacccaaacttcgtcctcaaaacatctgccgacgtgaaagcacttacctactgtggtctccagcaactgtcttcccggggactggccgaagttctgagactctatcctgaatatggggcagcattcagggccggccttcccagagatctcaccttcaatctgcggcagggctccgatacgtcaggactgagccgcttttctaggtcccccagactgagtcagcctcgctctgaatcccttgggtcctcctccgacaagacactgccctccatcaccgaagccgagagcggagcagagcctgggggaggccctcggcctaggcggccattacttctccccaacctttcaccagcacgcccacgtggttctctggtgtctctgctaggagaggagctgccgcctttttccgccctcgtttcatctcccagtctttctccgagccttagccccgccctggctggccaggggcactcagcctccccccacgggcctccgcgctgtagcgctgcgtggaagccaccccagctgttaattccaccactgggcacctttggaccgcctgacctctctcctcggatagttgacggcatagaggattctggctccaccgcagaggcaccctcctttcgtttcagccgcagacccgaactgcctcggccaaggtcccaagcccccccgaccgggacgcgcccctcgccagaactcgcttccgaagcagaagaagtgaaggagaaggtttgccgtctcaatcaggaaatcagccggctcaaccaggaggtgagccagctgagccgtgaactgcggcacatcatggggctgctccaggctagattgggccccccaggacaccctgctggaagtgcctggacgcccgatcccccatgccctcagctgcgtcctccatgcctctccccttgcgcctcccggccccctccctcattgcaagacaccacactggcggaagtccactgcccagcatcagtcggtacaatggaaacaggaactgccctgctcgacctccgaccctctatactccctccgtatccctctgaacctgatccgctggggccttcccccgtgcctgaagcatctcctcccacaccttctttgttaaggcacagttttcaatcccggtccgacaccttccactag

SEQ ID NO: 173675 - DNA, 3054 bp, Artificial Sequence
  derived and/or modified sequence
atgcctgtgatgaagggcctgctggccccccagaacaccttcctggacaccatcgccaccaggtttgatggcacccacagcaacttcctgctggccaatgcccagggcacccggggcttccccatcgtgtactgcagtgatggcttctgtgagctgaccggctacggccgcacagaggtgatgcagaagacctgcagctgccgcttcctgtatggccctgagaccagcgagcccgccctgcagaggctgcacaaggccctggagggccaccaggagcacagagctgagatctgcttctacaggaaggatggcagcgccttctggtgcctgctggacatgatgcccatcaagaatgagatgggagaggtggtgctcttcctgttctccttcaaggacatcacccagagcggcagccctggcctgggcccccagggcggccgcggggacagcaaccacgagaacagcctgggccggcggggggccacctggaagttccgcagcgcccggcggcgcagcaggacagtgctgcaccggctgaccggccactttggaagaagaggccagggcggcatgaaggccaacaacaacgtgtttgagcccaagcccagcgtgcctgagtacaaggtggcctctgtgggcggcagccgctgcctgctgctgcactacagcgtgtccaaggccatctgggatggcctcatcctgctggccaccttctacgtggccgtgacagtgccctacaacgtgtgcttctctggagatgatgacacccccatcaccagccgccacaccctggtgtctgacattgctgtggagatgctgttcatcctggacatcatcctgaacttccgcaccacctacgtgtcccagagcggccaggtgatcagcgcccccaggagcatcggcctgcactacctggccacctggttcttcatcgacctgattgctgccctgccctttgacctgctgtacatcttcaacatcaccgtgaccagcctggtgcacctgctgaagacagtgcggctgctgcggctgctgcggctgctgcagaagctggagcgctacagccagtgcagcgctgtggtgctgaccctgctgatgtctgtgtttgccctgctggcccactggatggcctgcatctggtacgtgattggaagaagagagatggaggccaatgaccccctgctgtgggacatcggctggctgcacgagctgggcaagaggctggaggtgccctacgtgaatggatctgtgggcggccccagccgccgcagcgcctacatcgccgccctgtacttcaccctgagcagcctgacctctgtgggctttggaaatgtgtgtgccaacacagatgctgagaagatcttcagcatctgcaccatgctgattggagccctgatgcatgctgtggtgtttggaaatgtgacagccatcatccagaggatgtacagccgccgcagcctgtaccacagcaggatgaaggacctgaaggacttcatccgggtgcaccggctgccccggcccctgaagcagaggatgctggagtacttccagaccacctgggccgtgaacagcggcattgatgccaatgagctgctgcgggacttcccagatgagctgcgggctgacatcgccatgcacctgaaccgggagatcctgcagctgcccctgtttggagctgccagccggggctgcctgcgggccctgagcctgcacatcaagaccagcttctgtgcccctggagagtacctgctgcggagaggagatgccctgcaggcccactactacgtgtgcagcggcagcctggaggtgctgcgggacaacatggtgctggccatcctgggcaaaggagacctgattggagctgacatccctgagcccggccaggagcccggcctgggcgctgaccccaactttgtgctgaagaccagcgcagatgtgaaggccctgacctactgcggcctgcagcagctgagcagccggggcctggccgaggtgctgcggctgtacccagaatatggagctgccttccgggccggcctgccccgggacctgaccttcaacctgcggcagggcagtgacaccagcggcctgagccgcttcagccgcagcccccggctgagccagcccaggtctgagagcctgggcagcagcagtgacaagaccctgcccagcatcacagaggccgagagcggggctgagcccggcggcggcccccggccccggcggcccctgctgctgcccaacctgagccctgcccggccccggggcagcctggtgtccctgctgggggaggagctgccccccttcagcgccctggtgagcagccccagcctgagccccagcctgagccctgccctggccggccagggccacagcgccagcccccacggccccccacgctgcagcgctgcctggaagccaccccagctgctgatcccccccctgggcaccttcggccccccagacctgagccccagaattgtggatggcatcgaggacagcggcagcacagctgaggcccccagcttccgcttcagcagaagacctgagctgccccggcccaggagccaggcccccccaacaggcacccggcccagccctgagctggccagcgaggccgaggaggtgaaggagaaggtgtgccgcctgaaccaggagatcagccggctgaaccaggaggtgtcccagctgagccgggagctgcggcacatcatgggcctgctgcaggcccggctgggccccccaggccaccctgctggcagcgcctggaccccagaccccccctgcccccagctgcggcccccctgcctgagcccctgtgccagccggcccccacccagcctgcaggacaccaccctggccgaggtgcactgcccagcctctgtgggcaccatggagactggaacagccctgctggacctgcggcccagcatcctgcccccctaccccagcgagccagaccccctgggccccagccctgtgcctgaggccagcccccccacccccagcctgctgcggcacagcttccagagcagaagtgacaccttccactag

SEQ ID NO: 173676 - DNA, 3054 bp, Artificial Sequence
  derived and/or modified sequence
atgcccgtgatgaagggcctgctggccccccagaacaccttcctggacaccattgccactcggttcgacgggacgcacagcaacttccttttggctaacgcccagggaacaagaggcttccccatagtgtactgctctgacgggttttgtgaactgactggttatggcagaacggaagtgatgcagaagacttgctcttgcagatttctgtacggcccggagaccagcgagcccgctctgcagaggctgcataaagctctggaaggccaccaggaacacagggccgagatatgcttttatagaaaagatgggtctgccttctggtgcctcctagacatgatgcctattaagaacgagatgggggaggtggtgctgttcttgttctccttcaaggatatcactcagagtggcagccctggtctgggaccacagggagggagaggcgacagcaatcacgagaattccttgggcagaaggggtgccacatggaaatttcgttccgctaggcgtcgttctcggaccgtgttacacagactcaccgggcactttggaaggcgtggtcagggcgggatgaaagccaacaataatgtcttcgaaccaaagccctccgtgcctgagtacaaggtggccagcgtgggcggcagccggtgccttctgcttcattatagtgtctccaaggctatctgggatgggctgatactgctggctaccttttatgtagccgtcacggttccctacaatgtctgtttctccggagatgatgatactccaattaccagcaggcataccctcgtcagtgacattgccgtggagatgcttttcatcctggatataattctgaattttcgcacaacctacgttagtcagtcagggcaggtcattagcgcgcccaggtctattgggctacactacctggccacatggttctttatcgacctgattgccgcactcccgtttgacctgttatacatttttaacatcacagtcacctcgctggttcacttattgaagaccgtgcgcctcctgagacttctcagactactccaaaaactggaaagatattcccagtgctccgcagtggttcttactctgttgatgtcagtgttcgctctcctagcacactggatggcatgtatctggtatgtaatcgggcgccgtgaaatggaggccaatgaccctctgttgtgggacatcggctggctgcacgaattagggaagcgcctagaagtcccgtacgtaaatggaagcgtggggggccctagtagacgcagcgcatatatcgcagccttatatttcaccctctcttcccttaccagtgttggattcggtaacgtgtgtgccaacactgacgccgagaaaatcttttcgatctgcaccatgctgattggagccctaatgcatgctgtggtatttgggaacgttaccgctatcattcaacgcatgtactccaggcggagcctgtaccatagtagaatgaaggacctcaaggattttatcagagtccaccgcttaccgcggccactgaaacagcgaatgttggaatatttccagactacctgggccgtgaacagtggcatagatgccaatgaattgctgagagactttccagacgaactgcgcgctgacattgccatgcatctgaatcgtgaaattctgcagctgcctctgttcggggctgccagcaggggttgcctgcgtgccctgtccttacatatcaaaacatccttttgcgccccaggagagtacctccttagacggggagacgcattacaggctcactactatgtgtgtagtgggtcgttggaagtattaagggataacatggtcttggcaatcctgggaaagggggaccttataggtgctgatattccagaaccgggccaagagcccgggttaggagccgatccaaattttgtcctcaaaaccagcgctgacgtaaaagcgttaacttactgtggcctgcaacaactgtcctccaggggcctcgccgaagtgctgagattatatcctgaatacggggccgccttcagagcaggcctccctagagatctcaccttcaacctgcggcaggggtcagatacctcagggctcagtcgtttcagcagaagccctcggctgtctcagccacggtcggaaagccttggttcttctagcgataagaccctcccatctatcacggaggccgagagtggagccgaacccggtggaggccctcgacctcgtaggcccttgctactgccgaacctcagtccggcaaggcctcgcggcagcctagtctctttgttgggcgaagagcttcccccattctctgccctagtcagtagtccatcgctgagcccttccctttcaccagctctggccggtcaagggcattccgcctcaccacatgggcctccaagatgtagtgctgcatggaagccaccccagctcctcatcccacctcttggaactttcggaccccccgatttgagcccacggatcgtggatgggatagaagactccggcagtacggccgaggccccttcattccgcttctcccggagaccagaactgcctcgacctcgttctcaggcaccgcctaccggcacaaggcccagccccgaattagcttccgaggctgaagaggttaaggaaaaggtctgccggttgaaccaggagatctctcgcctgaatcaggaagtcagtcagctgtcacgggaactgcggcatattatggggcttcttcaagcgcgcctgggaccacccggacaccccgccgggtctgcatggactccagatcctccttgcccgcagctgcgcccaccctgcctgtcaccatgcgcatctcgccctcctccatcacttcaggatacaaccttggcagaggtccactgccccgcttccgtcggaacaatggagaccggaaccgccctcctcgatttgagaccctcgatattacccccttatccgtcagagccagatcctctgggccccagcccagttccggaagctagccctcctaccccatcactgcttcgccatagcttccaaagcagatcagacacattccactag

SEQ ID NO: 173677 - DNA, 3923 bp, Artificial Sequence
  derived and/or modified sequence
gtgggccgctcccctctgggaggagggctgcccagaggggtgcgggtgtcgctagcggcccctccccgtgtggggccacgtggcgggtgcgggccgagcccgaggggaagaacctggcccgtggggaggtgggggggaccgaaacggcgctgagccgagccgagagctacggggttcggagcagaggcagcggcagcggcagcggcagtaagagggaggggaggaggcaggagggcgcatggggcgccccggcccctccgacagcgcgccccctccggcccggccgcgctgaaagctccccagcgccgcgccttgaacccacgccccggggccatgccggtcatgaaggggttgctggccccgcaaaacaccttcctggacaccatcgccacccgttttgacggaacgcacagcaacttcctgctggccaacgcacagggcacacggggctttcccatcgtctactgctccgacggcttctgcgagctcacaggctacggtcgcaccgaggtcatgcagaagacctgcagctgccgtttcctctacggcccagagaccagtgagccagccctgcagcgtctgcacaaagccctggagggccaccaggagcaccgggctgaaatctgcttctaccgcaaggatggctcagccttttggtgcctcctggacatgatgcccatcaagaatgagatgggggaggtcgtgctgttcctcttttccttcaaggatatcactcagagtggaagcccaggacttggcccccaaggaggccgcggggacagtaatcacgaaaactcccttggtagaaggggagccacctggaaatttcggtctgccagaagacggagccgtactgtcctacaccgactgaccggccactttggccgccggggccagggaggcatgaaggccaataataacgtgtttgagccaaagccatcagtgcccgagtacaaggtggcctccgtgggggggtctcgctgcctcctcctccactacagcgtctccaaggccatctgggacggccttatcctccttgccaccttctacgttgcggtcaccgtcccctacaatgtctgtttctcgggtgacgatgacacccccatcacttcgcgacacacccttgtcagcgacatcgccgtggaaatgctcttcatcctagatatcatcctgaacttccgcaccacctatgtgtcccagtccggccaggtaatctctgctcctcgttccattggcctccactacctggccacctggttcttcatcgaccttattgctgctctgccctttgacctgctttacatcttcaacatcaccgtgacctcgctggtgcacctactgaagacagtgcggctgttgcggctgctgcggctgctgcagaagctggagcggtactctcagtgcagtgctgtggtgctcacgctgctcatgtcggtctttgcgctccttgcccactggatggcctgcatctggtatgtcatcgggcgccgggagatggaggccaatgacccgctgctctgggacattggctggttgcatgagttgggcaagcgtctggaggtgccctatgtcaatggctcggtgggcggcccatcacggcgcagcgcctacatcgcggcactgtacttcactctaagcagcctcaccagtgtgggctttggcaacgtgtgtgccaacaccgacgcggagaagatcttctccatctgcacgatgctcataggcgccctgatgcacgctgtggtgttcgggaacgtgacagccatcatccagcgcatgtactcgcgccgctcgctctaccacagccgcatgaaggacctcaaggacttcatccgtgtgcaccgcctgccgcggccgctcaagcagcgcatgctcgaatacttccagaccacgtgggccgtcaacagcggcatcgacgccaacgagttactgcgtgacttcccagacgagctgagagctgacattgctatgcacctgaatcgggagatcctgcagctgccgttgttcggggcagcgagcaggggctgcctgcgggccctatcgctgcacatcaagacctcgttctgcgctccgggcgagtacctgttgcgccgtggggatgccctgcaggcacattactatgtctgctccggctcgcttgaggtgctccgagacaacatggtgctggccatcctggggaagggggacctgattggagcagatatccctgagccggggcaggagcctgggttgggagcagacccaaacttcgtgctaaagaccagtgctgatgtgaaagctctgacctactgtggcctgcagcagctgagcagccgagggctggctgaggtcctgaggctctatcctgagtatggggctgccttccgggctggcctgccccgggacctcaccttcaacctgcgccagggctctgacaccagtggcctcagccgcttttcccgatcccctcgcctctcccagccccgctcagaaagcctcggctcctcctcagacaagacgctgccatccatcacagaggccgagagtggcgcggagcctgggggtggtcccaggccccgacggcccctcctgctgcccaacctcagcccagcacggcctcggggctccctggtcagccttttgggcgaggagctgcccccattctcagcccttgtctcctctccttccttatccccatccctgtcccctgccctggctggccagggccacagtgcctcccctcacggcccccccaggtgctctgctgcctggaagccccctcagcttctcattcccccactgggaacctttggacctccggacctcagtccccggatagtggatggcattgaggactctggcagcacagctgaggccccttcattccgattcagcaggaggcctgaactgccaaggccccgctcccaggcgccccctacagggaccaggcccagcccagaattggccagtgaggctgaggaggtgaaggaaaaggtttgccggctgaaccaggagatctctcgtctcaatcaggaggtgtctcagcttagccgggagctgcggcacatcatgggcctgctgcaggccaggctgggtcccccaggccacccagcaggctccgcttggaccccagaccctccttgtccacagctgaggccaccatgcctctctccttgtgcgtccagaccaccacccagcctccaggatactacgcttgctgaagttcactgcccagccagtgtggggaccatggagacagggactgcgctcctggacttgagaccttccatattgcccccctacccctcagagcctgaccctctgggaccctctccagtgccagaggcctcacccccaaccccaagcctcttgaggcacagtttccagtccaggtcagacacgttccactgaccctggcccagggcccaggcctgtctggggtgggcgctgccgctcaccactcagggaggacctgggccccttggcttcctgccttggggtcagcagccaccagctggcctggttggctctggatttctggactttttaatgaagcgtggttacctctgacgctattcccttttccaagccttccccaacctccccctctgtgaggggagccacctgagggctgtggaacccagcaggcatgagatgaaccgcagtgcccattgggctgggcagatgagatcctactttctccccaggacctggaggcaggctgtctctcaaggtggtctcttctgctgctagcaactcaaaaatcccaacagcactccctatcctttccctgaccccagaccgctgccaagcctgttctcccccattacaacatggtctcactcagggcctggactgctccaaaactcgcccaggtctccagctctcctctaccacccaacaccctgggctcacttttggataggaaataaactctttatttttgt

SEQ ID NO: 173678 - DNA, 3054 bp, Artificial Sequence
  derived and/or modified sequence
atgcctgtgatgaaagggctcctggccccacaaaacacgttccttgataccatcgcaaccagattcgatgggacacactccaacttcctgctggctaatgcccagggcacccgcggtttcccaattgtgtactgcagcgacggattctgtgaactaactggatatggcagaacagaggtgatgcagaagacatgctcatgtcgattcctgtacggccctgagacctcagaacccgctcttcagaggctgcacaaagcactcgaaggacaccaggaacatcgtgccgaaatctgtttttaccgcaaggacggctccgccttttggtgcttgctagacatgatgcccattaagaacgagatgggagaggttgtgctctttttgttcagctttaaggacattacccagtctgggtcaccaggactcggaccacagggcggacgaggagactctaatcacgaaaattctctcggtcgccgtggggctacttggaaatttaggagtgctcggcgacgctctaggaccgtgctgcatcggttgaccggacactttgggaggagggggcagggcggaatgaaggctaacaataatgtctttgaaccaaagcctagcgtcccggagtataaagttgccagcgtgggtggctcacggtgtctgttgctgcactacagtgtgtcaaaggccatttgggacggcttgatcctgcttgccactttttacgttgctgtgactgtgccgtacaatgtttgctttagtggtgacgacgatacaccaatcacctctcggcacacacttgtgagcgatatcgcggtggaaatgctctttattcttgacatcattctgaactttaggaccacctatgttagtcaaagcgggcaggtcattagtgcacctcggtctatcgggctgcactacctcgccacatggttctttatagacctaatagcagctttgccattcgacctgctgtacatctttaatatcacagtcacatcactggtgcatctgctcaaaacagtgagattgttaagactgctgcggctcctccagaagctcgagcgatactcccagtgctccgctgtcgtgcttacccttctgatgtccgtgttcgcgctgttagctcattggatggcctgcatatggtacgtgattgggagacgcgaaatggaggcgaacgatcctttactgtgggacatcggatggcttcacgaactgggaaaacgtttggaggtgccttatgtgaatgggtcagtcggtggaccgtcccgccgtagtgcttacatcgcggcactctatttcactctgtcatcactgacttccgttggatttggaaatgtctgcgcaaataccgacgcagagaagatcttctcaatatgcacgatgttgataggagccctgatgcacgccgtcgtgttcggcaacgtcactgccattatacaaagaatgtatagcaggcgcagtctttatcacagtaggatgaaagacttaaaagacttcataagggtgcacaggctgcctaggcctcttaagcaacggatgttagagtactttcaaacgacttgggctgttaactcgggaatcgatgcaaacgagctgctaagggatttcccagatgagcttcgtgcggatatcgctatgcatctgaatagggagattctgcagctccccttgtttggtgctgcatctaggggctgccttagggcgctgtccctgcacattaaaacctctttctgtgcaccaggagagtaccttcttcgaaggggcgatgcactccaagcccattattatgtgtgttccgggagcttggaagtgctgcgcgacaacatggtgctcgcaatcctgggaaaaggcgatcttattggcgcagatatccctgagcccggtcaagagcccggtctgggcgcagacccaaattttgtgctcaagacatctgccgatgtcaaagctctcacctactgcggtttgcaacagctgagctcaagaggcctggcagaagtcctacgcttataccctgagtatggggcagcttttagagccggacttcccagagacctgacatttaacctgcgtcaaggcagcgacaccagtggcctaagtcggttttccaggtctcccaggctaagccaaccgagatctgagtcactgggatcaagttcagacaaaaccctcccaagcataactgaagctgagtcaggagctgagcctgggggtgggccacgccctcgcagaccactcctccttcccaacctgtcacctgcccgacccagaggaagcctggtgtcacttttaggcgaggagctgcctccttttagcgccctcgtgagcagcccgagcttgtcaccatcgttgagccccgctctggcaggccagggccatagcgcaagtccccatgggccaccacggtgtagcgctgcatggaagccaccgcaactcttgatcccccctctcggaacgtttgggccacctgatttatcaccgaggatcgtggacggaatcgaagacagcggtagcacagccgaggcgccatcgtttcgatttagtcgtcggcctgagctgcccaggcctcgctcccaagcacctccaaccggcacccgcccatctccagaattagcgtcagaggcggaggaggtgaaagaaaaggtctgtcgactcaaccaggagattagcaggctgaaccaggaagtgagtcagctgtccagggagcttagacatatcatgggactcttgcaggccaggctagggcctcctggtcaccccgcagggtctgcatggacgccagacccaccatgtccccagttaagacctccatgtcttagcccatgcgcctctagacctccaccaagccttcaggacacgactctggctgaggtgcactgccccgcttccgttggtactatggaaacgggaactgctctgttggatctgcgccctagtatcctgcctccatatccctcagagcccgatcccctgggaccaagccctgtgccagaggcctctccgccaactccctcactgctgcggcatagcttccagagccggtccgatacatttcactag

SEQ ID NO: 173679 - protein, 370 aa, Artificial Sequence
  derived and/or modified sequence
MAFRRRTKSYPLFSQEFVIHNHADIGFCLVLCVLIGLMFEVTAKTAFLFILPQYNISVPTADSETVHYHYGPKDLVTILFYIFITIILHAVVQEYILDKISKRLHLSKVKHSKFNESGQLVVFHFTSVIWCFYVVVTEGYLTNPRSLWEDYPHVHLPFQVKFFYLCQLAYWLHALPELYFQKVRKEEIPRQLQYICLYLVHIAGAYLLNLSRLGLILLLLQYSTEFLFHTARLFYFADENNEKLFSAWAAVFGVTRLFILTLAVLAIGFGLARMENQAFDPEKGNFNTLFCRLCVLLLVCAAQAWLMWRFIHSQLRHWREYWNEQSAKRRVPATPRLPARLIKRESGYHENGVVKAENGTSPRTKKLKSP

SEQ ID NO: 173680 - DNA, 1113 bp, Artificial Sequence
  derived and/or modified sequence
atggccttcagaagaagaaccaagagctaccccctgttcagccaggagttcgtgatccacaaccacgccgacatcggcttctgcctggtgctgtgcgtgctgatcggcctgatgttcgaggtgaccgccaagaccgccttcctgttcatcctgccccagtacaacatcagcgtgcccaccgccgacagcgagaccgtgcactaccactacggccccaaggacctggtgaccatcctgttctacatcttcatcaccatcatcctgcacgccgtggtgcaggagtacatcctggacaagatcagcaagagactgcacctgagcaaggtgaagcacagcaagttcaacgagagcggccagctggtggtgttccacttcaccagcgtgatctggtgcttctacgtggtggtgaccgagggctacctgaccaaccccagaagcctgtgggaggactacccccacgtgcacctgcccttccaggtgaagttcttctacctgtgccagctggcctactggctgcacgccctgcccgagctgtacttccagaaggtgagaaaggaggagatccccagacagctgcagtacatctgcctgtacctggtgcacatcgccggcgcctacctgctgaacctgagcagactgggcctgatcctgctgctgctgcagtacagcaccgagttcctgttccacaccgccagactgttctacttcgccgacgagaacaacgagaagctgttcagcgcctgggccgccgtgttcggcgtgaccagactgttcatcctgaccctggccgtgctggccatcggcttcggcctggccagaatggagaaccaggccttcgaccccgagaagggcaacttcaacaccctgttctgcagactgtgcgtgctgctgctggtgtgcgccgcccaggcctggctgatgtggagattcatccacagccagctgagacactggagagagtactggaacgagcagagcgccaagagaagagtgcccgccacccccagactgcccgccagactgatcaagagagagagcggctaccacgagaacggcgtggtgaaggccgagaacggcaccagccccagaaccaagaagctgaagagcccctag

SEQ ID NO: 173681 - DNA, 1113 bp, Artificial Sequence
  derived and/or modified sequence
atggccttcaggcgacgtacaaagagctacccactgtttagccaggaattcgttatccacaatcatgctgatatcggattttgcctcgtcctatgtgtgctcattggcctgatgttcgaagtaaccgccaaaaccgcctttcttttcattttaccacaatataacatctcagtgcccaccgcagatagcgagactgtgcactaccactacggtccgaaagatctggtgactatcttattttatatttttattacaataatactccacgcggtagtgcaggaatatatcctggataaaatcagcaaaaggttgcatctgagcaaagttaaacattccaagtttaacgagtctggccagctggtagtcttccatttcacctccgtgatttggtgtttttacgtggttgtcaccgagggctatctgaccaatcctcggagtctgtgggaggattacccacacgtacaccttcctttccaagtaaagtttttttatctgtgccaactagcctactggcttcacgcgctgccagagctgtactttcaaaaggtacggaaggaggaaattccacggcagctgcagtacatctgtctgtacctagtgcacatagccggcgcctatctcctgaacctaagccgcttgggattgatacttttgttacttcaatactccaccgagttcctgtttcacactgctaggctgttctacttcgccgatgagaacaacgaaaagctgtttagtgcctgggctgctgtatttggagtgacacggttgttcatcctcacattagccgtactggccattggtttcggcctggccaggatggagaaccaggcgttcgatccagagaagggtaatttcaacactctcttctgtcgtctctgtgttctgctgctcgtatgcgccgcccaggcatggctaatgtggcgcttcattcactcccaactgcgccactggcgggaatactggaatgaacagtcagctaaacggagggtgcccgccacaccaaggctgcctgctcggctcattaagcgcgagagcggctaccatgagaacggagtggtcaaggctgaaaacggcacatcacctaggaccaaaaagttgaaaagcccatag

SEQ ID NO: 173682 - DNA, 1113 bp, Artificial Sequence
  derived and/or modified sequence
atggccttcagaagaaggaccaagagctaccccctcttcagccaggagtttgtgatccacaaccacgccgacatcggcttctgcctggtgctgtgtgtgctgattggcctgatgtttgaggtgacagccaagacagccttcctgttcatcctgccccagtacaacatctctgtgcccacagctgacagcgagaccgtgcactaccactacggccccaaggacctggtgaccatcctcttctacatcttcatcaccatcatcctgcatgctgtggtgcaggagtacatcctggacaagatcagcaagaggctgcacctgagcaaggtgaagcacagcaagttcaatgaaagtggccagctggtggtgttccacttcaccagcgtcatctggtgcttctacgtggtggtgacagagggctacctgaccaaccccaggagcctgtgggaggactacccccacgtgcacctgcccttccaggtgaagttcttctacctgtgccagctggcctactggctgcacgccctgcctgagctgtacttccagaaggtgaggaaggaggagatcccccggcagctgcagtacatctgcctgtacctggtgcacatcgccggggcctacctgctgaacctgagccggctgggcctcatcctgctgctgctgcagtacagcacagagttcctgttccacacagcccggctcttctactttgctgatgaaaataatgagaagctgttcagcgcctgggccgctgtgtttggagtgaccaggctcttcatcctgaccctggccgtgctggccatcggcttcggcctggccaggatggagaaccaggcctttgatcctgagaagggcaacttcaacaccctcttctgccgcctgtgtgtgctgctgctggtgtgtgccgcccaggcctggctgatgtggaggttcatccacagccagctgcggcactggagggagtactggaatgagcagagcgccaagagaagagtgcctgccaccccccggctgcctgcccggctcatcaagcgggagagcggctaccatgaaaatggagtggtgaaggcagaaaatggcaccagccccaggaccaagaagctgaagagcccctag

SEQ ID NO: 173683 - DNA, 1113 bp, Artificial Sequence
  derived and/or modified sequence
atggccttccggcggcggaccaagagctaccccctgttcagccaggagttcgtgattcataaccacgccgatatcggtttttgccttgtgttgtgtgtccttatcggactcatgtttgaggtaaccgcaaaaaccgcttttctatttatactcccccagtataatatatccgtacctacagcggatagcgaaactgttcactaccattacggcccgaaagacctggtcaccatcctgttttacattttcattacaattattttgcatgcagtcgtgcaggagtacattttggataagataagcaagagactacatctttccaaagtcaagcactcgaaatttaacgaatcagggcagttagtggtgtttcacttcacgtctgttatctggtgcttctatgtggtggtcactgaaggatacttaacaaatccacggagcctgtgggaagattatccccatgtgcacttgcccttccaagtaaaattcttctacctctgtcagttagcgtactggctccatgctttacccgaattgtacttccagaaggtaaggaaggaggagatccccaggcaactgcagtacatttgcctttatctggtgcacatcgccggcgcatatctgctgaatctttctcgcctgggtctgattctccttctgttgcagtacagtacggagttccttttccacacggcacgactcttctacttcgccgacgagaacaatgagaagctcttctccgcatgggcagctgtctttggagttacccggctgttcatcttgactctcgcagtgctggctatcgggttcggcctggcccgcatggagaaccaggcattcgacccggagaaaggtaatttcaatactttattctgtcgtctgtgtgtgctgctcctcgtgtgtgcagcccaggcgtggttaatgtggaggtttatccacagtcaactgcggcattggcgcgagtattggaacgagcagtcggctaagagaagagtacccgctacaccacggctaccagccagactgatcaagcgcgaatctgggtaccatgagaatggggtggtcaaggcagaaaacggcacttctcccaggacaaaaaagttaaagtcaccatag

SEQ ID NO: 173684 - DNA, 1113 bp, Artificial Sequence
  derived and/or modified sequence
atggccttcagaaggcggactaaatcataccccctcttttcacaagagtttgttatccacaaccacgcggacatagggttctgtctggttctttgtgtgttgattggtctcatgttcgaggtgactgccaagactgcattcctttttattttgcctcagtacaacatctctgttccaaccgccgatagcgagactgtacattaccattacggccctaaggacctagtaacaattttattctacatatttatcaccattattttgcacgcggtagtgcaggaatacattctggataagatttccaagcgcttgcatctaagcaaggtgaaacattccaaattcaacgagtcgggtcagctagtcgtcttccactttacatccgtgatttggtgcttctacgttgttgtcacggaaggttatctgacaaacccacggtcattgtgggaggactatccccacgtgcatctcccttttcaggttaagtttttctatctctgtcagctggcgtactggctgcacgcacttccagaactatactttcagaaggttcggaaagaagaaatccccaggcagttgcagtatatctgcctctatttagtccacattgcaggagcttacctgttaaatttgtcccgcctgggcctgatcctgctgctgctgcaatactctacagagttcctctttcacaccgccaggctcttttatttcgccgatgagaacaatgagaagctattttcggcatgggcagctgtgtttggcgtgaccaggctgttcattttgaccctggctgtactcgctatagggtttggcttggctaggatggagaatcaggcgttcgaccctgaaaaaggcaatttcaatactctgttttgccgcctctgcgttctgctgctagtttgcgctgctcaagcttggctcatgtggcgctttattcacagccagctcagacattggcgggagtactggaatgagcagagtgccaaacgacgggtacccgcaacacctcggcttccagctaggcttataaagcgcgagtcaggataccacgagaatggcgtagtaaaagctgagaatggcacaagtcctagaaccaaaaaattaaaatctccctag

SEQ ID NO: 173685 - DNA, 6908 bp, Artificial Sequence
  derived and/or modified sequence
atggctttccgcaggaggacgaaaagttacccgctcttcagccaggagttcgtcatccacaaccatgcggacatcggcttctgcctggtgctctgcgtcctcatcgggcttatgttcgaggtcacagccaagactgcctttctatttattttacctcagtataacattagcgtgcctacagcagacagtgagaccgtgcactaccactatggccctaaggacctggtcacaatcttgttctacatcttcatcaccatcatcttgcatgctgtggttcaggagtacattttagataaaatcagcaaacggcttcatctctccaaagtcaaacacagcaagttcaatgaatctggacagctggtcgtctttcatttcacctcggtgatttggtgcttctacgtggtggtgacggaaggatacttaacaaacccaagaagcctctgggaagactacccgcatgtgcacctccccttccaggtgaagtttttctacctatgccagctggcctactggctgcacgcacttcctgagctatacttccagaaggtacggaaggaggaaattccccgccagctccagtatatttgcctgtacctggtgcatatagctggagcatacctcttaaacctgagccgcctgggcctgatcttgctgctgctgcagtactcaactgagttcctcttccacacggctagactcttctactttgcagatgaaaacaacgagaaactgttcagtgcctgggctgctgtttttggggttacccgcctcttcatcctcacccttgccgtgctggccattggctttggactggctcgcatggaaaaccaggcatttgatcccgagaaagggaacttcaacactttgttttgcaggctctgcgtgctgctgctggtgtgtgccgcccaggcctggctcatgtggcgcttcatccactcccagctgcggcactggcgggaatactggaatgagcagagtgcaaagcggagagtcccagccacacccagactaccagccaggctcatcaagagggaatctggttaccatgaaaatggagtggtgaaggcagagaacggaacctccccacggactaagaaactcaagtctccctaaggccaaagtgctaagaacaggaatcctcttggtgggggccgagcagggggcaaggagcccaggccccctccctgcctcctccttcctgcctgtgatgctccgtctcaaacagccgaaacctgtcttgcaatggggggagggggcgtttcgctttccttcttcttggcttcctcttattcttccacaaaccattctcaataaagccaaaaatctttctctttctccccctcaggccacctcctgtcctcactcctgtcctgtgctggcttttctggaacgccaggcgcccatggctggcacctttctgcttgctctgtctcttgccttatggctgctgcttttcctttttacttcctattttcaccttatcttgcaatttttctgtctgatttttacaatgggaggggagctaagattgcagtcctgtccttcggtcccccagggcctgccggtcagaagcctggggctggtaggcccttggtggtcctcatgtggatgggcaagaagagagcggccatctcggatcataatctccttggtgctgattaactgacgagatatatgattccagttctgcatgtaccatcttgaggcacagcagccactgctcgttgtaaatgccaaggcatttggctttgggacgtgacaactcaatccagaaggatggtgtgaactcggttgggtcccgtgactcgagctcctaccagtggctggccgcggattggaagccagcctgctgtcgctctgtggggggggacacgtcttcccactgcttagagcgagagcagagcaaactgcgcagcaggcacctccagaaaggtaatggtggcagaacccacagtggagtcgacctaggcctttctccagcagtcccagtcgccattgctttttcagccattcacaagcattcaaaaccaaaccaaacagcagttcatatacctgcctgagataggctggtcctcacctccagagccagccagccccgtcaggggccaaacttactaccttgacttcatctctagctgcagaaacactaagtctcaagggcttcagccccatgctggtcccttggtgttcagggagggtcacttggaccgctgttcatctggccgcccttgttgagtgttctttggaattgtcgttttttgagcacaactacagcattttagactgcatgaaaccatgactgactgagagtcactctctgggtagatgataggcgcctttctggccccttccctcacagattctttcccctcccctccacctgaagagaaggcctccaagtccttttggtgccttgtgaggacttttagaaggggcgttcagctttaaaaagccggtcctaattacggccggacgcagtagcttacgcctgttatcccagcactttgggaggtcgaggtgggcagatcacctgaggttaggagttcaagaccagcctggccaacatggtgaaaccccatctctactaaaaatacaaaaaattaggtgtagtggcaggcacctgtaatcccagctactcgggaggctgaggcaggagaatcgcttgaacctagaaggcggaggttgcagtgagcggagattgtaccatggcactccagcctggacaacaagagcgaaattctgtctaaaaaaacaaaagtcccaattaagaacctccgaactctgttttgaggcaaaggggagtagttcttggtaggtgcaggaatagtagtgtcatttggaatactggtcatctttctgacatcacagtagaaaccaaaccttggatttagattcaaaaggggggaaatgggtcttttcatcaaggcaactccccttctccaagtcacttacatcatagataaattttagcttcccagtaactgagggatttgtttcctaacgccattggaggccttcatccctctctacgataaggttgcagaaatgggaagagctacccgtggttgcttttgattacccttaggaagtgagacagtgtttttgaaaatatgtatttcccccatttctccctctccttccctgacacttctctgggctgcacagcagaaacgttggtaaaagggcagtttggtttcaacacagcagacctgatatgggatcccttagccactttagtcaaacagccctgacagagtctataattgagttcaggccccccaccttgcctaataactgcaaatcgcatgttcagccagcagcctcctaagcccaccttcctcccccattagagaacacccatcctaggtgctctccaggctgtgtcattggcagggcttcacatgcaggaggcctctctcaggtgagtccaggttaaactgttgagttgtggcttcaacagatatgtatggcatgctgggatgtgccaggtgcctgcgttgtgccagttgctggagaggtagtgtgagcagagcagctgaaatcttgccatcaagcaaccctcattctcatgcctgtaggtttccattgctctgtcccaggacacttgcgtgccagagacgccacaacttcatgtccctgtctcttgcaagctccccgtgctgccagtacttcatgccttggatgtggtcccaccagcccagtggccggggtcagcttaggctctgcttcccagtggacgggtgtgctaagggtttattttatgtaaaaaaaaaaaaaaaaacaaaaaaaaaccctgagaccatgagtggggctggcatcttgccagcctgggcttcagggatgtttggggggggtggttagagggtagttgtagggtactttgtcacccccctccccctgccaccctccctggcacgtttatttcacagcagagccaagtctgtggcaggttgacacagactgtgttgccagagctgaaataattccacttcatcctatgagcgtgttgggctagcttgttctaattttggccactttggctgttttcttcagttttatgcattctctcctgccccaaagtgccaagccatttgtgaaggctctgccagacacctccaagcttgagagctcagcaccatgcaccaagagcaggagaaaagacgtaaacctaccccagcaactgtggcctctcgacagccctggctaactaacttacatttgtggggaagccaacagacacagcaggaggagagggaggtggcgctggtggaccaaggatctgtgctacccgctcccctccttggaggtgcagtgatgatgggagttatttttaccatccgggcgctgatagctgcactattaataaattgcatgtgttccttttgaaggtaggggatggttctgggtgagaggggagcaggctgagccggcgggggatctgctgtcctcccttttgagtcagttctaatcccatgtgtgtctgggccaccagaccgaaatggttgctgagaaacttgtctgttcatgtcccaaggcataacttcccaacatttaagaaaccccaatagacacctctgccctggccacgttcacagatccttctcttgaccggaaaccctgggaccctaagaacccctgaagcttggggtgggtgtgtgcttctggggtctcttttgggacctcctttgtcagtaccccttcttttttctaagcagctaataagaggttgggtgaaagagtgcatctcctcccaggattccacaacaaaattcttatcttccatggatgctttaattggaagtgggttgccgacccccttgtgcctagaaaaggccttcgcttgggtttcctttgtatgcttcagccttcctagttggtttttctaggcctggtgtgagaggtagggaagtctgcacataactaattcttttgcttaagggcctatggcacaagtgcacaaacttcaattcttgatgttctaagctctctcctctaacagagggagtgctgaaagcttttgagtcaagacaatggagtgctcttcctccctcactctgccttccgagcttatggttccttttctcaggagaggattttcaggattattggaggattaggtcattgtcagatgactggaaaacctaaataggatctctctccagctcaaggttgtcccagtgaggaagactttaccaacttctcactctaccccactactcacatgagtgttagctccaccttgcaaaggctgaagaccagttctccccagtgaaagctgcctcattcttttatggagttccctggagtggcagagctataaagacgagcattgggatttgcagtctccatgtagcctttcgtgcttggcaacccctgtagactttttgtcccaagcagattgcgtgcgtgcgcctgtgtgtgagaataagtgccttactttgctgtgtggttttcaacttgtactccgtggccagcccccagttgccagggctcgacggcagccaaggacaccatacctcagtatagttatatataaaagggacacggattgtgacagtttcaccccatttgtttctaaccccgctgcccaggattagggtctgtggtgtgttctgttttgtttttggtttctcccttgtgtcagttctcttctggcccagctgggtggctgtggaagtctgtgaggtggcccaaccacaagcatacctattaagagaagcccagagcttccagcccccacttcgaaaactctcctctggccccacatagcaaactccttctccgttattttccccacccccagattttttttaaaaggcccacttgccgtaacctcttttggtctattttgcttcccattcagcccaaagtttatatgataaaggtgtttacttttacttcccagtctccaagtgctaacacataaacacatacatgtctgactgttgcagaactgttcgagctcctaattcagtgttaccttgttttagtcgcagcaaccctctcccctaccccttgcccgcccacgtttttctcactcttccgggttgtgcaataactctcccagccagtggtcctttccacagcctttctgtcccttaaaacacctgcaactgggggagaaatgggacccatgggagggggagtcgtcatcccttacacaagaaatagccactttccttttgttgtcattcttgtgatcctgggtgggtttctgtggcactcttttagaacatgtagcatcatcttagaggtctatttttaaaaaatgtgttgaagaggaaaaaaccattctcacgatggggcttaagtcattgtccaggaataagattggcgtggtgcccatgacatcaccgtcactctgcctaaaagcactctagagctacttgttcacgtggagaggaaggatattttgcgaagcaacagccgcaggtggagagccctgttcacctgatagggtctagctgtgacagtaaatataataccgctgtttccttgggtacagatttgagtgttcatgtgatgagactgtaaacctcatttttcggttcctctgtttaaaaaaacatctgaaggatgaactaaggctgctggtgccctgagcaactgataatgcaaatgtggacaaagtgtctgttttctactctagcctgttcatatggaccaaatttcaacaaggaactcaaggaaaatttgtacctgccgtatttatgctttcatgtaaaaaagggttggggggaggggtgtctttttgcttttggtgaactttttttcaaaatcatttttccactgtttctgtctggttttaaaacaaattacagttttgtatggattttttaaatgtacattttggaacaaatgatcaaatattttctgaaataacaataaaaggcagaaaattatcagaa

SEQ ID NO: 173686 - protein, 624 aa, Artificial Sequence
  derived and/or modified sequence
MQPDPRPSGAGACCRFLPLQSQCPEGAGDAVMYASTECKAEVTPSQHGNRTFSYTLEDHTKQAFGIMNELRLSQQLCDVTLQVKYQDAPAAQFMAHKVVLASSSPVFKAMFTNGLREQGMEVVSIEGIHPKVMERLIEFAYTASISMGEKCVLHVMNGAVMYQIDSVVRACSDFLVQQLDPSNAIGIANFAEQIGCVELHQRAREYIYMHFGEVAKQEEFFNLSHCQLVTLISRDDLNVRCESEVFHACINWVKYDCEQRRFYVQALLRAVRCHSLTPNFLQMQLQKCEILQSDSRCKDYLVKIFEELTLHKPTQVMPCRAPKVGRLIYTAGGYFRQSLSYLEAYNPSDGTWLRLADLQVPRSGLAGCVVGGLLYAVGGRNNSPDGNTDSSALDCYNPMTNQWSPCAPMSVPRNRIGVGVIDGHIYAVGGSHGCIHHNSVERYEPERDEWHLVAPMLTRRIGVGVAVLNRLLYAVGGFDGTNRLNSAECYYPERNEWRMITAMNTIRSGAGVCVLHNCIYAAGGYDGQDQLNSVERYDVETETWTFVAPMKHRRSALGITVHQGRIYVLGGYDGHTFLDSVECYDPDTDTWSEVTRMTSGRSGVGVAVTMEPCRKQIDQQNCTC

SEQ ID NO: 173687 - DNA, 2577 bp, Artificial Sequence
  derived and/or modified sequence
tctgcttagtcatggtgacctgcgcgcgctccgcgcctcccccacgcgcagcgatggaggcgccggggctcgggcggtggaggcggagccggagcgcggccatggcggggtccctgagtgccagaggtggtggtgttgcttatcttctggaaccccatgcagccagatcccaggcctagcggggctggggcctgctgccgattcctgcccctgcagtcacagtgccctgagggggcaggggacgcggtgatgtacgcctccactgagtgcaaggcggaggtgacgccctcccagcatggcaaccgcaccttcagctacaccctggaggatcataccaagcaggcctttggcatcatgaacgagctgcggctcagccagcagctgtgtgacgtcacactgcaggtcaagtaccaggatgcaccggccgcccagttcatggcccacaaggtggtgctggcctcatccagccctgtcttcaaggccatgttcaccaacgggctgcgggagcagggcatggaggtggtgtccattgagggtatccaccccaaggtcatggagcgcctcattgaattcgcctacacggcctccatctccatgggcgagaagtgtgtcctccacgtcatgaacggtgctgtcatgtaccagatcgacagcgttgtccgtgcctgcagtgacttcctggtgcagcagctggaccccagcaatgccatcggcatcgccaacttcgctgagcagattggctgtgtggagttgcaccagcgtgcccgggagtacatctacatgcattttggggaggtggccaagcaagaggagttcttcaacctgtcccactgccaactggtgaccctcatcagccgggacgacctgaacgtgcgctgcgagtccgaggtcttccacgcctgcatcaactgggtcaagtacgactgcgaacagcgacggttctacgtccaggcgctgctgcgggccgtgcgctgccactcgttgacgccgaacttcctgcagatgcagctgcagaagtgcgagatcctgcagtccgactcccgctgcaaggactacctggtcaagatcttcgaggagctcaccctgcacaagcccacgcaggtgatgccctgccgggcgcccaaggtgggccgcctgatctacaccgcgggcggctacttccgacagtcgctcagctacctggaggcttacaaccccagtgacggcacctggctccggttggcggacctgcaggtgccgcggagcggcctggccggctgcgtggtgggcgggctgttgtacgccgtgggcggcaggaacaactcgcccgacggcaacaccgactccagcgccctggactgttacaaccccatgaccaatcagtggtcgccctgcgcccccatgagcgtgccccgtaaccgcatcggggtgggggtcatcgatggccacatctatgccgtcggcggctcccacggctgcatccaccacaacagtgtggagaggtatgagccagagcgggatgagtggcacttggtggccccaatgctgacacgaaggatcggggtgggcgtggctgtcctcaatcgtctcctttatgccgtggggggctttgacgggacaaaccgccttaattcagctgagtgttactacccagagaggaacgagtggcgaatgatcacagcaatgaacaccatccgaagcggggcaggcgtctgcgtcctgcacaactgtatctatgctgctgggggctatgatggtcaggaccagctgaacagcgtggagcgctacgatgtggaaacagagacgtggactttcgtagcccccatgaagcaccggcgaagtgccctggggatcactgtccaccaggggagaatctacgtccttggaggctatgatggtcacacgttcctggacagtgtggagtgttacgacccagatacagacacctggagcgaggtgacccgaatgacatcgggccggagtggggtgggcgtggctgtcaccatggagccctgccggaagcagattgaccagcagaactgtacctgttgaggcacttttgtttcttgggcaaaaatacagtccaatggggagtatcattgtttttgtacaaaaaccgggactaaaagaaaagacagcactgcaaataacccatcttccgggaagggaggccaggatgcctcagtgttaaaatgacatctcaaaagaagtccaaagcgggaatcatgtgcccctcagcggagccccgggagtgtccaagacagcctggctgggaaagggggtgtggaaagagcaggcttccaggagagaggcccccaaaccctctggccgggtaataggcctgggtcccactcacccatgccggcagctgtcaccatgtgatttattcttggatacctgggagggggccaatgggggcctcagggggaggccccctctggaaatgtggttcccagggatgggcctgtacatagaagccaccggatggcacttccccaccggatggacagttattttgttgataagtaaccctgtaattttccaaggaaaataaagaacagactaactagtgtctttcaccctgaaaaaaaaaaaaaa

SEQ ID NO: 173688 - DNA, 1875 bp, Artificial Sequence
  derived and/or modified sequence
atgcagccagaccctcggccctccggagccggcgcctgctgtcgatttctgcctcttcagagccagtgtcccgagggagctggcgatgcggtgatgtatgctagcacggaatgtaaagcagaggtgacaccttctcagcacggcaaccgcacattcagctacacactagaagaccacacaaaacaggcattcggcattatgaacgagctgaggctgagccagcaactgtgcgacgtaaccttgcaagtgaagtatcaggacgccccggctgcccagttcatggctcacaaagtggtgttggctagctcgtctccagtcttcaaggctatgttcaccaatggcctgcgcgagcaagggatggaagtggtatcaattgaggggatacacccaaaagtgatggagcggcttatcgagttcgcttataccgccagtatttctatgggtgagaagtgcgtgttgcacgtgatgaatggagctgtgatgtatcagattgactcagtggtgagagcctgtagcgacttcctcgtgcagcagctcgatccctctaatgccattggaatcgcgaatttcgccgagcagatcggctgcgtggagctccaccaaagagctagagaatacatttacatgcattttggtgaggttgcaaaacaggaggaattcttcaacttgagccactgtcaattggtgaccttgatttcacgtgatgatctgaatgttagatgcgagagcgaggtctttcacgcctgcattaattgggtcaagtatgactgtgaacaaaggcgtttctacgtgcaggcgctgcttagggcagtacggtgtcacagcctcactccgaattttttacagatgcagctgcagaagtgcgaaatcctacagtccgattccagatgtaaagattacctggtgaaaatctttgaagagctcaccctccacaaacccacacaggtgatgccctgtcgtgcgcccaaagtcggacgactgatctacacagccggcggctactttagacaaagcctgtcctatttggaggcctacaacccttcagatggaacctggcttcggttggcggatctccaggtacctagatcgggcctggcagggtgcgtcgttggggggttactttatgcagtgggcgggagaaacaactcacccgacggaaatactgacagctcagctctggactgctacaatcccatgacgaatcagtggtccccatgcgctcctatgagcgtgcctcgcaatcgcataggggtgggggtgatcgatggacacatctatgccgttggagggtctcacggatgtatccaccataactctgtcgagcggtacgagcctgaaagagacgagtggcatcttgtagccccaatgcttactaggcgcataggagtgggagtggcggtattgaataggctgttatacgctgtgggcggattcgatggaacaaaccgtctgaattccgcggaatgctactatcctgagcgcaacgagtggaggatgatcaccgcgatgaacaccattaggtctggggccggggtctgcgtcctacacaattgcatttatgccgccggcggttacgacgggcaagaccagctgaactctgtggaacgatacgacgtagaaactgaaacatggacgtttgtcgcgcctatgaagcaccgcagaagtgccctggggatcacagtgcatcagggcaggatttatgttctgggcgggtatgacgggcacacattccttgacagtgtggaatgctatgaccctgacaccgacacgtggagtgaggtcactcgcatgacaagcgggaggtccggagtgggcgtagctgtaactatggaaccatgtagaaaacagatcgaccagcaaaactgtacttgctag

SEQ ID NO: 173689 - DNA, 1875 bp, Artificial Sequence
  derived and/or modified sequence
atgcagcctgacccaagaccatccggcgccggcgcctgctgccgttttctgcctctccaatcacaatgtcctgagggggctggtgatgctgtgatgtacgccagcactgagtgcaaagcggaagtaaccccgtcacagcatgggaatcgcactttttcatacactctggaggatcacacaaagcaagcattcggaattatgaatgagttgcgtctatcgcaacaactttgtgacgtgacactgcaagttaagtaccaggatgctccggccgcacaattcatggcccacaaggtcgttctcgctagttcaagcccagtctttaaagcaatgttcaccaatgggctgagagagcagggaatggaagtagtgtctatcgagggtatccatccaaaggtgatggagaggttgattgagtttgcatacacggccagcattagcatgggcgagaaatgcgtccttcacgtgatgaacggtgctgtaatgtatcagatcgattccgtcgtgagagcctgctctgacttcctcgttcagcagcttgacccttctaacgcaattgggattgcaaatttcgctgaacaaatcggttgtgttgagctccaccagagagcacgtgaatacatatatatgcattttggggaggtcgccaagcaggaggagtttttcaacctttctcactgtcagcttgtgacactgatttcacgagacgaccttaatgtgaggtgcgagtctgaggtgttccatgcctgcattaactgggtgaaatacgactgcgagcagcgtaggttctacgtccaggccttgctgcgtgctgtccggtgtcattcactaacgcccaatttcttgcaaatgcagctccagaaatgtgaaattcttcagagtgatagccgctgtaaggattatttggtgaagattttcgaggaacttacacttcataagccaacacaagtgatgccctgcagagcccctaaagtaggtcggcttatttacaccgcaggtgggtatttccgccagtccctgtcctacctggaggcttacaatccatccgacgggacctggctaaggctagctgatctgcaagttccgaggagcggtttagccggttgcgtcgtgggcggtctcctgtacgccgtcggtgggaggaacaactcacctgatggtaacaccgacagttccgcattggactgttacaatccaatgactaaccagtggtctccctgcgccccaatgagcgtacctcggaacaggatcggcgtcggagtgatcgacggacatatctatgcagtcggtgggagccacggatgtattcatcataactccgttgaacgttatgaaccagaacgggacgagtggcatctagtggcccctatgctcacacggcgcattggggtaggagtcgctgtactcaaccggttattatatgccgtgggagggtttgatggaacaaaccggctgaatagcgccgagtgctactaccccgaacgcaacgagtggcgtatgataacggcgatgaacaccatacggagtggcgctggagtttgcgttttacataactgcatctatgcagccggcggatacgatggccaggatcaactaaactccgtggaaagatatgacgtggaaaccgaaacctggacattcgtcgcgccgatgaagcaccggaggagtgctcttggtatcactgtccaccagggtagaatctacgtcctcgggggttacgatggccataccttcctggattcagttgaatgctacgacccggacaccgatacttggtccgaagtcacacgaatgacgagtggcagatcaggggttggtgtcgccgtgacaatggaaccttgccgaaagcagattgatcaacagaattgtacctgctag

SEQ ID NO: 173690 - DNA, 2592 bp, Artificial Sequence
  derived and/or modified sequence
ctttccgccctctccccgcctccttttcgggcgtcccgaggccgctccccaaccgacaaccaagaccccgcaggccacgcagccctggagccgaggccccccgacggcggaggcgcccgcgggtcccctacagccaaggtccctgagtgccagaggtggtggtgttgcttatcttctggaaccccatgcagccagatcccaggcctagcggggctggggcctgctgccgattcctgcccctgcagtcacagtgccctgagggggcaggggacgcggtgatgtacgcctccactgagtgcaaggcggaggtgacgccctcccagcatggcaaccgcaccttcagctacaccctggaggatcataccaagcaggcctttggcatcatgaacgagctgcggctcagccagcagctgtgtgacgtcacactgcaggtcaagtaccaggatgcaccggccgcccagttcatggcccacaaggtggtgctggcctcatccagccctgtcttcaaggccatgttcaccaacgggctgcgggagcagggcatggaggtggtgtccattgagggtatccaccccaaggtcatggagcgcctcattgaattcgcctacacggcctccatctccatgggcgagaagtgtgtcctccacgtcatgaacggtgctgtcatgtaccagatcgacagcgttgtccgtgcctgcagtgacttcctggtgcagcagctggaccccagcaatgccatcggcatcgccaacttcgctgagcagattggctgtgtggagttgcaccagcgtgcccgggagtacatctacatgcattttggggaggtggccaagcaagaggagttcttcaacctgtcccactgccaactggtgaccctcatcagccgggacgacctgaacgtgcgctgcgagtccgaggtcttccacgcctgcatcaactgggtcaagtacgactgcgaacagcgacggttctacgtccaggcgctgctgcgggccgtgcgctgccactcgttgacgccgaacttcctgcagatgcagctgcagaagtgcgagatcctgcagtccgactcccgctgcaaggactacctggtcaagatcttcgaggagctcaccctgcacaagcccacgcaggtgatgccctgccgggcgcccaaggtgggccgcctgatctacaccgcgggcggctacttccgacagtcgctcagctacctggaggcttacaaccccagtgacggcacctggctccggttggcggacctgcaggtgccgcggagcggcctggccggctgcgtggtgggcgggctgttgtacgccgtgggcggcaggaacaactcgcccgacggcaacaccgactccagcgccctggactgttacaaccccatgaccaatcagtggtcgccctgcgcccccatgagcgtgccccgtaaccgcatcggggtgggggtcatcgatggccacatctatgccgtcggcggctcccacggctgcatccaccacaacagtgtggagaggtatgagccagagcgggatgagtggcacttggtggccccaatgctgacacgaaggatcggggtgggcgtggctgtcctcaatcgtctcctttatgccgtggggggctttgacgggacaaaccgccttaattcagctgagtgttactacccagagaggaacgagtggcgaatgatcacagcaatgaacaccatccgaagcggggcaggcgtctgcgtcctgcacaactgtatctatgctgctgggggctatgatggtcaggaccagctgaacagcgtggagcgctacgatgtggaaacagagacgtggactttcgtagcccccatgaagcaccggcgaagtgccctggggatcactgtccaccaggggagaatctacgtccttggaggctatgatggtcacacgttcctggacagtgtggagtgttacgacccagatacagacacctggagcgaggtgacccgaatgacatcgggccggagtggggtgggcgtggctgtcaccatggagccctgccggaagcagattgaccagcagaactgtacctgttgaggcacttttgtttcttgggcaaaaatacagtccaatggggagtatcattgtttttgtacaaaaaccgggactaaaagaaaagacagcactgcaaataacccatcttccgggaagggaggccaggatgcctcagtgttaaaatgacatctcaaaagaagtccaaagcgggaatcatgtgcccctcagcggagccccgggagtgtccaagacagcctggctgggaaagggggtgtggaaagagcaggcttccaggagagaggcccccaaaccctctggccgggtaataggcctgggtcccactcacccatgccggcagctgtcaccatgtgatttattcttggatacctgggagggggccaatgggggcctcagggggaggccccctctggaaatgtggttcccagggatgggcctgtacatagaagccaccggatggcacttccccaccggatggacagttattttgttgataagtaaccctgtaattttccaaggaaaataaagaacagactaactagtgtctttcaccctg

SEQ ID NO: 173691 - DNA, 2563 bp, Artificial Sequence
  derived and/or modified sequence
tctgcttagtcatggtgacctgcgcgcgctccgcgcctcccccacgcgcagcgatggaggcgccggggctcgggcggtggaggcggagccggagcgcggccatggcggggtccctgagtgccagaggtggtggtgttgcttatcttctggaaccccatgcagccagatcccaggcctagcggggctggggcctgctgccgattcctgcccctgcagtcacagtgccctgagggggcaggggacgcggtgatgtacgcctccactgagtgcaaggcggaggtgacgccctcccagcatggcaaccgcaccttcagctacaccctggaggatcataccaagcaggcctttggcatcatgaacgagctgcggctcagccagcagctgtgtgacgtcacactgcaggtcaagtaccaggatgcaccggccgcccagttcatggcccacaaggtggtgctggcctcatccagccctgtcttcaaggccatgttcaccaacgggctgcgggagcagggcatggaggtggtgtccattgagggtatccaccccaaggtcatggagcgcctcattgaattcgcctacacggcctccatctccatgggcgagaagtgtgtcctccacgtcatgaacggtgctgtcatgtaccagatcgacagcgttgtccgtgcctgcagtgacttcctggtgcagcagctggaccccagcaatgccatcggcatcgccaacttcgctgagcagattggctgtgtggagttgcaccagcgtgcccgggagtacatctacatgcattttggggaggtggccaagcaagaggagttcttcaacctgtcccactgccaactggtgaccctcatcagccgggacgacctgaacgtgcgctgcgagtccgaggtcttccacgcctgcatcaactgggtcaagtacgactgcgaacagcgacggttctacgtccaggcgctgctgcgggccgtgcgctgccactcgttgacgccgaacttcctgcagatgcagctgcagaagtgcgagatcctgcagtccgactcccgctgcaaggactacctggtcaagatcttcgaggagctcaccctgcacaagcccacgcaggtgatgccctgccgggcgcccaaggtgggccgcctgatctacaccgcgggcggctacttccgacagtcgctcagctacctggaggcttacaaccccagtgacggcacctggctccggttggcggacctgcaggtgccgcggagcggcctggccggctgcgtggtgggcgggctgttgtacgccgtgggcggcaggaacaactcgcccgacggcaacaccgactccagcgccctggactgttacaaccccatgaccaatcagtggtcgccctgcgcccccatgagcgtgccccgtaaccgcatcggggtgggggtcatcgatggccacatctatgccgtcggcggctcccacggctgcatccaccacaacagtgtggagaggtatgagccagagcgggatgagtggcacttggtggccccaatgctgacacgaaggatcggggtgggcgtggctgtcctcaatcgtctcctttatgccgtggggggctttgacgggacaaaccgccttaattcagctgagtgttactacccagagaggaacgagtggcgaatgatcacagcaatgaacaccatccgaagcggggcaggcgtctgcgtcctgcacaactgtatctatgctgctgggggctatgatggtcaggaccagctgaacagcgtggagcgctacgatgtggaaacagagacgtggactttcgtagcccccatgaagcaccggcgaagtgccctggggatcactgtccaccaggggagaatctacgtccttggaggctatgatggtcacacgttcctggacagtgtggagtgttacgacccagatacagacacctggagcgaggtgacccgaatgacatcgggccggagtggggtgggcgtggctgtcaccatggagccctgccggaagcagattgaccagcagaactgtacctgttgaggcacttttgtttcttgggcaaaaatacagtccaatggggagtatcattgtttttgtacaaaaaccgggactaaaagaaaagacagcactgcaaataacccatcttccgggaagggaggccaggatgcctcagtgttaaaatgacatctcaaaagaagtccaaagcgggaatcatgtgcccctcagcggagccccgggagtgtccaagacagcctggctgggaaagggggtgtggaaagagcaggcttccaggagagaggcccccaaaccctctggccgggtaataggcctgggtcccactcacccatgccggcagctgtcaccatgtgatttattcttggatacctgggagggggccaatgggggcctcagggggaggccccctctggaaatgtggttcccagggatgggcctgtacatagaagccaccggatggcacttccccaccggatggacagttattttgttgataagtaaccctgtaattttccaaggaaaataaagaacagactaactagtgtctttcaccctg

SEQ ID NO: 173692 - DNA, 1875 bp, Artificial Sequence
  derived and/or modified sequence
atgcagcctgacccccggcccagcggggccggggcctgctgccgcttcctgcccctgcagagccagtgcccagagggcgctggagatgctgtgatgtatgccagcacagagtgcaaggccgaggtgacccccagccagcacggcaacagaaccttctcctacaccctggaggaccacaccaagcaggccttcggcatcatgaatgagctgcggctgagccagcagctgtgtgatgtgaccctgcaggtgaagtaccaggatgccccagctgcccagttcatggcccacaaggtggtgctggccagcagcagccctgtgttcaaggccatgttcaccaacggcctgcgggagcagggcatggaggtggtgtccattgagggcatccaccccaaggtgatggagcggctgattgaatttgcctacacagccagcatctccatgggagagaagtgtgtgctgcacgtgatgaatggagctgtgatgtaccagattgacagcgtggtgcgggcctgcagcgacttcctggtgcagcagctggaccccagcaatgccatcggcatcgccaactttgctgagcagatcggctgtgtggagctgcaccagagggcccgggagtacatctacatgcactttggagaggtggccaagcaggaggagttcttcaacctgagccactgccagctggtgaccctcatcagcagagatgacctgaatgtgcgctgtgagagcgaggtgttccacgcctgcatcaactgggtgaagtatgactgtgagcagaggcgcttctacgtgcaggccctgctgcgggctgtgcgctgccacagcctgacccccaacttcctgcagatgcagctgcagaagtgtgagatcctgcagagcgacagccgctgcaaggactacctggtgaagatctttgaggagctgaccctgcacaagcccacccaggtgatgccctgccgggcccccaaggtgggccgcctcatctacacagctgggggctacttccggcagagcctgagctacctggaggcctacaaccccagtgatggcacctggctgcggctggccgacctgcaggtgcccaggagcggcctggccggctgtgtggtgggcggcctgctgtatgctgtgggcggcaggaacaacagcccagatggcaacacagacagcagcgccctggactgctacaaccccatgaccaaccagtggagcccctgtgcccccatgtctgtgcccaggaaccgcatcggcgtgggcgtgattgatggccacatctatgctgtgggcggcagccacggctgcatccaccacaacagcgtggagagatatgagcctgagagagatgagtggcacctggtggcccccatgctgaccaggagaattggagtgggcgtggccgtgctgaaccggctgctgtatgctgtgggcggctttgatggcaccaaccggctgaacagcgctgagtgctactacccagagagaaatgagtggaggatgatcacagccatgaacaccatccgcagcggggccggcgtgtgtgtgctgcacaactgcatctatgctgctgggggctatgatggccaggaccagctgaacagcgtggagagatatgatgtggagacagagacctggacctttgtggcccccatgaagcacagaagaagtgccctgggcatcaccgtgcaccagggccgcatctacgtgctgggcggctatgatggccacaccttcctggacagcgtggagtgctatgaccctgacacagacacctggagcgaggtgaccaggatgaccagcggccgcagcggcgtgggcgtggccgtgaccatggagccctgcaggaagcagattgaccagcagaactgcacctgctag

SEQ ID NO: 173693 - DNA, 1875 bp, Artificial Sequence
  derived and/or modified sequence
atgcagcccgacccccggcccagcggcgccggcgcctgctgccggttcctcccactgcagtcccagtgccccgagggagccggagacgctgtcatgtacgccagtaccgagtgtaaggcagaagtgacaccctcccagcatgggaacaggaccttctcttacacacttgaggaccataccaagcaggcttttggtatcatgaatgaactgcggctctcacagcagctgtgcgatgtaactctccaggtgaaataccaagacgcacccgcagctcaatttatggcccataaggtggtgctggcatcgtccagccctgtatttaaggccatgtttacaaacggtctacgcgaacagggaatggaagtcgtgtcaatcgaaggcatacaccccaaagtcatggaacgcctgatcgaattcgcgtatacagctagcattagcatgggcgagaagtgcgttctccacgtcatgaacggcgccgtgatgtatcagattgatagtgtggttcgtgcctgcagcgacttcctcgttcaacagttggacccttctaatgccatcggaattgccaactttgccgaacaaattgggtgcgtggaactgcaccagagggcccgggagtacatttatatgcacttcggagaagtggctaagcaggaggaattcttcaatttgagtcattgtcaactcgttactctgattagcagagacgatctgaacgtgaggtgcgagtccgaagtttttcatgcttgtattaactgggtgaagtacgactgtgagcagcgccggttctacgtacaagcacttctccgggccgtgcggtgtcacagcctcacccccaatttcctccagatgcagctgcaaaagtgtgagatcctccaatctgattcacgctgtaaggattacctcgtcaagatctttgaagagctgactctgcacaaaccaacgcaggtgatgccctgtagagcccctaaagttggaagacttatctacacagcaggggggtatttcaggcagtccctctcatatctggaggcctacaacccttccgatggaacttggctgaggctggcagatctgcaggtgccaagaagtgggctggcgggttgtgtggtaggggggttgttgtacgctgtaggaggtaggaataattctcctgatgggaacacagatagctccgctctggactgttacaaccctatgacaaaccagtggtcaccttgtgctccaatgtcagtgccccgaaatcgaataggtgtgggggttattgatgggcatatctacgccgtcggtggttcccacggctgcattcaccacaattcagttgaaagatacgagcccgaacgggacgagtggcatttggtggcccccatgctgacccggagaattggagtgggagtcgctgtgctaaatcgactgctgtacgcagtaggaggatttgatggaactaatcgactgaattcagcagaatgttactatcccgaacggaacgagtggagaatgattacagctatgaatactattcgatctggagccggggtgtgtgtgttacataactgtatttacgccgccggcggttacgacggccaagaccagctgaattctgttgaacgttatgacgttgagacagagacttggacctttgtggctcccatgaaacaccggaggtcagctctgggcattacggtccaccaggggagaatctatgtgcttggaggctatgacgggcatacgtttttggactctgttgagtgctatgaccctgatacagacacgtggagcgaggtgacccgtatgaccagtggcaggagcggagtgggggtggcagtcacaatggaaccgtgtcgcaagcaaatcgaccagcagaactgcacatgttag

SEQ ID NO: 173694 - DNA, 1875 bp, Artificial Sequence
  derived and/or modified sequence
atgcagcccgacccccggcccagcggcgccggcgcctgctgccggtttctccctctccagagccagtgccccgaaggagccggggatgctgtcatgtatgcgtccactgaatgtaaggccgaagtgactccctcacagcacggtaataggaccttttcctatacccttgaggatcatacgaagcaggcttttggcatcatgaacgaactgcgattatctcagcagttatgcgatgtcactctgcaagtgaagtaccaggatgccccagctgctcagtttatggcccacaaggtcgtcctcgcttcaagctctccagtctttaaagcgatgttcactaatggcctacgagaacagggcatggaggttgtgtctattgaagggatacatccaaaagtgatggaacggttgatagaatttgcttataccgccagtatcagtatgggggaaaaatgcgtcctgcacgtcatgaacggtgcggttatgtaccagattgattccgttgtgcgagcttgcagcgatttcctcgtgcagcagcttgatccctcaaacgcaatcggcattgccaactttgccgagcaaatcggctgcgtggagctccaccagcgcgctcgagagtacatttacatgcacttcggtgaggttgcgaagcaggaggagttcttcaatctttctcattgtcagctggtgaccctaatttctcgtgatgacctgaatgttcgttgtgaaagcgaagtcttccatgcctgcataaattgggtgaaatatgattgcgaacaaagacgcttttatgttcaggccttgttgagagctgtccgctgtcactcgctcacgcctaattttctgcaaatgcagctgcagaagtgcgaaatcctgcagagcgactcccgctgtaaggactacctggttaagattttcgaagagctgacacttcacaagccaacccaggtgatgccctgtcgagctcccaaagtgggccggcttatttacaccgctggtggctatttccgacagtctctgagctacctcgaggcatacaacccgagcgatggaacttggttacggctagccgacctgcaggtgccgcgcagtgggctggccggttgcgttgtcggcggtctcttgtacgccgtaggggggcgaaataacagccctgacggcaacactgactccagtgctctggattgttacaatcccatgacgaaccaatggtccccttgtgccccgatgagtgtaccacggaacaggattggcgtcggagtcattgacggtcacatttatgccgtgggcggtagtcacggttgtatccaccacaattccgtggagagatatgagccagagcgcgatgaatggcatttagtggcccctatgttaacaaggcggatcggcgtcggcgtcgccgtccttaacaggctcctctatgcggtcgggggttttgacggaactaaccgcctcaattctgccgaatgttactaccccgagagaaatgagtggagaatgatcaccgccatgaataccattcggtccggagccggtgtatgtgtcctccacaattgtatctatgcagctggcggctatgacggccaggatcagctgaacagtgttgaaagatatgacgtcgaaacagaaacctggacattcgtagcgcctatgaagcatcggcggtcagcactgggcattacagtgcaccagggacggatctacgtgcttggcggttacgacggacatacctttctggacagcgtggaatgctacgatcctgacaccgacacttggtcggaagtcactcgaatgacaagcggcagaagtggtgtgggggtggccgttaccatggaaccctgccgaaagcagatagaccaacagaactgcacatgctag

SEQ ID NO: 173695 - DNA, 1875 bp, Artificial Sequence
  derived and/or modified sequence
atgcagcctgaccctagaccatcaggcgctggcgcttgctgtcggttcctccctctccagtcacaatgccccgagggcgctggcgatgcagtgatgtatgcctccaccgaatgcaaagccgaagttacaccttcacagcacgggaaccggacattcagctacaccctcgaggaccacacaaaacaggctttcggtataatgaacgagctgcggctgagtcaacagttgtgcgacgtaaccctgcaggtaaaatatcaggacgcaccagccgcacagttcatggcccataaagtggttctagcctcttccagccccgtctttaaggctatgtttaccaatggcctgagagaacagggaatggaggtggtgtcgattgagggcatccacccaaaagtcatggaacggctcatcgagtttgcatacactgccagtataagtatgggagaaaagtgtgtgctgcacgtgatgaacggcgcagtaatgtatcagattgacagcgtagtgagagcatgcagcgactttctcgttcagcagctcgatcctagcaacgctatcgggatcgcaaacttcgccgagcagatcggatgtgtggagctgcatcaacgcgctcgcgaatacatatatatgcacttcggcgaggtagccaaacaggaggaattctttaatctgtcccactgccagctcgtaacattgatctcgcgggacgacctgaatgtcagatgcgagtcagaggttttccatgcatgtattaattgggtgaaatacgactgcgagcagagacgattttatgtgcaagcgctcctgcgagccgtgaggtgccatagcctgacacccaacttccttcaaatgcagcttcagaaatgtgaaattctccagtccgactccagatgcaaggattatctggtgaagattttcgaggagttaacacttcacaagcctacccaagtgatgccttgccgggctccaaaggtgggtcgactgatctatactgccggaggctacttccgacagagcttgtcatatttggaagcttataatcctagtgacggaacctggctgcgcctggcggacctccaagtgccccgttctggattggcaggctgcgtagtagggggactgctttacgctgtggggggtcgcaacaatagtcccgacgggaacacagattcttctgccttagattgttataaccctatgacaaatcagtggagcccatgtgctccgatgagtgtgcctcgcaacagaatcggagtgggtgtaattgatggccacatctacgccgtggggggatcccatgggtgtatccatcacaattctgtggagcgatatgagcctgaaagggacgagtggcacttggttgctcccatgttaactcggagaataggcgtgggcgtggccgtgctgaaccgtctgctatatgccgtcgggggatttgacggcactaaccgcttaaactccgctgaatgttactatccggaaagaaacgagtggagaatgatcaccgctatgaatacaattcgatctggagcaggagtctgcgtgctgcacaattgcatctatgcggctggtggttacgacggccaggaccaactcaatagcgttgagagatacgatgtggagactgagacctggacctttgtggctcctatgaaacatcgtcgtagcgctttgggtatcactgtgcaccagggacggatctatgttctggggggatatgatggacacacctttttagactctgttgaatgctacgacccagatactgatacttggagcgaagtgacccggatgacaagcggcagatctggggtcggagtggccgtgaccatggagccatgtcggaagcagattgatcagcaaaattgcacttgctag

SEQ ID NO: 173696 - DNA, 1875 bp, Artificial Sequence
  derived and/or modified sequence
atgcagcccgacccaaggccaagcggggcaggtgcatgttgtaggtttttgcctctgcaaagccaatgtccagaaggcgctggagacgcagtaatgtacgcaagcacagagtgtaaggccgaggtaactccctcacagcatgggaacagaactttttcttatactctcgaggatcataccaaacaggcatttggaatcatgaatgaacttcgtcttagtcagcagttgtgtgacgtaaccctgcaggtcaaatatcaggatgcccctgccgctcagttcatggcccacaaggtcgtgctggcatcctcatctcccgtgtttaaagctatgttcaccaatggattgagggaacaagggatggaggtggtgtctattgaaggaattcaccccaaggtgatggagcggctgattgaatttgcttacacagcttctattagcatgggggagaaatgcgtcctacacgtcatgaacggggcagttatgtaccaaatcgacagtgtggttcgcgcatgtagcgatttcctggtccaacagctggatcccagcaacgcaatcgggattgctaattttgccgagcagatcggatgtgtagagctgcatcaaagagcgagggaatatatatatatgcactttggggaggtagccaagcaagaagaattttttaatctgtcccattgtcagctcgtaactctcattagccgagatgacctgaatgtccgatgcgagtctgaggtgtttcacgcatgtatcaattgggtgaaatatgattgcgagcagcgcagattttacgtgcaagctctcttgcgggcagttagatgtcacagtctgactcctaacttccttcagatgcagcttcagaagtgtgaaatcctccaatcggactctcgatgcaaagactacctggtaaagatttttgaagaactcaccctgcacaaacccacccaggtcatgccatgtagggcacccaaagtgggtagactcatatataccgccggaggctattttcgacagagtctgtcctatctggaggcctacaacccttctgatggaacctggctgcgcctggccgacctccaggttcctcggagcggccttgcagggtgtgtcgtaggaggactcctctatgccgtgggcggacgcaacaactctcctgatggaaacaccgacagctcggccctggactgttataaccctatgactaatcagtggtcaccatgcgctccaatgtccgtgcccaggaaccgcattggagtgggggtgatagacggccacatttacgccgtggggggaagccacggttgcattcatcataattctgtggaacgctacgagcctgaacgggatgaatggcatctggtagctcccatgctaactcggaggataggtgtgggggtggctgttttgaaccgcctgctatacgccgtaggtgggtttgatggcacaaatcgcctcaacagtgcagagtgctactatcctgagcggaacgagtggaggatgattacagctatgaatacaatacgcagcggtgccggtgtgtgcgtgttacacaattgtatttacgccgcagggggatatgacgggcaggaccaactcaacagtgttgagcggtacgacgtggagactgaaacttggacgttcgtggcaccgatgaagcacagacgtagtgccttgggaattacagtgcaccagggacggatatacgtgcttggcggatatgatgggcacacgttcctggactcagtagagtgttatgatcccgacaccgatacctggagcgaggttacacgcatgaccagcgggagatctggcgtcggcgtagccgtgacaatggagccctgtaggaagcagatcgatcagcagaactgcacctgttag

SEQ ID NO: 173697 - DNA, 1875 bp, Artificial Sequence
  derived and/or modified sequence
atgcagcccgaccccagacccagcggcgccggcgcctgctgcagattcctgcccctgcagagccagtgccccgagggcgccggcgacgccgtgatgtacgccagcaccgagtgcaaggccgaggtgacccccagccagcacggcaacagaaccttcagctacaccctggaggaccacaccaagcaggccttcggcatcatgaacgagctgagactgagccagcagctgtgcgacgtgaccctgcaggtgaagtaccaggacgcccccgccgcccagttcatggcccacaaggtggtgctggccagcagcagccccgtgttcaaggccatgttcaccaacggcctgagagagcagggcatggaggtggtgagcatcgagggcatccaccccaaggtgatggagagactgatcgagttcgcctacaccgccagcatcagcatgggcgagaagtgcgtgctgcacgtgatgaacggcgccgtgatgtaccagatcgacagcgtggtgagagcctgcagcgacttcctggtgcagcagctggaccccagcaacgccatcggcatcgccaacttcgccgagcagatcggctgcgtggagctgcaccagagagccagagagtacatctacatgcacttcggcgaggtggccaagcaggaggagttcttcaacctgagccactgccagctggtgaccctgatcagcagagacgacctgaacgtgagatgcgagagcgaggtgttccacgcctgcatcaactgggtgaagtacgactgcgagcagagaagattctacgtgcaggccctgctgagagccgtgagatgccacagcctgacccccaacttcctgcagatgcagctgcagaagtgcgagatcctgcagagcgacagcagatgcaaggactacctggtgaagatcttcgaggagctgaccctgcacaagcccacccaggtgatgccctgcagagcccccaaggtgggcagactgatctacaccgccggcggctacttcagacagagcctgagctacctggaggcctacaaccccagcgacggcacctggctgagactggccgacctgcaggtgcccagaagcggcctggccggctgcgtggtgggcggcctgctgtacgccgtgggcggcagaaacaacagccccgacggcaacaccgacagcagcgccctggactgctacaaccccatgaccaaccagtggagcccctgcgcccccatgagcgtgcccagaaacagaatcggcgtgggcgtgatcgacggccacatctacgccgtgggcggcagccacggctgcatccaccacaacagcgtggagagatacgagcccgagagagacgagtggcacctggtggcccccatgctgaccagaagaatcggcgtgggcgtggccgtgctgaacagactgctgtacgccgtgggcggcttcgacggcaccaacagactgaacagcgccgagtgctactaccccgagagaaacgagtggagaatgatcaccgccatgaacaccatcagaagcggcgccggcgtgtgcgtgctgcacaactgcatctacgccgccggcggctacgacggccaggaccagctgaacagcgtggagagatacgacgtggagaccgagacctggaccttcgtggcccccatgaagcacagaagaagcgccctgggcatcaccgtgcaccagggcagaatctacgtgctgggcggctacgacggccacaccttcctggacagcgtggagtgctacgaccccgacaccgacacctggagcgaggtgaccagaatgaccagcggcagaagcggcgtgggcgtggccgtgaccatggagccctgcagaaagcagatcgaccagcagaactgcacctgctag

SEQ ID NO: 173698 - protein, 124 aa, Artificial Sequence
  derived and/or modified sequence
YLLLEYCEGNDLDFYLKQHKLMSEKEARSIVMQIVNALRYLNEIKPPIIHYDLKPGNILLVDGTACGEIKITDFGLSKIMDDDSYGVDGMDLTSQGAGTYWYLPPECFVVGKEPPKISNKVDVW

SEQ ID NO: 173699 - protein, 413 aa, Artificial Sequence
  derived and/or modified sequence
MSVQSSSGSLEGPPSWSQLSTSPTPGSAAAARSLLNHTPPSGRPREGAMDELHSLDPRRQELLEARFTGVASGSTGSTGSCSVGAKASTNNESSNHSFGSLGSLSDKESETPEKKQSESSRGRKRKAENQNESSQGKSIGGRGHKISDYFEYQGGNGSSPVRGIPPAIRSPQNSHSHSTPSSSVRPNSPSPTALAFGDHPIVQPKQLSFKIIQTDLTMLKLAALESNKIQDLEKKEGRIDDLLRANCDLRRQIDEQQKLLEKYKERLNKCISMSKKLLIEKSTQEKLSSREKSMQDRLRLGHFTTVRHGASFTEQWTDGFAFQNLVKQQEWVNQQREDIERQRKLLAKRKPPTANNSQAPSTNSEPKQRKNKAVNGAENDPFVRPNLPQLLTLAEYHEQEEIFKLRLGHLKKR

SEQ ID NO: 173700 - protein, 766 aa, Artificial Sequence
  derived and/or modified sequence
MSVQSSSGSLEGPPSWSQLSTSPTPGSAAAARSLLNHTPPSGRPREGAMDELHSLDPRRQELLEARFTGVASGSTGSTGSCSVGAKASTNNESSNHSFGSLGSLSDKESETPEKKQSESSRGRKRKAENQNESSQGKSIGGRGHKISDYFEYQGGNGSSPVRGIPPAIRSPQNSHSHSTPSSSVRPNSPSPTALAFGDHPIVQPKQLSFKIIQTDLTMLKLAALESNKIQDLEKKEGRIDDLLRANCDLRRQIDEQQKLLEKYKERLNKCISMSKKLLIEKSTQEKLSSREKSMQDRLRLGHFTTVRHGASFTEQWTDGFAFQNLVKQQEWVNQQREDIERQRKLLAKRKPPTANNSQAPSTNSEPKQRKNKAVNGAENDPFVRPNLPQLLTLAEYHEQEEIFKLRLGHLKKEEAEIQAELERLERVRNLHIRELKRINNEDNSQFKDHPTLNERYLLLHLLGRGGFSEVYKAFDLYEQRYAAVKIHQLNKSWRDEKKENYHKHACREYRIHKELDHPRIVKLYDYFSLDTDTFCTVLEYCEGNDLDFYLKQHKLMSEKEARSIVMQIVNALRYLNEIKPPIIHYDLKPGNILLVDGTACGEIKITDFGLSKIMDDDSYGVDGMDLTSQGAGTYWYLPPECFVVGKEPPKISNKVDVWSVGVIFFQCLYGRKPFGHNQSQQDILQENTILKATEVQFPVKPVVSSEAKAFIRRCLAYRKEDRFDVHQLANDPYLLPHMRRSNSSGNLHMAGLTASPTPPSSSIITY

SEQ ID NO: 173701 - DNA, 1242 bp, Artificial Sequence
  derived and/or modified sequence
atgtccgtgcaatcatccagtgggtctctggagggcccgccttcgtggagtcagttgtcaacctccccaacgcctggatcagccgcagctgccaggtcactgctgaaccacactcccccaagcggacggcccagagaaggagctatggatgagttgcatagcctggaccccagacgtcaggaactcttggaggcgaggttcaccggcgtggcgagcggaagtactggctccaccgggtcctgtagcgtgggagccaaggcctcaaccaacaacgagagcagtaaccattcctttggcagtcttgggagcttgtctgacaaagaatcagaaaccccagaaaaaaagcagtccgaatccagccgtgggaggaaaaggaaagctgagaaccaaaatgagtcatctcaaggaaagtcaatcgggggacggggtcacaaaatctctgattactttgagtaccagggcggaaatggaagctcccctgtcaggggcattccccccgccatccgttctcctcaaaactcccactcacacagcacccctagtagttctgttcggcccaattcgccctctccaacggcactcgcttttggcgaccacccaattgtgcagccgaaacagttatctttcaaaataattcaaaccgacctgacaatgctgaagctcgctgcactggagagtaacaaaatacaggaccttgaaaagaaagagggtcggattgatgacctcttacgcgccaattgtgacctgagaaggcagatagacgaacagcagaagttgttggaaaaatataaagagcggctgaataagtgtatctccatgtcaaagaagctgctgatcgagaagagcacccaagagaagctatcgagtcgggaaaaatctatgcaggatcgtttgaggctcggccatttcacgacagtcagacacggagcctcattcaccgaacagtggaccgacggcttcgccttccaaaacctggtgaaacaacaggaatgggtgaaccagcagagagaggacattgagcgccagcgcaaactgcttgctaagcgcaagccgccgacagcgaacaatagccaggccccttctactaatagcgagcccaagcaaagaaagaataaagcagtgaacggggccgaaaatgacccgttcgtgcgtccaaacctgccccagctgctgacacttgcagagtaccacgaacaagaagaaattttcaagctgcggttggggcacctgaagaagaggtag

SEQ ID NO: 173702 - DNA, 2301 bp, Artificial Sequence
  derived and/or modified sequence
atgagtgtacagagctcttccgggagcttagagggtcccccttcatggtcacaactatccacatcccccacaccaggatcagcagctgcagcccggagtctgctgaaccacacaccgccatccggaaggcctcgggagggcgctatggacgagcttcattcccttgacccccggcggcaggagcttttggaagcccggttcactggggtcgcttcggggtctacagggagcacaggaagctgctcggtaggcgctaaggcctccacaaataacgaatctagcaaccactcttttgggtctcttgggagcctttccgacaaggaatccgagacacctgaaaagaaacagtcagagtcttcgaggggtaggaagcgcaaggccgagaaccaaaatgaatcctcccagggcaagagcatcgggggccgagggcacaaaattagtgattacttcgagtaccagggcggaaatgggtcgtctcctgtgcggggaattccccccgccattcgtagcccacaaaactcacacagtcatagtaccccttcttcctctgtgagacctaattcccctagtccgaccgccttagcctttggtgaccacccgatcgttcaaccgaaacaactgagctttaaaattattcaaaccgatctaacaatgctcaagcttgccgccttggagagcaataagattcaggatctggaaaaaaaggaaggccgcatcgacgacctgttgcgcgcaaactgcgaccttagacgccaaattgatgagcaacagaagctcctggaaaagtacaaggagagacttaacaagtgcatctctatgtcaaaaaagctccttattgagaagagcacacaggagaagttatcctcgcgggaaaagtctatgcaagatcgcctgcgcctggggcactttaccaccgtgcgccatggggctagcttcaccgagcaatggaccgatggattcgcatttcagaacctggttaaacagcaggaatgggtgaatcagcagcgggaggacatcgagcggcagcgaaaactattagctaagcggaaacctccaaccgcgaacaattctcaggcgcctagtaccaactcagaaccaaagcagcgcaaaaacaaggcggtaaatggcgccgagaatgacccatttgtgcggcctaatcttcctcaacttcttactctagccgagtatcatgaacaagaagagatctttaagctccggctcggacacctgaagaaggaggaggctgaaatccaggcagagttggagcgactcgagagggtaaggaacctccacattagagaattaaagcgcataaataacgaagataactcgcagtttaaagatcaccctacgctgaacgagcggtacctactgctgcatctcttaggcagaggcggtttttcggaagtgtacaaagccttcgatctctacgagcagcggtacgctgccgtaaaaattcaccagttgaataaatcctggcgcgacgaaaaaaaggagaattatcataaacatgcctgtagagaatacaggatccataaagagctggaccacccacgcatcgtgaagctgtacgactacttttctcttgataccgacacgttttgcacggtgctggagtattgtgaaggcaacgaccttgatttttatctgaaacagcataaactaatgagtgaaaaagaggccagaagcattgttatgcaaatcgtgaatgccctgcgctatctgaacgaaatcaagcctcctattattcattacgacttaaaacccggaaacattcttcttgtggatgggaccgcttgtggagagattaaaataacagacttcgggctgagcaaaatcatggacgatgacagctatggtgtggatggtatggacctgacatcccagggcgcgggaacctactggtacttgcctcctgagtgtttcgtagtgggaaaggaaccgccaaagataagcaacaaagtcgacgtttggtcagtgggggtgatctttttccagtgcttgtatggcagaaagccttttgggcataaccagtcccagcaggacatattgcaagaaaacaccattctcaaggctactgaggtgcagtttccggtgaagccagtggtgagctcagaggcaaaagcttttatcaggaggtgtctggcttataggaaggaggaccgatttgatgttcaccagctggcgaacgatccctatcttttaccacatatgagaaggagcaactcttccggaaacttacatatggctggcctcaccgcctcccctacccctcccagctctagcattataacttattag

SEQ ID NO: 173703 - DNA, 1242 bp, Artificial Sequence
  derived and/or modified sequence
atgtctgtgcagagcagcagcggcagcctggagggccccccatcctggagccagctgagcaccagccccaccccaggcagcgctgctgctgcccggagcctgctgaaccacaccccaccttctggccggccccgggagggcgccatggatgagctgcacagcctggacccccggcggcaggagctgctggaggcccgcttcaccggggtggccagcggcagcacaggcagcacaggcagctgcagcgtgggcgccaaggccagcaccaacaatgaaagcagcaaccacagctttggcagcctgggcagcctgagtgacaaggagagcgagaccccagagaagaagcagagcgagagcagccggggcaggaagaggaaggccgagaaccagaatgaaagcagccagggcaagagcattggaggccggggccacaagatcagtgactactttgagtaccagggcggcaatggcagcagccctgtgcggggcatccccccagccatccgcagcccccagaacagccacagccacagcacccccagcagctctgtgcggcccaacagccccagccccacagccctggccttcggggaccaccccatcgtgcagcccaagcagctgtccttcaagatcatccagacagacctgaccatgctgaagctggccgccctggagagcaacaagatccaggacctggagaagaaggagggcagaattgatgacctgctgcgggccaactgtgacctgcggcggcagattgatgagcagcagaagctgctggagaagtacaaggagcggctgaacaagtgcatctccatgagcaagaagctgctgattgagaagagcacccaggagaagctgagcagccgggagaagtccatgcaggaccggctgcggctgggccacttcaccaccgtgcgccacggggccagcttcacagagcagtggacagatggctttgccttccagaacctggtgaagcagcaggagtgggtgaaccagcagagagaagatattgagcggcagaggaagctgctggccaagaggaagcccccaacagccaacaacagccaggcccccagcaccaacagcgagcccaagcagaggaagaacaaggctgtgaatggagcagaaaatgacccctttgtgcggcccaacctgccccagctgctgaccctggccgagtaccacgagcaggaggagatcttcaagctgcggctgggccacctgaagaagaggtag

SEQ ID NO: 173704 - DNA, 2301 bp, Artificial Sequence
  derived and/or modified sequence
atgtctgtgcagagcagcagcggcagcctggagggccccccatcctggagccagctgagcaccagccccaccccaggcagcgctgctgctgcccggagcctgctgaaccacaccccaccttctggccggccccgggagggcgccatggatgagctgcacagcctggacccccggcggcaggagctgctggaggcccgcttcaccggggtggccagcggcagcacaggcagcacaggcagctgcagcgtgggcgccaaggccagcaccaacaatgaaagcagcaaccacagctttggcagcctgggcagcctgagtgacaaggagagcgagaccccagagaagaagcagagcgagagcagccggggcaggaagaggaaggccgagaaccagaatgaaagcagccagggcaagagcattggaggccggggccacaagatcagtgactactttgagtaccagggcggcaatggcagcagccctgtgcggggcatccccccagccatccgcagcccccagaacagccacagccacagcacccccagcagctctgtgcggcccaacagccccagccccacagccctggccttcggggaccaccccatcgtgcagcccaagcagctgtccttcaagatcatccagacagacctgaccatgctgaagctggccgccctggagagcaacaagatccaggacctggagaagaaggagggcagaattgatgacctgctgcgggccaactgtgacctgcggcggcagattgatgagcagcagaagctgctggagaagtacaaggagcggctgaacaagtgcatctccatgagcaagaagctgctgattgagaagagcacccaggagaagctgagcagccgggagaagtccatgcaggaccggctgcggctgggccacttcaccaccgtgcgccacggggccagcttcacagagcagtggacagatggctttgccttccagaacctggtgaagcagcaggagtgggtgaaccagcagagagaagatattgagcggcagaggaagctgctggccaagaggaagcccccaacagccaacaacagccaggcccccagcaccaacagcgagcccaagcagaggaagaacaaggctgtgaatggagcagaaaatgacccctttgtgcggcccaacctgccccagctgctgaccctggccgagtaccacgagcaggaggagatcttcaagctgcggctgggccacctgaagaaggaggaggccgagatccaggccgagctggagcggctggagcgggtgaggaacctgcacatccgggagctgaagaggatcaacaatgaagacaacagccagttcaaggaccaccccaccctgaatgaaagatacctgctgctgcacctgctgggccggggcggcttcagcgaggtgtacaaggcctttgacctgtatgagcagagatatgctgctgtgaagatccaccagctgaacaagtcctggagagatgagaagaaggagaactaccacaagcacgcctgccgggagtaccgcatccacaaggagctggaccacccccgcatcgtgaagctgtatgactacttcagcctggacacagacaccttctgcaccgtgctggagtactgtgagggcaatgacctggacttctacctgaagcagcacaagctgatgtctgagaaggaggcccggagcatcgtgatgcagatcgtgaatgccctgcgctacctgaatgagatcaagccacccatcatccactatgacctgaagccaggcaacatcctgctggtggatggaacagcctgtggggagatcaagatcacagactttggcctgagcaagatcatggatgatgacagctatggagtggatggcatggacctgaccagccagggcgccggcacctactggtacctgcccccagagtgctttgtggtgggcaaggagccccccaagatcagcaacaaggtggatgtgtggagcgtgggcgtcatcttcttccagtgcctgtatggcaggaagcccttcggccacaaccagagccagcaggacatcctgcaggagaacaccatcctgaaggccacagaggtgcagtttcctgtgaagcctgtggtgtcctctgaggccaaggccttcatccgccgctgcctggcctacaggaaggaggacagatttgatgtgcaccagctggccaatgacccctacctgctgccccacatgagaagaagcaacagcagcggcaacctgcacatggccggcctgacagccagccccaccccacccagcagcagcatcatcacctactag

SEQ ID NO: 173705 - DNA, 1242 bp, Artificial Sequence
  derived and/or modified sequence
atgagcgtgcagagcagcagcggcagcctggagggcccccccagctggtcacagttgagtacctcccccacccccggatccgccgctgcagccagaagtctgctgaatcatactccaccttcaggcaggccgagagaaggggcaatggacgagctccattctcttgatcctagacgccaggaactccttgaagctcgattcacaggtgtcgcaagcggaagcactgggagtacaggatcttgctctgtcggtgctaaagcttccactaataacgagtcctcaaaccatagtttcggatcactgggctccctgagcgataaggagtccgagactcccgagaagaaacagtccgagagttcccgaggtcgcaagagaaaagctgagaaccaaaatgaatcctctcaagggaaaagtatcggaggccgcggacataaaatctccgactattttgaatatcagggcgggaacgggagcagccctgtgagggggattccccccgctattagatcaccacagaactcccattcacactccacgccctcttccagcgtgaggcctaactcaccttcccccactgcactggccttcggtgaccaccccatcgtgcagcctaagcaattgagtttcaaaatcatacaaaccgacctaacgatgctgaaactggctgcactggagtcaaacaaaattcaagacctcgagaagaaagagggccggatagacgacctactgcgcgctaattgcgatctcaggagacagatcgatgaacagcaaaaactgctggaaaaatacaaagaaagactcaataaatgtatctccatgagtaagaagctgttaatagagaagtccacacaggaaaaactgagttctcgggaaaagtcaatgcaagaccgcctgcgactcggacacttcacaactgtgcggcatggtgccagcttcaccgaacagtggacagatggcttcgcctttcagaacttagtgaagcaacaagagtgggtgaatcagcagcgcgaggacatcgagaggcagcgcaagctgctcgctaaacgcaagccacctacggcaaataactctcaggctccaagtacaaactctgagcccaagcaacgaaagaacaaggctgtgaatggcgcagagaatgatcctttcgtgcggccgaatttaccccagctcttgaccctcgccgagtatcacgagcaggaggagattttcaagctccgcctggggcacctcaaaaaaagatag

SEQ ID NO: 173706 - DNA, 2301 bp, Artificial Sequence
  derived and/or modified sequence
atgagcgtgcagagcagcagcggcagcctggagggcccccccagctggtctcagctctccacatctccaacacctggaagcgcggcggcagcacgaagcctattgaaccacacccctccttcaggtaggccccgggagggggccatggacgaactgcattcactggatccaaggagacaggagctccttgaggctcgcttcactggcgtagcctccgggtcaacgggttccacaggctcatgcagcgtgggcgcgaaagctagcacaaacaacgagagttcaaaccactctttcggtagcctgggatccttgtccgacaaagagtcggaaactcctgaaaaaaagcagagtgaaagctctagaggtcgtaaacgcaaggccgagaatcagaatgaatcttcccagggcaaaagcattggcggacgcggacacaaaataagcgattactttgagtaccagggagggaacggtagcagccccgtcagggggatcccacctgcgatcaggagccctcagaattctcattcccacagtacgccgtcctcctccgtgaggcccaattcaccctctcccaccgccttggccttcggggaccacccaatcgtgcaacccaaacagctcagttttaagatcatccagacagacctgaccatgttgaaactggccgcccttgaatctaacaaaattcaggacctggagaaaaaagagggtcgcatagacgatttgctaagggctaactgcgaccttcgacgccaaattgatgagcagcagaaactcctagaaaaatataaagagcgtcttaataagtgtatttctatgtccaagaagctgctcattgaaaaaagcacccaggagaagctatcatcgagagaaaagtccatgcaggaccggttgcgactcggacacttcaccactgtgagacatggagccagtttcaccgaacaatggacagacggatttgcattccagaacctcgtgaagcagcaggagtgggttaaccagcaacgggaagatattgagcgacaaagaaaacttctcgccaaaagaaagcctccaacagcaaacaattcacaagcaccaagtactaacagcgaacccaaacagagaaaaaataaggctgtgaatggcgccgagaatgacccctttgtcagacccaatctgccccagctgctgactctggctgagtatcacgagcaggaggaaattttcaagttgcggctaggacatttgaagaaggaagaggctgaaattcaggccgaacttgagaggctggaaagggtgaggaacctacacattcgcgaactcaaaagaattaacaacgaagacaattcccagttcaaagatcaccctactttgaatgagaggtacctgctccttcacctactcggccgtggagggttctccgaggtgtataaggcattcgacctttatgagcagcggtacgccgcagtcaaaatccaccagctcaacaaaagctggagggacgagaagaaggagaattatcataagcatgcatgcagggaatacaggatccacaaggaattggatcacccaagaattgtcaaactgtatgattattttagtctggatacagacacattttgtaccgtgctggagtactgcgagggcaacgaccttgacttttacttaaaacagcacaaactgatgtctgaaaaagaagcccgatctattgtgatgcagatcgttaatgcgctcagatacttgaacgaaataaagccccctatcatccactacgacttgaagccaggcaatatactccttgtcgatggcactgcatgcggcgagattaagattactgacttcggcctgtcgaagataatggacgatgactcttacggcgtggacggcatggacctcaccagccagggcgcaggaacatattggtatctcccccccgaatgttttgtggtggggaaggaaccccccaaaatcagtaacaaggtggacgtttggtcggtcggagtcatctttttccagtgtctctatgggcgaaagccttttggtcacaaccagagccagcaggacatcctccaagaaaacacgattcttaaggccacggaggttcaattccccgtaaaacccgtggtctcctcagaggccaaggcctttattaggcgctgtctggcttacagaaaagaagaccgatttgatgtgcatcagctcgccaacgacccctatttgctgcctcatatgcggcgttctaactcctcaggtaatttacacatggctggcctgaccgcgtcgcctacccctccaagtagcagcattattacatactag

SEQ ID NO: 173707 - DNA, 2783 bp, Artificial Sequence
  derived and/or modified sequence
aactgatgcagaggttaccccaccgcctcagccgccacccacagcccgccgccgccgcctcccgggcgacgccgggggccgacgcactgcagaggtgccggcaggttccgcccgcggaagtgtcctcggccggcgcagcccgcgctccgcccgcgctccgaccccggcccggctggcaccccctcgacgcctccgccgccgcgctcctttcctcctcctctcctctggcgcgcccgctcgctccctcgcttctccccctttccctcctccctgtcccctctccttccctcacctctttcctccccacctcccctcttctcggtttcctcccccatccccttgactctcccctcccagccctcgctctctcgctcgccctcagcgcggcccccgccatgacggaggcgggtgccggtgccgttgccgccgctgccgtcgcagggggggagtcgggttcccagaaagtagcttgatgagtgtccaaagtagcagtggaagtttggaggggccgccatcttggtcccagctctccacgtctccaaccccgggctcggcggcggcggccaggtccctgctgaatcacacgccgccatccgggaggcccagggaaggtgcaatggatgagcttcatagtctggatccaagaaggcaagagttattggaagctagatttactggagttgcaagtgggagcactggaagtacgggcagttgcagtgttggagctaaagcctcaacaaataacgaaagctctaatcacagttttggaagcttgggatctttaagtgacaaagaatcagagacaccggagaagaaacaatcggaatcatccaggggaagaaagagaaaagcagaaaaccagaatgaaagtagtcagggaaaaagtattgggggacgtggccacaaaattagcgactattttgaataccagggtggaaatggctcaagtccagtaagaggcatacctcctgcaatccgttctcctcaaaattcacattcacattccactccttcctcatctgttcgaccgaatagcccttctcctactgcattagcatttggggaccaccctattgtacaaccaaagcaattatcctttaaaattattcagactgatctcacaatgctgaaattagcagcattagaaagtaataaaatccaggacctggaaaagaaggagggacgtatagatgatttgctcagggctaactgtgatctcagacggcaaatagatgaacaacaaaaattacttgaaaaatacaaagaacgattaaataagtgcatatcaatgagcaagaaacttcttattgaaaagagtacacaagaaaagctgtcaagcagagagaagagtatgcaagatcgattacgcctcgggcactttacaacagttagacatggcgcttcatttactgaacaatggacagatggttttgcatttcagaatcttgtgaagcaacaagaatgggtgaatcagcaaagggaagatattgaaaggcaaaggaaacttctagccaaacgcaaacctcccacagctaataattctcaggcaccctctaccaattctgaaccaaaacaaaggaaaaacaaagcagtcaatggagcagagaatgatccctttgttagaccaaatttaccacaactgttgactttggcagaatatcatgaacaggaagaaattttcaaacttagactaggacatctcaaaaagagataacagtatagcaacaactctgccactgaaatcctgttctctgaccgatattggcacctgcaaagagaaacaaccagtaacaggcagcagcagcatcagtattaatcttccatgatgaaatctttacaggtcaagaacaagtacacagctcttttctcactccttcacagtggaccatgcaactagttgaaatggaagacaatggattgtctacaagccttttgaacagtggagaatgcagggcgttggctttaggaagaggcagaaatccaggcagaacttgaacgtttggaaagagtcagaaatcttcacatacgtgagctgaaaagaataaacaatgaagataattcacagttcaaagatcacccaacattaaatgaaagatatttattacttcatctgcttggtagaggtggctttagtgaagtgtataaggcttttgacctttatgaacaaagatatgctgctgtgaagatacatcagcttaataaaagctggagagatgagaagaaagaaaactaccacaaacatgcctgcagagagtatagaatacacaaagaactggatcaccccagaatagttaaactctatgattatttctccttggatacagatacgttttgtacagtgttagaatactgtgaaggcaatgacttggatttctatctgaagcaacacaagttaatgtcagagaaagaagctcggtctattgtaatgcagattgtaaatgcactaagatatctcaatgagatcaaaccccctattatacattatgatcttaagccaggaaacatcctactggtagatggaacagcatgtggtgaaatcaaaatcactgattttggtctgtccaagattatggatgatgatagctatggtgtagatggaatggatctaacttcccagggggcaggcacttactggtatttacctcctgagtgttttgtagttggaaaagagccaccaaagatttccaacaaggttgatgtatggtcggttggagtcatcttctttcagtgtctttatggtagaaagccatttggtcacaatcaatctcaacaagacattcttc

SEQ ID NO: 173708 - DNA, 5663 bp, Artificial Sequence
  derived and/or modified sequence
gacgccgggggccgacgcactgcagaggtgccggcaggttccgcccgcggaagtgtcctcggccggcgcagcccgcgctccgcccgcgctccgaccccggcccggctggcaccccctcgacgcctccgccgccgcgctcctttcctcctcctctcctctggcgcgcccgctcgctccctcgcttctccccctttccctcctccctgtcccctctccttccctcacctctttcctccccacctcccctcttctcggtttcctcccccatccccttgactctcccctcccagccctcgctctctcgctcgccctcagcgcggcccccgccatgacggaggcgggtgccggtgccgttgccgccgctgccgtcgcagggggggagtcgggttcccagaaagtagcttgatgagtgtccaaagtagcagtggaagtttggaggggccgccatcttggtcccagctctccacgtctccaaccccgggctcggcggcggcggccaggtccctgctgaatcacacgccgccatccgggaggcccagggaaggtgcaatggatgagcttcatagtctggatccaagaaggcaagagttattggaagctagatttactggagttgcaagtgggagcactggaagtacgggcagttgcagtgttggagctaaagcctcaacaaataacgaaagctctaatcacagttttggaagcttgggatctttaagtgacaaagaatcagagacaccggagaagaaacaatcggaatcatccaggggaagaaagagaaaagcagaaaaccagaatgaaagtagtcagggaaaaagtattgggggacgtggccacaaaattagcgactattttgaataccagggtggaaatggctcaagtccagtaagaggcatacctcctgcaatccgttctcctcaaaattcacattcacattccactccttcctcatctgttcgaccgaatagcccttctcctactgcattagcatttggggaccaccctattgtacaaccaaagcaattatcctttaaaattattcagactgatctcacaatgctgaaattagcagcattagaaagtaataaaatccaggacctggaaaagaaggagggacgtatagatgatttgctcagggctaactgtgatctcagacggcaaatagatgaacaacaaaaattacttgaaaaatacaaagaacgattaaataagtgcatatcaatgagcaagaaacttcttattgaaaagagtacacaagaaaagctgtcaagcagagagaagagtatgcaagatcgattacgcctcgggcactttacaacagttagacatggcgcttcatttactgaacaatggacagatggttttgcatttcagaatcttgtgaagcaacaagaatgggtgaatcagcaaagggaagatattgaaaggcaaaggaaacttctagccaaacgcaaacctcccacagctaataattctcaggcaccctctaccaattctgaaccaaaacaaaggaaaaacaaagcagtcaatggagcagagaatgatccctttgttagaccaaatttaccacaactgttgactttggcagaatatcatgaacaggaagaaattttcaaacttagactaggacatctcaaaaaggaagaggcagaaatccaggcagaacttgaacgtttggaaagagtcagaaatcttcacatacgtgagctgaaaagaataaacaatgaagataattcacagttcaaagatcacccaacattaaatgaaagatatttattacttcatctgcttggtagaggtggctttagtgaagtgtataaggcttttgacctttatgaacaaagatatgctgctgtgaagatacatcagcttaataaaagctggagagatgagaagaaagaaaactaccacaaacatgcctgcagagagtatagaatacacaaagaactggatcaccccagaatagttaaactctatgattatttctccttggatacagatacgttttgtacagtgttagaatactgtgaaggcaatgacttggatttctatctgaagcaacacaagttaatgtcagagaaagaagctcggtctattgtaatgcagattgtaaatgcactaagatatctcaatgagatcaaaccccctattatacattatgatcttaagccaggaaacatcctactggtagatggaacagcatgtggtgaaatcaaaatcactgattttggtctgtccaagattatggatgatgatagctatggtgtagatggaatggatctaacttcccagggggcaggcacttactggtatttacctcctgagtgttttgtagttggaaaagagccaccaaagatttccaacaaggttgatgtatggtcggttggagtcatcttctttcagtgtctttatggtagaaagccatttggtcacaatcaatctcaacaagacattcttcaagaaaatacaatattaaaagccacagaagtccagttccctgtaaaaccggttgtaagcagtgaagccaaggcatttataagacgctgtttggcatatcgaaaagaagatcgatttgatgtgcaccagctggcaaatgacccataccttctcccacacatgagaagatcaaattcttcaggaaacctacacatggctgggctgacagcatcccctacacccccttcttcaagcataattacttactgactttcctccaagattggcatgatatctttgaatttgcttccagatgcacacttaagtttgagagcatttgagtgtttgttttctttttcttttttttttttttttttttttacacaagacgtggttaagaactgtttgtgaactgaagttcctcatagtgtcatttgtatgagagaggatcatggacaatgaataaatgcacacttctgactataattttgagcagtgaaggaaggatgactgcctgttacacagaaacaggaataccatgttaagatagaggaaaaaaattttgtttatttgggggaacactgtaaataacgtttataatacttaaatacatttggttgttactagagagttctaatatgaagggtagtttttcattatttaaaaacacatggaaaaatatgagacatatttctaacatacgaactatagtgcctggatacattcttcagcatttggcagttaatctgctgaaaccaaagtaagaactgaatgacagtgacagttgtgttttatagtaatagaatgtgagagttagaatctttggacaaagttaggctttgtcatttgcctattcagacttttaccaagttgtacctcgagatcacatgtccgttttctttcactggttatattaaagggagagctattatttctaaatactttacacctttgacaaaatgagctgcttgtgttgaaatcagttgaattcactaaattataatattgccagtgttttcaacacgttagaattgataacaggtatttttcttttgttaccaggccttgttcatcaaaacaggtgacagtgagtaaccaaatgcagaccagttctatgcaggataatgataaattcccttctagctctattgtaaattgttgtacagatgtcatatttcaattactaagtttcagcagcttattcttgtacaaatgtttaaaatatggcttttctaattggatattgtattttttttaagtcttcttgaaggcactctaattgctgctaaatgatgttgcttctttgctaaaaaattaaatgacctagaaggtgcaagttgactgtacatcatagatattaaaaagcagacagtcattaacaatcaagatgtaaaagtgatccatgttggacataattgagtttttaaatcagtttattgggttctagggctgtagaacacatagatactagatttttaatttgttcatggttattctacatttctagaaagttcttatcagcaagatggtcccataagcaaatttcttgtggtttgtacagatttgttaaaatgtgaacgttttctaactgcctcgtagggtagaaaccaatatttttcaggatgctgtatttcactcctgtaaggactttttctttattgtcacattcataatgctgatacttacatgtaagttgttcatgttgcagaaaaaggttatacgtaccacggattctctttaatattgtacagttaaactgtatttctgatgttgcaagccattttgttttttcattgtacatagacacattgtctctttaaaatgctgctgaaattgtagagagtatagccaaaacagtaataaacaatgacagttaaaatgtaaagactatgaaaattacattggaagggagctttcaagatggtaggatattgactaactgagctccttcacttaaaaatcagctgaataaattccttaagtatacttcaagacaagtgtaaattgtttcaagctgttaaagttaaacctaataaccattatcaaggcaactcctgggtaagtaacacttagaaccatcaagagtggtttaaggggctggctatacccattcctctgtagagcacagagaaatcctattaaaaaaaaaatactacatggtaatgaaatcttagcattgattgagtgctttacgtgctgcctgcaagttttcagttttgttgttagagttttcgtctttatgaatgataaagtcctatgttcataaagtaacatttaaattcctgaactaaaaggaaatgcctgttgtgcttaaaattttggggagatacgaagtgaatgtgtaaatctaactttgaggttcagtaagttaagtagtatagacctagagatcactgctttaccattttactttcaaatgaatgagagcgactgctagtggcagaacgcagaaaaggggaaaaacaagccatgaaatgaagttgctttcctgacctgggtttaggtcatcattttaaaatcaaagatgtgtaggagatgaatcaacttatagacccatattttccttctaaaagtttcccaaagaaatgttatagattttgaataacatgccagtgacccagcaggtccaagatggctaaccaagatggctaatttagccacattgaataacttacttttaccctcacatggaaagttggtatctattgctaaatgatttcaaggtcactctgacagtctttgacactgttttttttagggttttattgttttctggtctcctggtgtctgtcctcagaattaaagcatgtcctgcatccctaagatgatagccaaggcctctcttttattaagagtcagcactgatgtagggtaaaatcaacagtttttgcatatgattttaaaatctttctttgatttgaatttgctttagtgtgtgcatgttgagaggaagtaagtgtagaaaccaccctaatttgtaagttgggagttggagatacttggtggtttttcaaaaataaagactcaatcttttttttttttttaaacactcactaccatctccttctaaaacaactctgtcagtttaaatggcatataaaatgtgaacaaacacctcattacatgaagtcaaaatggtgaagagcttcagtgaaacatttaaagagtatattgtgtgttgttttgctgttcatcattacttattaaatgcagtaatgttgattgcc

SEQ ID NO: 173709 - DNA, 5730 bp, Artificial Sequence
  derived and/or modified sequence
aactgatgcagaggttaccccaccgcctcagccgccacccacagcccgccgccgccgcctcccgggcgacgccgggggccgacgcactgcagaggtgccggcaggttccgcccgcggaagtgtcctcggccggcgcagcccgcgctccgcccgcgctccgaccccggcccggctggcaccccctcgacgcctccgccgccgcgctcctttcctcctcctctcctctggcgcgcccgctcgctccctcgcttctccccctttccctcctccctgtcccctctccttccctcacctctttcctccccacctcccctcttctcggtttcctcccccatccccttgactctcccctcccagccctcgctctctcgctcgccctcagcgcggcccccgccatgacggaggcgggtgccggtgccgttgccgccgctgccgtcgcagggggggagtcgggttcccagaaagtagcttgatgagtgtccaaagtagcagtggaagtttggaggggccgccatcttggtcccagctctccacgtctccaaccccgggctcggcggcggcggccaggtccctgctgaatcacacgccgccatccgggaggcccagggaaggtgcaatggatgagcttcatagtctggatccaagaaggcaagagttattggaagctagatttactggagttgcaagtgggagcactggaagtacgggcagttgcagtgttggagctaaagcctcaacaaataacgaaagctctaatcacagttttggaagcttgggatctttaagtgacaaagaatcagagacaccggagaagaaacaatcggaatcatccaggggaagaaagagaaaagcagaaaaccagaatgaaagtagtcagggaaaaagtattgggggacgtggccacaaaattagcgactattttgaataccagggtggaaatggctcaagtccagtaagaggcatacctcctgcaatccgttctcctcaaaattcacattcacattccactccttcctcatctgttcgaccgaatagcccttctcctactgcattagcatttggggaccaccctattgtacaaccaaagcaattatcctttaaaattattcagactgatctcacaatgctgaaattagcagcattagaaagtaataaaatccaggacctggaaaagaaggagggacgtatagatgatttgctcagggctaactgtgatctcagacggcaaatagatgaacaacaaaaattacttgaaaaatacaaagaacgattaaataagtgcatatcaatgagcaagaaacttcttattgaaaagagtacacaagaaaagctgtcaagcagagagaagagtatgcaagatcgattacgcctcgggcactttacaacagttagacatggcgcttcatttactgaacaatggacagatggttttgcatttcagaatcttgtgaagcaacaagaatgggtgaatcagcaaagggaagatattgaaaggcaaaggaaacttctagccaaacgcaaacctcccacagctaataattctcaggcaccctctaccaattctgaaccaaaacaaaggaaaaacaaagcagtcaatggagcagagaatgatccctttgttagaccaaatttaccacaactgttgactttggcagaatatcatgaacaggaagaaattttcaaacttagactaggacatctcaaaaaggaagaggcagaaatccaggcagaacttgaacgtttggaaagagtcagaaatcttcacatacgtgagctgaaaagaataaacaatgaagataattcacagttcaaagatcacccaacattaaatgaaagatatttattacttcatctgcttggtagaggtggctttagtgaagtgtataaggcttttgacctttatgaacaaagatatgctgctgtgaagatacatcagcttaataaaagctggagagatgagaagaaagaaaactaccacaaacatgcctgcagagagtatagaatacacaaagaactggatcaccccagaatagttaaactctatgattatttctccttggatacagatacgttttgtacagtgttagaatactgtgaaggcaatgacttggatttctatctgaagcaacacaagttaatgtcagagaaagaagctcggtctattgtaatgcagattgtaaatgcactaagatatctcaatgagatcaaaccccctattatacattatgatcttaagccaggaaacatcctactggtagatggaacagcatgtggtgaaatcaaaatcactgattttggtctgtccaagattatggatgatgatagctatggtgtagatggaatggatctaacttcccagggggcaggcacttactggtatttacctcctgagtgttttgtagttggaaaagagccaccaaagatttccaacaaggttgatgtatggtcggttggagtcatcttctttcagtgtctttatggtagaaagccatttggtcacaatcaatctcaacaagacattcttcaagaaaatacaatattaaaagccacagaagtccagttccctgtaaaaccggttgtaagcagtgaagccaaggcatttataagacgctgtttggcatatcgaaaagaagatcgatttgatgtgcaccagctggcaaatgacccataccttctcccacacatgagaagatcaaattcttcaggaaacctacacatggctgggctgacagcatcccctacacccccttcttcaagcataattacttactgactttcctccaagattggcatgatatctttgaatttgcttccagatgcacacttaagtttgagagcatttgagtgtttgttttctttttcttttttttttttttttttttttacacaagacgtggttaagaactgtttgtgaactgaagttcctcatagtgtcatttgtatgagagaggatcatggacaatgaataaatgcacacttctgactataattttgagcagtgaaggaaggatgactgcctgttacacagaaacaggaataccatgttaagatagaggaaaaaaattttgtttatttgggggaacactgtaaataacgtttataatacttaaatacatttggttgttactagagagttctaatatgaagggtagtttttcattatttaaaaacacatggaaaaatatgagacatatttctaacatacgaactatagtgcctggatacattcttcagcatttggcagttaatctgctgaaaccaaagtaagaactgaatgacagtgacagttgtgttttatagtaatagaatgtgagagttagaatctttggacaaagttaggctttgtcatttgcctattcagacttttaccaagttgtacctcgagatcacatgtccgttttctttcactggttatattaaagggagagctattatttctaaatactttacacctttgacaaaatgagctgcttgtgttgaaatcagttgaattcactaaattataatattgccagtgttttcaacacgttagaattgataacaggtatttttcttttgttaccaggccttgttcatcaaaacaggtgacagtgagtaaccaaatgcagaccagttctatgcaggataatgataaattcccttctagctctattgtaaattgttgtacagatgtcatatttcaattactaagtttcagcagcttattcttgtacaaatgtttaaaatatggcttttctaattggatattgtattttttttaagtcttcttgaaggcactctaattgctgctaaatgatgttgcttctttgctaaaaaattaaatgacctagaaggtgcaagttgactgtacatcatagatattaaaaagcagacagtcattaacaatcaagatgtaaaagtgatccatgttggacataattgagtttttaaatcagtttattgggttctagggctgtagaacacatagatactagatttttaatttgttcatggttattctacatttctagaaagttcttatcagcaagatggtcccataagcaaatttcttgtggtttgtacagatttgttaaaatgtgaacgttttctaactgcctcgtagggtagaaaccaatatttttcaggatgctgtatttcactcctgtaaggactttttctttattgtcacattcataatgctgatacttacatgtaagttgttcatgttgcagaaaaaggttatacgtaccacggattctctttaatattgtacagttaaactgtatttctgatgttgcaagccattttgttttttcattgtacatagacacattgtctctttaaaatgctgctgaaattgtagagagtatagccaaaacagtaataaacaatgacagttaaaatgtaaagactatgaaaattacattggaagggagctttcaagatggtaggatattgactaactgagctccttcacttaaaaatcagctgaataaattccttaagtatacttcaagacaagtgtaaattgtttcaagctgttaaagttaaacctaataaccattatcaaggcaactcctgggtaagtaacacttagaaccatcaagagtggtttaaggggctggctatacccattcctctgtagagcacagagaaatcctattaaaaaaaaaatactacatggtaatgaaatcttagcattgattgagtgctttacgtgctgcctgcaagttttcagttttgttgttagagttttcgtctttatgaatgataaagtcctatgttcataaagtaacatttaaattcctgaactaaaaggaaatgcctgttgtgcttaaaattttggggagatacgaagtgaatgtgtaaatctaactttgaggttcagtaagttaagtagtatagacctagagatcactgctttaccattttactttcaaatgaatgagagcgactgctagtggcagaacgcagaaaaggggaaaaacaagccatgaaatgaagttgctttcctgacctgggtttaggtcatcattttaaaatcaaagatgtgtaggagatgaatcaacttatagacccatattttccttctaaaagtttcccaaagaaatgttatagattttgaataacatgccagtgacccagcaggtccaagatggctaaccaagatggctaatttagccacattgaataacttacttttaccctcacatggaaagttggtatctattgctaaatgatttcaaggtcactctgacagtctttgacactgttttttttagggttttattgttttctggtctcctggtgtctgtcctcagaattaaagcatgtcctgcatccctaagatgatagccaaggcctctcttttattaagagtcagcactgatgtagggtaaaatcaacagtttttgcatatgattttaaaatctttctttgatttgaatttgctttagtgtgtgcatgttgagaggaagtaagtgtagaaaccaccctaatttgtaagttgggagttggagatacttggtggtttttcaaaaataaagactcaatcttttttttttttttaaacactcactaccatctccttctaaaacaactctgtcagtttaaatggcatataaaatgtgaacaaacacctcattacatgaagtcaaaatggtgaagagcttcagtgaaacatttaaagagtatattgtgtgttgttttgctgttcatcattacttattaaatgcagtaatgttgattgcc

SEQ ID NO: 173710 - DNA, 2605 bp, Artificial Sequence
  derived and/or modified sequence
aagagaagagagggagaaggcacactgaggaatgccaaggactgccagcagcaccagaagctaggagagaggcacagaacagactcctagcttctcctaggctccctctgagcctccaggaagaaccaatcccggtgacatcttgattttggacttctggcatcagaactgtgcaatggatgagcttcatagtctggatccaagaaggcaagagttattggaagctagatttactggagttgcaagtgggagcactggaagtacgggcagttgcagtgttggagctaaagcctcaacaaataacgaaagctctaatcacagttttggaagcttgggatctttaagtgacaaagaatcagagacaccggagaagaaacaatcggaatcatccaggggaagaaagagaaaagcagaaaaccagaatgaaagtagtcagggaaaaagtattgggggacgtggccacaaaattagcgactattttgaataccagggtggaaatggctcaagtccagtaagaggcatacctcctgcaatccgttctcctcaaaattcacattcacattccactccttcctcatctgttcgaccgaatagcccttctcctactgcattagcatttggggaccaccctattgtacaaccaaagcaattatcctttaaaattattcagactgatctcacaatgctgaaattagcagcattagaaagtaataaaatccaggacctggaaaagaaggagggacgtatagatgatttgctcagggctaactgtgatctcagacggcaaatagatgaacaacaaaaattacttgaaaaatacaaagaacgattaaataagtgcatatcaatgagcaagaaacttcttattgaaaagagtacacaagaaaagctgtcaagcagagagaagagtatgcaagatcgattacgcctcgggcactttacaacagttagacatggcgcttcatttactgaacaatggacagatggttttgcatttcagaatcttgtgaagcaacaagaatgggtgaatcagcaaagggaagatattgaaaggcaaaggaaacttctagccaaacgcaaacctcccacagctaataattctcaggcaccctctaccaattctgaaccaaaacaaaggaaaaacaaagcagtcaatggagcagagaatgatccctttgttagaccaaatttaccacaactgttgactttggcagaatatcatgaacaggaagaaattttcaaacttagactaggacatctcaaaaaggaagaggcagaaatccaggcagaacttgaacgtttggaaagagtcagaaatcttcacatacgtgagctgaaaagaataaacaatgaagataattcacagttcaaagatcacccaacattaaatgaaagatatttattacttcatctgcttggtagaggtggctttagtgaagtgtataaggcttttgacctttatgaacaaagatatgctgctgtgaagatacatcagcttaataaaagctggagagatgagaagaaagaaaactaccacaaacatgcctgcagagagtatagaatacacaaagaactggatcaccccagaatagttaaactctatgattatttctccttggatacagatacgttttgtacagtgttagaatactgtgaaggcaatgacttggatttctatctgaagcaacacaagttaatgtcagagaaagaagctcggtctattgtaatgcagattgtaaatgcactaagatatctcaatgagatcaaaccccctattatacattatgatcttaagccaggaaacatcctactggtagatggaacagcatgtggtgaaatcaaaatcactgattttggtctgtccaagattatggatgatgatagctatggtgtagatggaatggatctaacttcccagggggcaggcacttactggtatttacctcctgagtgttttgtagttggaaaagagccaccaaagatttccaacaaggttgatgtatggtcggttggagtcatcttctttcagtgtctttatggtagaaagccatttggtcacaatcaatctcaacaagacattcttcaagaaaatacaatattaaaagccacagaagtccagttccctgtaaaaccggttgtaagcagtgaagccaaggcatttataagacgctgtttggcatatcgaaaagaagatcgatttgatgtgcaccagctggcaaatgacccataccttctcccacacatgagaagatcaaattcttcaggaaacctacacatggctgggctgacagcatcccctacacccccttcttcaagcataattacttactgactttcctccaagattggcatgatatctttgaatttgcttccagatgcacacttaagtttgagagcatttgagtgtttgttttctttttcttttttttttttttttttttttacacaagacgtggttaagaactgtttgtgaactgaagttcctcatagtgtcatttgtatgagagaggatcatggacaatgaataaatgcacacttctgactataattttgagcagtgaaggaaggatgactgcctgttacacagaaacaggaataccatgtt

SEQ ID NO: 173711 - DNA, 1242 bp, Artificial Sequence
  derived and/or modified sequence
atgtctgtgcagagcagttctgggtctctcgaaggtccaccttcctggtcccagctcagtacttcacctactcccggttccgctgctgccgctagatctctgctaaatcatactcccccatccggtcgcccacgggagggggctatggacgagcttcactccctcgacccccgacgacaggaattactggaggctcgttttaccggagtcgcatctgggagcacaggctcaaccggtagctgttcggtgggcgctaaggcatcaacgaataacgagtcctccaatcactcattcggtagcctaggctcattgtcagacaaagaatcggagactccagagaagaagcagtcagagtcttcgaggggaagaaaaaggaaagcagagaatcaaaatgaatcctcacagggaaaatccattggtgggcgaggccataaaattagtgattactttgaataccagggtggaaatggatctagccctgtacgtgggattccaccggctattagaagcccccagaattcccattctcactccacgccatccagctcagtcagacctaattcacctagtccgacagcactggcttttggtgatcatccaattgttcagcccaaacagttatcttttaagattatccagaccgatctgaccatgctcaaacttgctgcactcgagtctaacaagatccaggatctggagaaaaaggaaggccgtattgatgatctcctgcgtgcgaactgcgatctgaggagacagatcgacgagcagcagaaacttctggaaaagtacaaagagaggctgaacaaatgtattagcatgagcaaaaagctgctgatcgagaaatctacacaggagaagctgtcatcaagagagaaaagtatgcaggacagattgcgactggggcattttaccaccgtgagacatggagcgagcttcacagaacaatggacagatgggtttgcgttccagaacttggtcaagcagcaggagtgggttaaccagcaaagggaggacatcgaacgacagcggaagctgttggctaagagaaaacctcccacagctaataacagtcaggccccatcgaccaattctgagccaaagcaaagaaaaaataaggccgtcaatggagcagagaatgatccattcgtccgcccaaatttaccgcagctgctgacacttgctgaataccatgagcaggaagagatctttaagctgcgacttgggcatcttaagaagagatag

SEQ ID NO: 173712 - DNA, 2301 bp, Artificial Sequence
  derived and/or modified sequence
atgtcagtccagagctcatctgggagcctggaagggcctccttcctggtcccagttaagcacttcgccaacacccggttccgccgctgcggctagatcactcctgaaccacacccccccatcaggacgcccacgtgaaggagctatggatgagcttcacagcctggatccacggcgacaggagttacttgaggccaggtttactggggtggcgtccggcagcaccggctccacggggtcatgttcagtgggagcgaaagccagcacaaacaacgaaagttccaaccatagtttcggatccctcggatcattgtcagacaaggaaagtgagacaccagagaagaagcagtcagagagttcccggggtcggaagcgcaaagccgaaaaccaaaacgagtcgtctcaaggtaagagcatcgggggtaggggacacaagatctctgactacttcgagtatcagggcggaaatggcagctcgccagtgcggggtataccacctgcgatcaggtcacctcagaattctcattcccacagcaccccaagctcaagtgtgagaccaaatagtccatcacctacagccctagctttcggtgatcacccgatcgtacaacccaagcagctgagctttaagatcattcagactgacctgaccatgttgaaactggctgctttggaatccaataagatacaggacttagaaaaaaaagagggcaggatagatgacctgttgcgcgcaaactgtgatttacgacgccagatcgatgaacagcaaaagctccttgaaaaatataaagaacggcttaataagtgcatttcaatgagcaaaaaactgctcattgaaaaaagcacccaggagaaactgtcatctcgggaaaaaagcatgcaggataggttgagactgggacatttcacaactgtgaggcatggggcatcattcacagagcaatggaccgatgggttcgcctttcagaacctcgtcaaacagcaggagtgggtgaatcaacagcgtgaagacatcgaaaggcaaaggaaactgcttgctaagaggaagcctcctaccgctaacaatagtcaggccccaagtactaacagcgaacctaaacaacggaaaaataaggccgtgaatggcgctgagaacgaccccttcgttcgccctaatctgccgcagctgctgacactcgctgaatatcacgaacaggaggaaatcttcaaactccgactggggcacctgaaaaaggaagaagctgaaatccaagcagagctggaaaggttggaaagagttcggaatcttcatatacgggaactcaaacgcattaacaatgaggataactctcagtttaaggatcaccccaccctcaatgagagatatctcctgctgcatcttctagggagggggggattctccgaagtgtacaaggcattcgatttgtacgaacagcgctacgcagccgttaagatccatcagcttaataaatcatggcgggatgaaaagaaagagaactaccataagcacgcatgccgcgagtacagaattcacaaagaattggaccatcccaggatcgtaaaattgtatgactacttcagccttgacaccgataccttttgtactgtcctggagtattgtgaaggcaatgatttggatttttacctgaaacagcacaagctgatgtcggagaaggaggctcggtcaattgtcatgcaaatcgtaaatgctctgaggtacctgaacgagatcaagccccctattatccactacgacctaaagcctgggaatatacttctcgtagacggaaccgcgtgtggtgaaattaaaataactgatttcggcctgtcaaaaattatggacgacgatagctatggagtggacggcatggacctcacctcccaaggcgcaggcacatactggtacctgcctccagagtgctttgtcgtcggaaaggaacctccaaagatctccaacaaggttgatgtgtggagcgtgggcgtcatctttttccagtgcctgtatgggagaaagcctttcgggcataatcaaagccagcaagacattctgcaggagaatacaatcctgaaggccacggaggtgcagttccctgttaaaccagtggtcagttctgaggccaaggccttcatacgaagatgtctggcctatcgtaaggaggaccgtttcgacgtccatcagctagccaacgatccttacctgctcccccacatgaggcgctctaacagtagtggaaacctgcacatggcagggttaacagcttctcccactcctccctcttcctctatcatcacatactag

SEQ ID NO: 173713 - DNA, 1242 bp, Artificial Sequence
  derived and/or modified sequence
atgagcgtgcagagcagcagcggcagcctggagggcccccccagctggagccagctgagcaccagccccacccccggcagcgccgccgccgccagaagcctgctgaaccacaccccccccagcggcagacccagagagggcgccatggacgagctgcacagcctggaccccagaagacaggagctgctggaggccagattcaccggcgtggccagcggcagcaccggcagcaccggcagctgcagcgtgggcgccaaggccagcaccaacaacgagagcagcaaccacagcttcggcagcctgggcagcctgagcgacaaggagagcgagacccccgagaagaagcagagcgagagcagcagaggcagaaagagaaaggccgagaaccagaacgagagcagccagggcaagagcatcggcggcagaggccacaagatcagcgactacttcgagtaccagggcggcaacggcagcagccccgtgagaggcatcccccccgccatcagaagcccccagaacagccacagccacagcacccccagcagcagcgtgagacccaacagccccagccccaccgccctggccttcggcgaccaccccatcgtgcagcccaagcagctgagcttcaagatcatccagaccgacctgaccatgctgaagctggccgccctggagagcaacaagatccaggacctggagaagaaggagggcagaatcgacgacctgctgagagccaactgcgacctgagaagacagatcgacgagcagcagaagctgctggagaagtacaaggagagactgaacaagtgcatcagcatgagcaagaagctgctgatcgagaagagcacccaggagaagctgagcagcagagagaagagcatgcaggacagactgagactgggccacttcaccaccgtgagacacggcgccagcttcaccgagcagtggaccgacggcttcgccttccagaacctggtgaagcagcaggagtgggtgaaccagcagagagaggacatcgagagacagagaaagctgctggccaagagaaagccccccaccgccaacaacagccaggcccccagcaccaacagcgagcccaagcagagaaagaacaaggccgtgaacggcgccgagaacgaccccttcgtgagacccaacctgccccagctgctgaccctggccgagtaccacgagcaggaggagatcttcaagctgagactgggccacctgaagaagagatag

SEQ ID NO: 173714 - DNA, 2301 bp, Artificial Sequence
  derived and/or modified sequence
atgagcgtgcagagcagcagcggcagcctggagggcccccccagctggagccagctgagcaccagccccacccccggcagcgccgccgccgccagaagcctgctgaaccacaccccccccagcggcagacccagagagggcgccatggacgagctgcacagcctggaccccagaagacaggagctgctggaggccagattcaccggcgtggccagcggcagcaccggcagcaccggcagctgcagcgtgggcgccaaggccagcaccaacaacgagagcagcaaccacagcttcggcagcctgggcagcctgagcgacaaggagagcgagacccccgagaagaagcagagcgagagcagcagaggcagaaagagaaaggccgagaaccagaacgagagcagccagggcaagagcatcggcggcagaggccacaagatcagcgactacttcgagtaccagggcggcaacggcagcagccccgtgagaggcatcccccccgccatcagaagcccccagaacagccacagccacagcacccccagcagcagcgtgagacccaacagccccagccccaccgccctggccttcggcgaccaccccatcgtgcagcccaagcagctgagcttcaagatcatccagaccgacctgaccatgctgaagctggccgccctggagagcaacaagatccaggacctggagaagaaggagggcagaatcgacgacctgctgagagccaactgcgacctgagaagacagatcgacgagcagcagaagctgctggagaagtacaaggagagactgaacaagtgcatcagcatgagcaagaagctgctgatcgagaagagcacccaggagaagctgagcagcagagagaagagcatgcaggacagactgagactgggccacttcaccaccgtgagacacggcgccagcttcaccgagcagtggaccgacggcttcgccttccagaacctggtgaagcagcaggagtgggtgaaccagcagagagaggacatcgagagacagagaaagctgctggccaagagaaagccccccaccgccaacaacagccaggcccccagcaccaacagcgagcccaagcagagaaagaacaaggccgtgaacggcgccgagaacgaccccttcgtgagacccaacctgccccagctgctgaccctggccgagtaccacgagcaggaggagatcttcaagctgagactgggccacctgaagaaggaggaggccgagatccaggccgagctggagagactggagagagtgagaaacctgcacatcagagagctgaagagaatcaacaacgaggacaacagccagttcaaggaccaccccaccctgaacgagagatacctgctgctgcacctgctgggcagaggcggcttcagcgaggtgtacaaggccttcgacctgtacgagcagagatacgccgccgtgaagatccaccagctgaacaagagctggagagacgagaagaaggagaactaccacaagcacgcctgcagagagtacagaatccacaaggagctggaccaccccagaatcgtgaagctgtacgactacttcagcctggacaccgacaccttctgcaccgtgctggagtactgcgagggcaacgacctggacttctacctgaagcagcacaagctgatgagcgagaaggaggccagaagcatcgtgatgcagatcgtgaacgccctgagatacctgaacgagatcaagccccccatcatccactacgacctgaagcccggcaacatcctgctggtggacggcaccgcctgcggcgagatcaagatcaccgacttcggcctgagcaagatcatggacgacgacagctacggcgtggacggcatggacctgaccagccagggcgccggcacctactggtacctgccccccgagtgcttcgtggtgggcaaggagccccccaagatcagcaacaaggtggacgtgtggagcgtgggcgtgatcttcttccagtgcctgtacggcagaaagcccttcggccacaaccagagccagcaggacatcctgcaggagaacaccatcctgaaggccaccgaggtgcagttccccgtgaagcccgtggtgagcagcgaggccaaggccttcatcagaagatgcctggcctacagaaaggaggacagattcgacgtgcaccagctggccaacgacccctacctgctgccccacatgagaagaagcaacagcagcggcaacctgcacatggccggcctgaccgccagccccaccccccccagcagcagcatcatcacctactag

SEQ ID NO: 173715 - protein, 2120 aa, Artificial Sequence
  derived and/or modified sequence
MRSFKRVNFGTLLSSQKEAEELLPALKEFLSNPPAGFPSSRSDAERRQACDAILRACNQQLTAKLACPRHLGSLLELAELACDGYLVSTPQRPPLYLERILFVLLRNAAAQGSPEATLRLAQPLHACLVQCSREAAPQDYEAVARGSFSLLWKGAEALLERRAAFAARLKALSFLVLLEDESTPCEVPHFASPTACRAVAAHQLFDASGHGLNEADADFLDDLLSRHVIRALVGERGSSSGLLSPQRALCLLELTLEHCRRFCWSRHHDKAISAVEKAHSYLRNTNLAPSLQLCQLGVKLLQVGEEGPQAVAKLLIKASAVLSKSMEAPSPPLRALYESCQFFLSGLERGTKRRYRLDAILSLFAFLGGYCSLLQQLRDDGVYGGSSKQQQSFLQMYFQGLHLYTVVVYDFAQGCQIVDLADLTQLVDSCKSTVVWMLEALEGLSGQELTDHMGMTASYTSNLAYSFYSHKLYAEACAISEPLCQHLGLVKPGTYPEVPPEKLHRCFRLQVESLKKLGKQAQGCKMVILWLAALQPCSPEHMAEPVTFWVRVKMDAARAGDKELQLKTLRDSLSGWDPETLALLLREELQAYKAVRADTGQERFNIICDLLELSPEETPAGAWARATHLVELAQVLCYHDFTQQTNCSALDAIREALQLLDSVRPEAQARDQLLDDKAQALLWLYICTLEAKMQEGIERDRRAQAPGNLEEFEVNDLNYEDKLQEDRFLYSNIAFNLAADAAQSKCLDQALALWKELLTKGQAPAVRCLQQTAASLQILAALYQLVAKPMQALEVLLLLRIVSERLKDHSKAAGSSCHITQLLLTLGCPSYAQLHLEEAASSLKHLDQTTDTYLLLSLTCDLLRSQLYWTHQKVTKGVSLLLSVLRDPALQKSSKAWYLLRVQVLQLVAAYLSLPSNNLSHSLWEQLCAQGWQTPEIALIDSHKLLRSIILLLMGSDILSTQKAAVETSFLDYGENLVQKWQVLSEVLSCSEKLVCHLGRLGSVSEAKAFCLEALKLTTKLQIPRQCALFLVLKGELELARNDIDLCQSDLQQVLFLLESCTEFGGVTQHLDSVKKVHLQKGKQQAQVPCPPQLPEEELFLRGPALELVATVAKEPGPIAPSTNSSPVLKTKPQPIPNFLSHSPTCDCSLCASPVLTAVCLRWVLVTAGVRLAMGHQAQGLDLLQVVLKGCPEAAERLTQALQASLNHKTPPSLVPSLLDEILAQAYTLLALEGLNQPSNESLQKVLQSGLKFVAARIPHLEPWRASLLLIWALTKLGGLSCCTTQLFASSWGWQPPLIKSVPGSEPSKTQGQKRSGRGRQKLASAPLRLNNTSQKGLEGRGLPCTPKPPDRIRQAGPHVPFTVFEEVCPTESKPEVPQAPRVQQRVQTRLKVNFSDDSDLEDPVSAEAWLAEEPKRRGTASRGRGRARKGLSLKTDAVVAPGSAPGNPGLNGRSRRAKKVASRHCEERRPQRASDQARPGPEIMRTIPEEELTDNWRKMSFEILRGSDGEDSASGGKTPAPGPEAASGEWELLRLDSSKKKLPSPCPDKESDKDLGPRLRLPSAPVATGLSTLDSICDSLSVAFRGISHCPPSGLYAHLCRFLALCLGHRDPYATAFLVTESVSITCRHQLLTHLHRQLSKAQKHRGSLEIADQLQGLSLQEMPGDVPLARIQRLFSFRALESGHFPQPEKESFQERLALIPSGVTVCVLALATLQPGTVGNTLLLTRLEKDSPPVSVQIPTGQNKLHLRSVLNEFDAIQKAQKENSSCTDKREWWTGRLALDHRMEVLIASLEKSVLGCWKGLLLPSSEEPGPAQEASRLQELLQDCGWKYPDRTLLKIMLSGAGALTPQDIQALAYGLCPTQPERAQELLNEAVGRLQGLTVPSNSHLVLVLDKDLQKLPWESMPSLQALPVTRLPSFRFLLSYSIIKEYGASPVLSQGVDPRSTFYVLNPHNNLSSTEEQFRANFSSEAGWRGVVGEVPRPEQVQEALTKHDLYIYAGHGAGARFLDGQAVLRLSCRAVALLFGCSSAALAVRGNLEGAGIVLKYIMAGCPLFLGNLWDVTDRDIDRYTEALLQGWLGAGPGAPLLYYVNQARQAPRLKYLIGAAPIAYGLPVSLR

SEQ ID NO: 173716 - protein, 1795 aa, Artificial Sequence
  derived and/or modified sequence
MEAPSPPLRALYESCQFFLSGLERGTKRRYRLDAILSLFAFLGGYCSLLQQLRDDGVYGGSSKQQQSFLQMYFQGLHLYTVVVYDFAQGCQIVDLADLTQLVDSCKSTVVWMLEALEGLSGQELTDHMGMTASYTSNLAYSFYSHKLYAEACAISEPLCQHLGLVKPGTYPEVPPEKLHRCFRLQVESLKKLGKQAQGCKMVILWLAALQPCSPEHMAEPVTFWVRVKMDAARAGDKELQLKTLRDSLSGWDPETLALLLREELQAYKAVRADTGQERFNIICDLLELSPEETPAGAWARATHLVELAQVLCYHDFTQQTNCSALDAIREALQLLDSVRPEAQARDQLLDDKAQALLWLYICTLEAKMQEGIERDRRAQAPGNLEEFEVNDLNYEDKLQEDRFLYSNIAFNLAADAAQSKCLDQALALWKELLTKGQAPAVRCLQQTAASLQILAALYQLVAKPMQALEVLLLLRIVSERLKDHSKAAGSSCHITQLLLTLGCPSYAQLHLEEAASSLKHLDQTTDTYLLLSLTCDLLRSQLYWTHQKVTKGVSLLLSVLRDPALQKSSKAWYLLRVQVLQLVAAYLSLPSNNLSHSLWEQLCAQGWQTPEIALIDSHKLLRSIILLLMGSDILSTQKAAVETSFLDYGENLVQKWQVLSEVLSCSEKLVCHLGRLGSVSEAKAFCLEALKLTTKLQIPRQCALFLVLKGELELARNDIDLCQSDLQQVLFLLESCTEFGGVTQHLDSVKKVHLQKGKQQAQVPCPPQLPEEELFLRGPALELVATVAKEPGPIAPSTNSSPVLKTKPQPIPNFLSHSPTCDCSLCASPVLTAVCLRWVLVTAGVRLAMGHQAQGLDLLQVVLKGCPEAAERLTQALQASLNHKTPPSLVPSLLDEILAQAYTLLALEGLNQPSNESLQKVLQSGLKFVAARIPHLEPWRASLLLIWALTKLGGLSCCTTQLFASSWGWQPPLIKSVPGSEPSKTQGQKRSGRGRQKLASAPLRLNNTSQKGLEGRGLPCTPKPPDRIRQAGPHVPFTVFEEVCPTESKPEVPQAPRVQQRVQTRLKVNFSDDSDLEDPVSAEAWLAEEPKRRGTASRGRGRARKGLSLKTDAVVAPGSAPGNPGLNGRSRRAKKVASRHCEERRPQRASDQARPGPEIMRTIPEEELTDNWRKMSFEILRGSDGEDSASGGKTPAPGPEAASGEWELLRLDSSKKKLPSPCPDKESDKDLGPRLRLPSAPVATGLSTLDSICDSLSVAFRGISHCPPSGLYAHLCRFLALCLGHRDPYATAFLVTESVSITCRHQLLTHLHRQLSKAQKHRGSLEIADQLQGLSLQEMPGDVPLARIQRLFSFRALESGHFPQPEKESFQERLALIPSGVTVCVLALATLQPGTVGNTLLLTRLEKDSPPVSVQIPTGQNKLHLRSVLNEFDAIQKAQKENSSCTDKREWWTGRLALDHRMEVLIASLEKSVLGCWKGLLLPSSEEPGPAQEASRLQELLQDCGWKYPDRTLLKIMLSGAGALTPQDIQALAYGLCPTQPERAQELLNEAVGRLQGLTVPSNSHLVLVLDKDLQKLPWESMPSLQALPVTRLPSFRFLLSYSIIKEYGASPVLSQGVDPRSTFYVLNPHNNLSSTEEQFRANFSSEAGWRGVVGEVPRPEQVQEALTKHDLYIYAGHGAGARFLDGQAVLRLSCRAVALLFGCSSAALAVRGNLEGAGIVLKYIMAGCPLFLGNLWDVTDRDIDRYTEALLQGWLGAGPGAPLLYYVNQARQAPRLKYLIGAAPIAYGLPVSLR

SEQ ID NO: 173717 - DNA, 6623 bp, Artificial Sequence
  derived and/or modified sequence
ggttacattttggatcctcgcggagtactggtcaggcggttaagtcctgtacctaggaaagagggcgagctctggggcgctctccggtgtcatgaggagcttcaaaagagtcaactttgggactctgctaagcagccagaaggaggctgaagagttgctgcccgccttgaaggagttcctgtccaaccctccagctggttttcccagcagccgatctgatgctgagaggagacaagcttgtgatgccatcctgagggcttgcaaccagcagctgactgctaagctagcttgccctaggcatctggggagcctgctggagctggcagagctggcctgtgatggctacttagtgtctaccccacagcgtcctcccctctacctggaacgaattctctttgtcttactgcggaatgctgctgcacaaggaagcccagaggccacactccgccttgctcagcccctccatgcctgcttggtgcagtgctctcgcgaggctgctccccaggactatgaggccgtggctcggggcagcttttctctgctttggaagggggcagaagccctgttggaacggcgagctgcatttgcagctcggctgaaggccttgagcttcctagtactcttggaggatgaaagtaccccttgtgaggttcctcactttgcttctccaacagcctgtcgagcggtagctgcccatcagctatttgatgccagtggccatggtctaaatgaagcagatgctgatttcctagatgacctgctctccaggcacgtgatcagagccttggtgggtgagagagggagctcttctgggcttctttctccccagagggccctctgcctcttggagctcaccttggaacactgccgtcgcttttgctggagccgccaccatgacaaagccatcagcgcagtggagaaggctcacagttacctaaggaacaccaatctagcccctagccttcagctatgtcagctgggggttaagctgctgcaggttggggaggaaggacctcaggcagtggccaagcttctgatcaaggcatcagctgtcctgagcaagagtatggaggcaccatcacccccacttcgggcattgtatgagagctgccagttcttcctttcaggcctggaacgaggcaccaagaggcgctatagacttgatgccattctgagcctctttgcttttcttggagggtactgctctcttctgcagcagctgcgggatgatggtgtgtatgggggctcctccaagcaacagcagtcttttcttcagatgtactttcagggacttcacctctacactgtggtggtttatgactttgcccaaggctgtcagatagttgatttggctgacctgacccaactagtggacagttgtaaatctaccgttgtctggatgctggaggccttagagggcctgtcgggccaagagctgacggaccacatggggatgaccgcttcttacaccagtaatttggcctacagcttctatagtcacaagctctatgccgaggcctgtgccatctctgagccgctctgtcagcacctgggtttggtgaagccaggcacttatcccgaggtgcctcctgagaagttgcacaggtgcttccggctacaagtagagagtttgaagaaactgggtaaacaggcccagggctgcaagatggtgattttgtggctggcagccctgcaaccctgtagccctgaacacatggctgagccagtcactttctgggttcgggtcaagatggatgcggccagggctggagacaaggagctacagctaaagactctgcgagacagcctcagtggctgggacccggagaccctggccctcctgctgagggaggagctgcaggcctacaaggcggtgcgggccgacactggacaggaacgcttcaacatcatctgtgacctcctggagctgagccccgaggagacaccagccggggcctgggcacgagccacccacctggtagaactggctcaggtgctctgctaccacgactttacgcagcagaccaactgctctgctctggatgctatccgggaagccctgcagcttctggactctgtgaggcctgaggcccaggccagagatcagcttctggacgataaagcacaggccttgctgtggctttacatctgtactctggaagccaaaatgcaggaaggtatcgagcgggatcggagagcccaggcccctggtaacttggaggaatttgaagtcaatgacctgaactatgaagataaactccaggaagatcgtttcctatacagtaacattgccttcaacctggctgcagatgctgctcagtccaaatgcctggaccaagccctggccctgtggaaggagctgcttacaaaggggcaggccccagctgtacggtgtctccagcagacagcagcctcactgcagatcctagcagccctctaccagctggtggcaaagcccatgcaggctctggaggtcctcctgctgctacggattgtctctgagagactgaaggaccactcgaaggcagctggctcctcctgccacatcacccagctcctcctgaccctcggctgtcccagctatgcccagttacacctggaagaggcagcatcgagcctgaagcatctcgatcagactactgacacatacctgctcctttccctgacctgtgatctgcttcgaagtcaactctactggactcaccagaaggtgaccaagggtgtctctctgctgctgtctgtgcttcgggatcctgccctccagaagtcctccaaggcttggtacttgctgcgtgtccaggtcctgcagctggtggcagcttaccttagcctcccgtcaaacaacctctcacactccctgtgggagcagctctgtgcccaaggctggcagacacctgagatagctctcatagactcccataagctcctccgaagcatcatcctcctgctgatgggcagtgacattctctcaactcagaaagcagctgtggagacatcgtttttggactatggtgaaaatctggtacaaaaatggcaggttctttcagaggtgctgagctgctcagagaagctggtctgccacctgggccgcctgggtagtgtgagtgaagccaaggccttttgcttggaggccctaaaacttacaacaaagctgcagataccacgccagtgtgccctgttcctggtgctgaagggcgagctggagctggcccgcaatgacattgatctctgtcagtcggacctgcagcaggttctgttcttgcttgagtcttgcacagagtttggtggggtgactcagcacctggactctgtgaagaaggtccacctgcagaaggggaagcagcaggcccaggtcccctgtcctccacagctcccagaggaggagctcttcctaagaggccctgctctagagctggtggccactgtggccaaggagcctggccccatagcaccttctacaaactcctccccagtcttgaaaaccaagccccagcccatacccaacttcctgtcccattcacccacctgtgactgctcgctctgcgccagccctgtcctcacagcagtctgtctgcgctgggtattggtcacggcaggggtgaggctggccatgggccaccaagcccagggtctggatctgctgcaggtcgtgctgaagggctgtcctgaagccgctgagcgcctcacccaagctctccaagcttccctgaatcataaaacacccccctccttggttccaagcctcttggatgagatcttggctcaagcatacacactgttggcactggagggcctgaaccagccatcaaacgagagcctgcagaaggttctacagtcagggctgaagtttgtagcagcacggataccccacctagagccctggcgagccagcctgctcttgatttgggccctcacaaaactaggtggcctcagctgctgtactacccaactttttgcaagctcctggggctggcagccaccattaataaaaagtgtccctggctcagagccctctaagactcagggccaaaaacgttctggacgagggcgccaaaagttagcctctgctcccctgcgcctcaataatacctctcagaaaggtctggaaggtagaggactgccctgcacacctaaacccccagaccggatcaggcaagctggccctcatgtccccttcacggtgtttgaggaagtctgccctacagagagcaagcctgaagtaccccaggcccccagggtacaacagagagtccagacgcgcctcaaggtgaacttcagtgatgacagtgacttggaagaccctgtctcagctgaggcctggctggcagaggagcctaagagacggggcactgcttcccggggccgggggcgagcaaggaagggcctgagcctaaagacggatgccgtggttgccccaggtagtgcccctgggaaccctggcctgaatggcaggagccggagggccaagaaggtggcatcaagacattgtgaggagcggcgtccccagagggccagtgaccaggccaggcctggccctgagatcatgaggaccatccctgaggaagaactgactgacaactggagaaaaatgagctttgagatcctcaggggctctgacggggaagactcagcctcaggtgggaagactccagctccgggccctgaggcagcttctggagaatgggagctgctgaggctggattccagcaagaagaagctgcccagcccatgcccagacaaggagagtgacaaggaccttggtcctcggctccggctcccctcagcccccgtagccactggtctttctaccctggactccatctgtgactccctgagtgttgctttccggggcattagtcactgtcctcctagtgggctctatgcccacctctgccgcttcctggccttgtgcctgggccaccgggatccttatgccactgctttccttgtcaccgagtctgtctccatcacctgtcgccaccagctgctcacccacctccacagacagctcagcaaggcccagaagcaccgaggatcacttgaaatagcagaccagctgcaggggctgagccttcaggagatgcctggagatgtccccctggcccgcatccagcgcctcttttccttcagggctttggaatctggccacttcccccagcctgaaaaggagagtttccaggagcgcctggctctgatccccagtggggtgactgtgtgtgtgttggccctggccaccctccagcccggaaccgtgggcaacaccctcctgctgacccggctggaaaaggacagtcccccagtcagtgtgcagattcccactggccagaacaagcttcatctgcgttcagtcctgaatgagtttgatgccatccagaaggcacagaaagagaacagcagctgtactgacaagcgagaatggtggacagggcggctggcactggaccacaggatggaggttctcatcgcttccctagagaagtctgtgctgggctgctggaaggggctgctgctgccgtccagtgaggagcccggccctgcccaggaggcctcccgcctacaggagctgctacaggactgtggctggaaatatcctgaccgcactctgctgaaaatcatgctcagtggtgccggtgccctcacccctcaggacattcaggccctggcctacgggctgtgcccaacccagccagagcgagcccaggagctcctgaatgaggcagtaggacgtctacagggcctgacagtaccaagcaatagccaccttgtcttggtcctagacaaggacttgcagaagctgccgtgggaaagcatgcccagcctccaagcactgcctgtcacccggctgccctccttccgcttcctactcagctactccatcatcaaagagtatggggcctcgccagtgctgagtcaaggggtggatccacgaagtaccttctatgtcctgaaccctcacaataacctgtcaagcacagaggagcaatttcgagccaatttcagcagtgaagctggctggagaggagtggttggggaggtgccaagacctgaacaggtgcaggaagccctgacaaagcatgatttgtatatctatgcagggcatggggctggtgcccgcttccttgatgggcaggctgtcctgcggctgagctgtcgggcagtggccctgctgtttggctgtagcagtgcggccctggctgtgcgtggaaacctggagggggctggcatcgtgctcaagtacatcatggctggttgccccttgtttctgggtaatctctgggatgtgactgaccgcgacattgaccgctacacggaagctctgctgcaaggctggcttggagcaggcccaggggccccccttctctactatgtaaaccaggcccgccaagctccccgactcaagtatcttattggggctgcacctatagcctatggcttgcctgtctctctgcggtaaccccatggagctgtcttattgatgctagaagcctcataactgttctacctccaaggttagatttaatccttaggataactcttttaaagtgattttccccagtgttttatatgaaacatttccttttgatttaacctcagtataataaagatacatcatttaaaccctg

SEQ ID NO: 173718 - DNA, 6447 bp, Artificial Sequence
  derived and/or modified sequence
cggttaagtcctgtacctaggaaagagggcgagctctggggcggtaaggccggaagggactcgtgagcgtggctctccggtgtcatgaggagcttcaaaagagtcaactttgggactctgctaagcagccagaaggaggctgaagagttgctgcccgccttgaaggagttcctgtccaaccctccagctggttttcccagcagccgatctgatgctgagaggagacaagcttgtgatgccatcctgagggcttgcaaccagcagctgactgctaagctagcttgccctaggcatctggggagcctgctggagctggcagagctggcctgtgatggctacttagtgtctaccccacagcgtcctcccctctacctggaacgaattctctttgtcttactgcggaatgctgctgcacaaggaagcccagaggccacactccgccttgctcagcccctccatgcctgcttggtgcagtgctctcgcgaggctgctccccaggactatgaggccgtggctcggggcagcttttctctgctttggaagggggcagaagccctgttggaacggcgagctgcatttgcagctcggctgaaggccttgagcttcctagtactcttggaggatgaaagtaccccttgtgaggttcctcactttgcttctccaacagcctgtcgagcggtagctgcccatcagctatttgatgccagtggccatggtctaaatgaagcagatgctgatttcctagatgacctgctctccaggcacgtgatcagagccttggtgggtgagagagggagctcttctgggcttctttctccccagagggccctctgcctcttggagctcaccttggaacactgccgtcgcttttgctggagccgccaccatgacaaagccatcagcgcagtggagaaggctcacagttacctaaggaacaccaatctagcccctagccttcagctatgtcagctgggggttaagctgctgcaggttggggaggaaggacctcaggcagtggccaagcttctgatcaaggcatcagctgtcctgagcaagagtatggaggcaccatcacccccacttcgggcattgtatgagagctgccagttcttcctttcaggcctggaacgaggcaccaagaggcgctatagacttgatgccattctgagcctctttgcttttcttggagggtactgctctcttctgcagcagctgcgggatgatggtgtgtatgggggctcctccaagcaacagcagtcttttcttcagatgtactttcagggacttcacctctacactgtggtggtttatgactttgcccaaggctgtcagatagttgatttggctgacctgacccaactagtggacagttgtaaatctaccgttgtctggatgctggaggccttagagggcctgtcgggccaagagctgacggaccacatggggatgaccgcttcttacaccagtaatttggcctacagcttctatagtcacaagctctatgccgaggcctgtgccatctctgagccgctctgtcagcacctgggtttggtgaagccaggcacttatcccgaggtgcctcctgagaagttgcacaggtgcttccggctacaagtagagagtttgaagaaactgggtaaacaggcccagggctgcaagatggtgattttgtggctggcagccctgcaaccctgtagccctgaacacatggctgagccagtcactttctgggttcgggtcaagatggatgcggccagggctggagacaaggagctacagctaaagactctgcgagacagcctcagtggctgggacccggagaccctggccctcctgctgagggaggagctgcaggcctacaaggcggtgcgggccgacactggacaggaacgcttcaacatcatctgtgacctcctggagctgagccccgaggagacaccagccggggcctgggcacgagccacccacctggtagaactggctcaggtgctctgctaccacgactttacgcagcagaccaactgctctgctctggatgctatccgggaagccctgcagcttctggactctgtgaggcctgaggcccaggccagagatcagcttctggacgataaagcacaggccttgctgtggctttacatctgtactctggaagccaaaatgcaggaaggtatcgagcgggatcggagagcccaggcccctggtaacttggaggaatttgaagtcaatgacctgaactatgaagataaactccaggaagatcgtttcctatacagtaacattgccttcaacctggctgcagatgctgctcagtccaaatgcctggaccaagccctggccctgtggaaggagctgcttacaaaggggcaggccccagctgtacggtgtctccagcagacagcagcctcactgcagatcctagcagccctctaccagctggtggcaaagcccatgcaggctctggaggtcctcctgctgctacggattgtctctgagagactgaaggaccactcgaaggcagctggctcctcctgccacatcacccagctcctcctgaccctcggctgtcccagctatgcccagttacacctggaagaggcagcatcgagcctgaagcatctcgatcagactactgacacatacctgctcctttccctgacctgtgatctgcttcgaagtcaactctactggactcaccagaaggtgaccaagggtgtctctctgctgctgtctgtgcttcgggatcctgccctccagaagtcctccaaggcttggtacttgctgcgtgtccaggtcctgcagctggtggcagcttaccttagcctcccgtcaaacaacctctcacactccctgtgggagcagctctgtgcccaaggctggcagacacctgagatagctctcatagactcccataagctcctccgaagcatcatcctcctgctgatgggcagtgacattctctcaactcagaaagcagctgtggagacatcgtttttggactatggtgaaaatctggtacaaaaatggcaggttctttcagaggtgctgagctgctcagagaagctggtctgccacctgggccgcctgggtagtgtgagtgaagccaaggccttttgcttggaggccctaaaacttacaacaaagctgcagataccacgccagtgtgccctgttcctggtgctgaagggcgagctggagctggcccgcaatgacattgatctctgtcagtcggacctgcagcaggttctgttcttgcttgagtcttgcacagagtttggtggggtgactcagcacctggactctgtgaagaaggtccacctgcagaaggggaagcagcaggcccaggtcccctgtcctccacagctcccagaggaggagctcttcctaagaggccctgctctagagctggtggccactgtggccaaggagcctggccccatagcaccttctacaaactcctccccagtcttgaaaaccaagccccagcccatacccaacttcctgtcccattcacccacctgtgactgctcgctctgcgccagccctgtcctcacagcagtctgtctgcgctgggtattggtcacggcaggggtgaggctggccatgggccaccaagcccagggtctggatctgctgcaggtcgtgctgaagggctgtcctgaagccgctgagcgcctcacccaagctctccaagcttccctgaatcataaaacacccccctccttggttccaagcctcttggatgagatcttggctcaagcatacacactgttggcactggagggcctgaaccagccatcaaacgagagcctgcagaaggttctacagtcagggctgaagtttgtagcagcacggataccccacctagagccctggcgagccagcctgctcttgatttgggccctcacaaaactaggtggcctcagctgctgtactacccaactttttgcaagctcctggggctggcagccaccattaataaaaagtgtccctggctcagagccctctaagactcagggccaaaaacgttctggacgagggcgccaaaagttagcctctgctcccctgcgcctcaataatacctctcagaaaggtctggaaggtagaggactgccctgcacacctaaacccccagaccggatcaggcaagctggccctcatgtccccttcacggtgtttgaggaagtctgccctacagagagcaagcctgaagtaccccaggcccccagggtacaacagagagtccagacgcgcctcaaggtgaacttcagtgatgacagtgacttggaagaccctgtctcagctgaggcctggctggcagaggagcctaagagacggggcactgcttcccggggccgggggcgagcaaggaagggcctgagcctaaagacggatgccgtggttgccccaggtagtgcccctgggaaccctggcctgaatggcaggagccggagggccaagaaggtggcatcaagacattgtgaggagcggcgtccccagagggccagtgaccaggccaggcctggccctgagatcatgaggaccatccctgaggaagaactgactgacaactggagaaaaatgagctttgagatcctcaggggctctgacggggaagactcagcctcaggtgggaagactccagctccgggccctgaggcagcttctggagaatgggagctgctgaggctggattccagcaagaagaagctgcccagcccatgcccagacaaggagagtgacaaggaccttggtcctcggctccggctcccctcagcccccgtagccactggtctttctaccctggactccatctgtgactccctgagtgttgctttccggggcattagtcactgtcctcctagtgggctctatgcccacctctgccgcttcctggccttgtgcctgggccaccgggatccttatgccactgctttccttgtcaccgagtctgtctccatcacctgtcgccaccagctgctcacccacctccacagacagctcagcaaggcccagaagcaccgaggatcacttgaaatagcagaccagctgcaggggctgagccttcaggagatgcctggagatgtccccctggcccgcatccagcgcctcttttccttcagggctttggaatctggccacttcccccagcctgaaaaggagagtttccaggagcgcctggctctgatccccagtggggtgactgtgtgtgtgttggccctggccaccctccagcccggaaccgtgggcaacaccctcctgctgacccggctggaaaaggacagtcccccagtcagtgtgcagattcccactggccagaacaagcttcatctgcgttcagtcctgaatgagtttgatgccatccagaaggcacagaaagagaacagcagctgtactgacaagcgagaatggtggacagggcggctggcactggaccacaggatggaggttctcatcgcttccctagagaagtctgtgctgggctgctggaaggggctgctgctgccgtccagtgaggagcccggccctgcccaggaggcctcccgcctacaggagctgctacaggactgtggctggaaatatcctgaccgcactctgctgaaaatcatgctcagtggtgccggtgccctcacccctcaggacattcaggccctggcctacgggctgtgcccaacccagccagagcgagcccaggagctcctgaatgaggcagtaggacgtctacagggcctgacagtaccaagcaatagccaccttgtcttggtcctagacaaggacttgcagaagctgccgtgggaaagcatgcccagcctccaagcactgcctgtcacccggctgccctccttccgcttcctactcagctactccatcatcaaagagtatggggcctcgccagtgctgagtcaaggggtggatccacgaagtaccttctatgtcctgaaccctcacaataacctgtcaagcacagaggagcaatttcgagccaatttcagcagtgaagctggctggagaggagtggttggggaggtgccaagacctgaacaggtgcaggaagccctgacaaagcatgatttgtatatctatgcagggcatggggctggtgcccgcttccttgatgggcaggctgtcctgcggctgagctgtcgggcagtggccctgctgtttggctgtagcagtgcggccctggctgtgcgtggaaacctggagggggctggcatcgtgctcaagtacatcatggctggttgccccttgtttctgggtaatctctgggatgtgactgaccgcgacattgaccgctacacggaagctctgctgcaaggctggcttggagcaggcccaggggccccccttctctactatgtaaaccaggcccgccaagctccccgactcaagtatcttattggggctgcacctatagcctatggcttgcctgtctctctgcggtaa

SEQ ID NO: 173719 - DNA, 6662 bp, Artificial Sequence
  derived and/or modified sequence
ggcggttaagtcctgtacctaggaaagagggcgagctctggggcgctctccggtgtcatgaggagcttcaaaagagtcaactttgggactctgctaagcagccagaaggaggctgaagagttgctgcccgccttgaaggtgggggtgctgcctggctcgggatacacctggctttccaaactgagctgttttgtgtttgccttttgaagagatggataagagttcctgtccaaccctccagctggttttcccagcagccgatctgatgctgagaggagacaagcttgtgatgccatcctgagggcttgcaaccagcagctgactgctaagctagcttgccctaggcatctggggagcctgctggagctggcagagctggcctgtgatggctacttagtgtctaccccacagcgtcctcccctctacctggaacgaattctctttgtcttactgcggaatgctgctgcacaaggaagcccagaggccacactccgccttgctcagcccctccatgcctgcttggtgcagtgctctcgcgaggctgctccccaggactatgaggccgtggctcggggcagcttttctctgctttggaagggggcagaagccctgttggaacggcgagctgcatttgcagctcggctgaaggccttgagcttcctagtactcttggaggatgaaagtaccccttgtgaggttcctcactttgcttctccaacagcctgtcgagcggtagctgcccatcagctatttgatgccagtggccatggtctaaatgaagcagatgctgatttcctagatgacctgctctccaggcacgtgatcagagccttggtgggtgagagagggagctcttctgggcttctttctccccagagggccctctgcctcttggagctcaccttggaacactgccgtcgcttttgctggagccgccaccatgacaaagccatcagcgcagtggagaaggctcacagttacctaaggaacaccaatctagcccctagccttcagctatgtcagctgggggttaagctgctgcaggttggggaggaaggacctcaggcagtggccaagcttctgatcaaggcatcagctgtcctgagcaagagtatggaggcaccatcacccccacttcgggcattgtatgagagctgccagttcttcctttcaggcctggaacgaggcaccaagaggcgctatagacttgatgccattctgagcctctttgcttttcttggagggtactgctctcttctgcagcagctgcgggatgatggtgtgtatgggggctcctccaagcaacagcagtcttttcttcagatgtactttcagggacttcacctctacactgtggtggtttatgactttgcccaaggctgtcagatagttgatttggctgacctgacccaactagtggacagttgtaaatctaccgttgtctggatgctggaggccttagagggcctgtcgggccaagagctgacggaccacatggggatgaccgcttcttacaccagtaatttggcctacagcttctatagtcacaagctctatgccgaggcctgtgccatctctgagccgctctgtcagcacctgggtttggtgaagccaggcacttatcccgaggtgcctcctgagaagttgcacaggtgcttccggctacaagtagagagtttgaagaaactgggtaaacaggcccagggctgcaagatggtgattttgtggctggcagccctgcaaccctgtagccctgaacacatggctgagccagtcactttctgggttcgggtcaagatggatgcggccagggctggagacaaggagctacagctaaagactctgcgagacagcctcagtggctgggacccggagaccctggccctcctgctgagggaggagctgcaggcctacaaggcggtgcgggccgacactggacaggaacgcttcaacatcatctgtgacctcctggagctgagccccgaggagacaccagccggggcctgggcacgagccacccacctggtagaactggctcaggtgctctgctaccacgactttacgcagcagaccaactgctctgctctggatgctatccgggaagccctgcagcttctggactctgtgaggcctgaggcccaggccagagatcagcttctggacgataaagcacaggccttgctgtggctttacatctgtactctggaagccaaaatgcaggaaggtatcgagcgggatcggagagcccaggcccctggtaacttggaggaatttgaagtcaatgacctgaactatgaagataaactccaggaagatcgtttcctatacagtaacattgccttcaacctggctgcagatgctgctcagtccaaatgcctggaccaagccctggccctgtggaaggagctgcttacaaaggggcaggccccagctgtacggtgtctccagcagacagcagcctcactgcagatcctagcagccctctaccagctggtggcaaagcccatgcaggctctggaggtcctcctgctgctacggattgtctctgagagactgaaggaccactcgaaggcagctggctcctcctgccacatcacccagctcctcctgaccctcggctgtcccagctatgcccagttacacctggaagaggcagcatcgagcctgaagcatctcgatcagactactgacacatacctgctcctttccctgacctgtgatctgcttcgaagtcaactctactggactcaccagaaggtgaccaagggtgtctctctgctgctgtctgtgcttcgggatcctgccctccagaagtcctccaaggcttggtacttgctgcgtgtccaggtcctgcagctggtggcagcttaccttagcctcccgtcaaacaacctctcacactccctgtgggagcagctctgtgcccaaggctggcagacacctgagatagctctcatagactcccataagctcctccgaagcatcatcctcctgctgatgggcagtgacattctctcaactcagaaagcagctgtggagacatcgtttttggactatggtgaaaatctggtacaaaaatggcaggttctttcagaggtgctgagctgctcagagaagctggtctgccacctgggccgcctgggtagtgtgagtgaagccaaggccttttgcttggaggccctaaaacttacaacaaagctgcagataccacgccagtgtgccctgttcctggtgctgaagggcgagctggagctggcccgcaatgacattgatctctgtcagtcggacctgcagcaggttctgttcttgcttgagtcttgcacagagtttggtggggtgactcagcacctggactctgtgaagaaggtccacctgcagaaggggaagcagcaggcccaggtcccctgtcctccacagctcccagaggaggagctcttcctaagaggccctgctctagagctggtggccactgtggccaaggagcctggccccatagcaccttctacaaactcctccccagtcttgaaaaccaagccccagcccatacccaacttcctgtcccattcacccacctgtgactgctcgctctgcgccagccctgtcctcacagcagtctgtctgcgctgggtattggtcacggcaggggtgaggctggccatgggccaccaagcccagggtctggatctgctgcaggtcgtgctgaagggctgtcctgaagccgctgagcgcctcacccaagctctccaagcttccctgaatcataaaacacccccctccttggttccaagcctcttggatgagatcttggctcaagcatacacactgttggcactggagggcctgaaccagccatcaaacgagagcctgcagaaggttctacagtcagggctgaagtttgtagcagcacggataccccacctagagccctggcgagccagcctgctcttgatttgggccctcacaaaactaggtggcctcagctgctgtactacccaactttttgcaagctcctggggctggcagccaccattaataaaaagtgtccctggctcagagccctctaagactcagggccaaaaacgttctggacgagggcgccaaaagttagcctctgctcccctgcgcctcaataatacctctcagaaaggtctggaaggtagaggactgccctgcacacctaaacccccagaccggatcaggcaagctggccctcatgtccccttcacggtgtttgaggaagtctgccctacagagagcaagcctgaagtaccccaggcccccagggtacaacagagagtccagacgcgcctcaaggtgaacttcagtgatgacagtgacttggaagaccctgtctcagctgaggcctggctggcagaggagcctaagagacggggcactgcttcccggggccgggggcgagcaaggaagggcctgagcctaaagacggatgccgtggttgccccaggtagtgcccctgggaaccctggcctgaatggcaggagccggagggccaagaaggtggcatcaagacattgtgaggagcggcgtccccagagggccagtgaccaggccaggcctggccctgagatcatgaggaccatccctgaggaagaactgactgacaactggagaaaaatgagctttgagatcctcaggggctctgacggggaagactcagcctcaggtgggaagactccagctccgggccctgaggcagcttctggagaatgggagctgctgaggctggattccagcaagaagaagctgcccagcccatgcccagacaaggagagtgacaaggaccttggtcctcggctccggctcccctcagcccccgtagccactggtctttctaccctggactccatctgtgactccctgagtgttgctttccggggcattagtcactgtcctcctagtgggctctatgcccacctctgccgcttcctggccttgtgcctgggccaccgggatccttatgccactgctttccttgtcaccgagtctgtctccatcacctgtcgccaccagctgctcacccacctccacagacagctcagcaaggcccagaagcaccgaggatcacttgaaatagcagaccagctgcaggggctgagccttcaggagatgcctggagatgtccccctggcccgcatccagcgcctcttttccttcagggctttggaatctggccacttcccccagcctgaaaaggagagtttccaggagcgcctggctctgatccccagtggggtgactgtgtgtgtgttggccctggccaccctccagcccggaaccgtgggcaacaccctcctgctgacccggctggaaaaggacagtcccccagtcagtgtgcagattcccactggccagaacaagcttcatctgcgttcagtcctgaatgagtttgatgccatccagaaggcacagaaagagaacagcagctgtactgacaagcgagaatggtggacagggcggctggcactggaccacaggatggaggttctcatcgcttccctagagaagtctgtgctgggctgctggaaggggctgctgctgccgtccagtgaggagcccggccctgcccaggaggcctcccgcctacaggagctgctacaggactgtggctggaaatatcctgaccgcactctgctgaaaatcatgctcagtggtgccggtgccctcacccctcaggacattcaggccctggcctacgggctgtgcccaacccagccagagcgagcccaggagctcctgaatgaggcagtaggacgtctacagggcctgacagtaccaagcaatagccaccttgtcttggtcctagacaaggacttgcagaagctgccgtgggaaagcatgcccagcctccaagcactgcctgtcacccggctgccctccttccgcttcctactcagctactccatcatcaaagagtatggggcctcgccagtgctgagtcaaggggtggatccacgaagtaccttctatgtcctgaaccctcacaataacctgtcaagcacagaggagcaatttcgagccaatttcagcagtgaagctggctggagaggagtggttggggaggtgccaagacctgaacaggtgcaggaagccctgacaaagcatgatttgtatatctatgcagggcatggggctggtgcccgcttccttgatgggcaggctgtcctgcggctgagctgtcgggcagtggccctgctgtttggctgtagcagtgcggccctggctgtgcgtggaaacctggagggggctggcatcgtgctcaagtacatcatggctggttgccccttgtttctgggtaatctctgggatgtgactgaccgcgacattgaccgctacacggaagctctgctgcaaggctggcttggagcaggcccaggggccccccttctctactatgtaaaccaggcccgccaagctccccgactcaagtatcttattggggctgcacctatagcctatggcttgcctgtctctctgcggtaaccccatggagctgtcttattgatgctagaagcctcataactgttctacctccaaggttagatttaatccttaggataactcttttaaagtgattttccccagtgttttatatgaaacatttccttttgatttaacctcagtataataaagatacatcattt

SEQ ID NO: 173720 - DNA, 6363 bp, Artificial Sequence
  derived and/or modified sequence
atgcggtcttttaaaagagtgaatttcgggactctactgtctagtcaaaaggaggcggaagaactactgcccgccctgaaggaattcctttctaatcctcctgcaggatttccctctagccgatctgatgccgaacgaagacaggcttgcgacgctattctgagggcatgcaatcaacagctcaccgcaaaactagcatgtcctaggcatctgggtagcctgctcgagttggctgagctcgcctgcgacggctatctcgtatccactccacaaaggcctcccctttacctggagaggatcttgttcgtgctattgcgaaacgccgctgcacaaggctcccccgaagcgacccttcggttggcgcagccactccacgcatgcttagtacagtgttcacgcgaggcagccccacaggattacgaagctgtggctaggggttccttctcccttttgtggaaaggcgccgaggctctgctagaacgacgcgcagccttcgccgctcggctcaaagcgctgtcctttctcgtcctgctggaagacgagagcacaccatgtgaagtcccgcactttgcatcacccaccgcttgccgagccgttgctgcccatcagctcttcgacgcaagcgggcacggtctgaatgaggctgacgcagactttctcgacgacctcttgagtcggcacgtgattagggcactcgtgggcgagcgcggcagttcctcaggactgctatctccacaacgggctttgtgtctcctggagctgaccttggaacattgcaggagattctgttggtctaggcaccatgataaggccatctccgccgtggagaaggcacattcttatctgaggaatactaatctggctccatctcttcagttgtgccaacttggagttaaactgttgcaggtgggagaggaaggtccccaagccgttgccaagctattaatcaaagcttccgctgttctatccaagagtatggaagccccgagccctccactgagggcattatacgaaagttgccagtttttcctgtctggcctggagaggggcacaaagcgtagatacagactggatgccatcctctctctgtttgccttccttggaggctactgctcactactccagcaactcagggacgacggagtctacggaggctcgagcaagcagcaacagtcattcctccagatgtacttccaggggctacacttatacacagtcgtagtgtacgatttcgcgcaaggatgccagatcgtagatctggcggatctcacacaactggttgactcctgcaagtcaactgttgtctggatgcttgaagccctggagggactttctggccaggaacttacagatcacatgggaatgacagccagttacaccagcaatctggcctactcgttctattcacacaaactgtacgctgaagcttgcgcaatcagcgagccgctctgccagcatttgggactggtgaagccaggtacatatcccgaagtgcctcccgaaaagttgcaccgatgcttccggctgcaagtcgaaagcctgaagaagctgggaaaacaggcacaaggatgcaaaatggtcattctgtggctcgccgccctccagccctgctcccccgagcatatggccgaaccagtgactttctgggtcagggtcaaaatggatgccgccagggccggtgacaaagagttgcagctcaaaacattaagggactcactctctgggtgggaccccgagacactcgctctgctgctccgagaagagctccaagcctacaaagcagtgcgggcggacacaggccaggagcggtttaatattatttgtgatttgctggagctcagtcctgaggaaacccccgccggggcatgggcgagagctactcacctcgtcgagttggcccaggtgctctgttatcacgatttcacacagcagaccaactgttctgcactcgatgccatccgcgaggccctgcagcttctggactcagtgaggcctgaggctcaggcgagagatcagctgctggatgacaaggcccaggctttgttgtggctgtatatttgcacactcgaagctaagatgcaagagggtattgaacgtgaccgtagagctcaggcgccaggcaacctggaagaatttgaagtaaatgatctgaactacgaggacaaattacaagaggatcgctttttatacagtaacattgcatttaacctggcagccgatgcagcacaaagcaagtgtcttgaccaggccctagcgttgtggaaggaactgcttactaagggtcaggcgccagctgtgcggtgccttcagcagactgcagctagtctccagattctggcggctctttaccagctagtggccaaacctatgcaggccctcgaggttctgttgttactacggatagtatcagagcgattgaaagaccactcaaaagcagcgggtagctcatgccacataacccagctgcttctcacacttggttgtccctcctatgctcagcttcacttggaagaagctgccagctccctcaagcacctcgaccagaccacagacacttacctgctgctgagcttgacatgcgaccttttgcggagtcaactgtattggactcaccaaaaggtgacaaagggagtttctctactgttatccgtgctgagggatcctgcactgcagaagtcaagtaaggcctggtatttgctcagggtccaggttctgcagctggttgcagcctatttgtccctgccgagcaacaacttaagccatagtctatgggagcaattgtgtgcccagggctggcagacccctgagatcgccctgattgatagtcacaagctcctgcgatcaataattctgctgctgatgggtagcgatattctctcaacacagaaggccgccgttgagacctcttttctggactacggcgagaaccttgtgcagaaatggcaggtcctcagcgaagtgctaagttgtagtgaaaagctcgtgtgtcatctgggccgcctggggtcagtctctgaggcaaaggccttctgcctggaagcactgaagttaacaaccaagctgcagatccctcggcagtgcgcactgttcctcgtgttgaaaggggagctggaactggctaggaacgatattgacctttgccagtctgatctgcagcaggtcctgttcttactggagtcatgtactgaatttggcggcgtcacacagcacttagatagcgtgaaaaaggtgcacctgcagaagggcaaacaacaggcacaggtcccatgcccaccacaactgccggaagaagagctatttctgcgcggtcccgccctcgagttagtcgctacagtagcaaaggagcccggcccaatcgcacccagcacgaatagtagccctgtcctgaaaacaaagcctcagcccatcccaaactttctctcccactccccaacttgtgactgctcactgtgcgcttcgcccgtacttaccgccgtttgccttcgctgggtgctggttacagctggcgtaagacttgcaatgggacaccaggcacaaggcctggatctattacaggtagtccttaaaggctgccccgaagccgcggagcgcctaactcaggccttgcaggcaagtctgaatcacaaaacccccccaagcctcgtgccaagtcttttggatgaaatcctcgctcaggcctacacattgctagcattggaggggctgaaccaaccaagcaacgaatctctccaaaaagtgctgcagagcggactaaagttcgttgccgcaagaatcccacacttagagccttggagagccagccttctgctgatttgggccttgaccaagctggggggcctgtcttgctgtactactcagcttttcgcatcttcctggggttggcagccccctcttataaagtccgtgccgggttctgaaccctcaaagacacagggacagaagcggagcgggagaggcagacagaagctggcttccgccccccttcggctgaataacacatctcaaaaaggcctcgaaggtagaggcctgccgtgtacaccgaaaccccccgacagaattaggcaggcagggcctcacgtgccattcacagtgttcgaagaggtgtgccctaccgagtccaaacccgaggtcccacaagcccctagagtgcagcagagagtgcagactaggcttaaagtaaatttttcagatgatagcgatctggaggatcctgtttcggctgaggcctggctggccgaagaacctaagagaagaggaacagcctctcggggccgcgggagagcacgaaagggactgtccctgaaaacagatgccgtcgtagcacccgggtctgccccgggcaatcccggactaaacgggaggagtaggcgcgccaagaaagttgcgtcgagacactgcgaggaacgccgcccacagagagcctcagatcaggcccggccgggccctgaaattatgcgcacaatccccgaagaagagctgactgacaattggagaaaaatgagctttgagatccttcgtggctccgacggggaggatagtgcgtccggcgggaagactccagcccctggtccagaagcagcttctggcgagtgggagctactgaggttagattcttccaaaaaaaaactcccttcaccttgccccgataaggaatccgataaggacctgggcccgcgcttaagactacctagcgctcccgtggcaacaggcctaagcacactggattctatctgcgactcactctcagttgctttcaggggcatttcccattgcccccctagcggactgtatgctcatctgtgccgcttcctcgccctctgtctgggccacagggatccctatgccacagcatttctcgtgacagagagtgttagcatcacttgccgtcatcaactgctcacacacttacaccgtcaactgtcaaaggcccagaaacatcgtggctctctcgaaatcgccgatcagctgcagggactttccttacaggagatgcccggggatgtgcctttggctagaatccagcggctgtttagttttagagctcttgagtctggccacttccctcagcccgaaaaggagtccttccaggagagacttgctttgatcccctctggcgtcactgtgtgtgttctcgcactggcaacgttgcagcccgggaccgttggcaataccttgctgctgacacgccttgagaaggacagtccaccagtgtccgtgcagatccccactggccaaaacaagttgcaccttcgatctgtcctcaatgagtttgacgccattcagaaagctcagaaggaaaactcaagttgtaccgataagcgtgaatggtggaccgggcggttggccttagaccacaggatggaggttctcatcgcatccctggagaagtctgtgctcggctgctggaagggtctgctgctgcctagctccgaggaacctgggccagcccaggaggcatcaaggctgcaagagctgctccaggattgtggttggaagtacccagatcgcactctgcttaagatcatgctgtctggcgcaggcgctctgaccccacaggacatacaggctcttgcctacggcctttgtcccactcagcccgagagggctcaggagcttctgaatgaagctgtcggaaggctccaggggttgaccgtgccctcgaactctcacctagtgttagttttagacaaagatcttcagaaactgccgtgggagagcatgcccagcctgcaggcccttccagtaaccaggctgccatcctttcgcttcctgctgagttatagtatcattaaggaatatggcgcttcaccggttctttcacagggtgttgacccacgttctacgttctacgtgctgaaccctcacaacaatctgtcgagcacagaggagcaattcagggccaactttagttctgaagcaggttggcggggggttgttggcgaggtaccacgacccgaacaggttcaggaggccctgacgaagcacgatctctacatctatgcaggccacggcgccggcgcccggtttttggacggtcaggcagtgcttcggttgtcttgcagggctgtggccctcttattcgggtgtagctctgccgcccttgctgtcaggggcaaccttgaaggagcaggcatcgttcttaagtacataatggccggctgtccactattcctggggaacctttgggacgttactgatcgcgacattgataggtatacagaagcactgcttcaaggatggctgggggccgggcctggcgctcctcttttgtattatgtgaatcaggcacgacaggccccccgcctcaaatatctaatcggcgcagctcccattgcttatgggcttcccgtgtctctgcggtag

SEQ ID NO: 173721 - DNA, 6363 bp, Artificial Sequence
  derived and/or modified sequence
atgaggagtttcaaacgggtgaactttggtaccctactgtcaagtcagaaagaagctgaggagctgcttccagccctgaaggagtttctgagcaacccgcctgccggatttcccagctctaggagtgacgccgaacggcgtcaggcatgtgacgcgatactgagagcttgcaaccagcagctaaccgccaagcttgcctgtcctcgccatcttggctcactcctggaactcgcggagctcgcctgtgacggttatctagtcagtacgccccagcgcccacccctctatttggaacgcatcctctttgtacttctcagaaatgcagctgcccagggatctcccgaagctacacttagactggctcagcctttgcatgcttgccttgtgcaatgctctcgggaagcagcgccccaagattacgaagctgtagctcggggaagcttttctctcctgtggaagggggctgaggccctcctcgaacgcagagcagccttcgcagcccgcctaaaggccctgagtttcctcgtattgctggaggatgaaagcacgccatgtgaggtgccccattttgctagtcctaccgcctgccgggccgtcgcagctcaccaactgttcgatgcctccgggcacggacttaacgaggcagacgctgattttcttgatgacctcctgagccgacatgtgattcgggccttggtgggagagcgtgggtcaagttcaggactgctcagcccccagcgcgccttgtgtttacttgaactgacactcgagcattgccgtagattctgttggtcaagacatcacgacaaagctatctccgccgttgaaaaggcccacagctaccttcgtaataccaatctggctcccagcctccagctgtgccagctaggcgtcaaactgctgcaggtgggggaggaaggaccgcaggctgttgccaagctgctcatcaaggcatccgccgtcctctccaaatctatggaagccccctccccgccgctgagagctctgtatgagagctgccagttcttcttaagtgggctggagcgcggcaccaaacgccgatatcggctggatgccatcttgtcacttttcgcattcctcggcggatactgctctctccttcagcagcttcgtgacgatggagtctacggcggcagttccaaacagcaacaatcttttctgcagatgtactttcaggggttacacctttacacggtggttgtctatgacttcgctcagggatgtcagattgtggacttggccgatttaacgcaactggtggactcatgtaagtctaccgtggtgtggatgctggaggccctggaggggcttagcgggcaagagcttactgatcatatgggaatgaccgcaagctacacaagcaatcttgcatacagtttctatagtcataaactctatgcagaagcatgcgccatctctgaaccactttgtcaacacctgggcctggtcaagcccggaacatatcctgaagtaccacctgaaaaactacatcgttgctttaggctccaagtcgaaagcttgaagaagctcgggaaacaggctcagggttgtaaaatggtgattctctggctggccgcattgcagccctgctccccagagcacatggcggaaccagtgaccttctgggtgcgggtgaaaatggatgccgcccgagccggggataaggagctacagctgaagacactccgcgattcactgtccgggtgggatcccgagaccctcgcactcctgctcagagaggagcttcaagcctataaagcagtgcgtgctgatactggacaggaacgcttcaatataatttgcgacctcttagaactttcgcccgaagagaccccggccggcgcctgggccagggcaacccacctagtggagctcgcacaggtgctgtgttaccacgatttcacgcagcagacaaattgctcagcactggacgcgattcgagaggccttgcagctgctcgactcggtcaggcccgaagcacaagctcgggatcagctgctggacgacaaggcccaggcactgctgtggctgtacatttgtaccctggaggccaaaatgcaggaaggaattgaacgtgacaggcgggcccaagccccaggcaacctggaggaatttgaggttaatgacctaaactatgaagacaaactccaggaggatagatttctgtattccaacattgcattcaacctggccgctgacgccgctcaaagcaagtgtttagatcaggcattagcactgtggaaggaactgctgactaagggtcaagctcccgcagtgagatgcttgcaacagacagccgcctcattgcaaatccttgctgcactctatcagctggtcgccaagcctatgcaagctcttgaagtactgctgctcctcaggatcgtcagcgagcgtctcaaagaccacagcaaagccgctgggtcaagctgccacatcactcagttacttctaacgctggggtgtccatcttacgcacagctccacctggaggaggcagccagttctctgaagcacctcgatcagacaaccgatacttacctgttgcttagcctgacatgcgacctgttgcggtcccaactgtactggactcaccagaaagtaacgaagggtgtttctctgcttctctccgtattgcgtgaccctgcattacagaagagctctaaggcttggtacctgttgagggtacaagtgctgcagctagtcgccgcctaccttagtttgcctagtaataacctcagtcattccctgtgggagcagctctgtgctcaagggtggcagacccctgaaatcgctctcattgacagccataaactccttcggtccattatcttgctgttgatggggagcgacatcctcagtacacaaaaggcggctgtggagacaagctttttagactatggggagaacctggtgcagaaatggcaggtgctgagcgaggtccttagctgttccgagaagctagtttgtcacctcggccgactagggagtgttagcgaggctaaggcgttctgtttggaggctcttaagcttacaaccaagctccaaattcccagacagtgtgcgttatttttggtgctaaaaggggaactcgagttggcacgcaacgatatagacttgtgtcaaagcgacctgcagcaagtgttatttctgctagaaagttgtacggaatttggaggggttactcaacatcttgattccgtgaagaaggttcatttgcaaaaaggaaaacagcaggctcaagtgccatgcccgcctcagcttccagaagaggagctgttccttagagggccagcactggagctcgtggccaccgtagccaaggagcccgggcccattgcgcctagcacaaattcttcaccagtgctgaaaacgaagccacagcccatccctaactttctgtcacatagtccaacttgtgattgtagtctttgtgccagccctgtgctcacagcagtgtgcctccgttgggttctagtgactgcaggggtccggctggccatgggacatcaggctcaggggctcgacctgttgcaagtagtcctgaagggatgtcctgaggcagctgagaggctcacacaagctctccaggccagccttaatcacaagactccacccagcctcgttcctagtctcctggatgaaattctggctcaagcctacaccctgttagccctggagggtctgaaccagcccagtaatgagtctcttcaaaaagtgctgcagagcgggctgaagtttgtcgccgccagaatccctcacctcgagccttggcgggcctctcttctgctcatctgggctctcaccaagctgggagggctcagttgctgcactacccagctgtttgcctcttcctggggctggcagcccccattaattaaatccgtgcccggttcagagccctcgaaaacacagggacaaaagaggtctggcagaggccgccaaaaactggcgagcgctccacttcgattaaacaatacaagccagaaaggcctggaaggaagaggtctcccgtgtacacctaaaccacccgataggatcagacaagctggcccccacgtgccttttacagtctttgaagaggtttgtcctacagaatccaagccagaggtgcctcaggcccccagggttcagcagagagttcagaccaggctgaaggtcaattttagcgacgactcagacttggaggatccggtgagcgcagaagcttggctggcggaagaaccaaaacggcgggggaccgcgtctaggggacggggcagggcgcgaaagggtctcagtctcaagaccgatgccgttgtggctccagggagtgcgcccgggaatcctggcctgaacgggcgcagcaggcgggcaaagaaggtggcctcacggcattgcgaggagaggcgtccacaacgtgcgagtgaccaggcccggcctggccctgaaattatgcgtacaatccctgaggaagaactgactgataactggagaaaaatgtcattcgagatcctacggggttccgacggagaagacagcgccagcggtggcaaaactcccgcgcccggccccgaagctgcttcaggtgaatgggagttgctgaggctggattcaagcaaaaagaagctgccctccccttgcccagacaaagagagcgacaaggatctgggaccaagactccggcttccatcggccccagtcgccactgggctgagtacacttgattcaatttgtgactctttgtcagtggcgtttcgtgggatatcacattgccccccttccgggctgtacgctcacctgtgcagattcttagccctgtgcttaggacaccgcgacccgtatgcaactgccttcctggtgactgagagcgtgtccatcacctgccggcaccagctactcacacatctgcacaggcagctttcgaaggcacagaagcaccgcggcagcctggagattgctgatcagctgcagggcctgagcctgcaggagatgccaggggacgtgcctctggctcgcatccagcggcttttttcattcagagctctggaaagtgggcactttccccaacctgagaaggagagttttcaggagcgcctggctctaatcccgtccggcgtaacagtctgcgttctggcactggctaccctgcaaccgggaaccgtaggcaacacccttttgttgacgcgcctcgaaaaagatagtccgccagtgagtgttcagattcctaccggtcagaataaattacatctccgcagcgttcttaacgaatttgatgctattcaaaaagcccagaaggagaactcttcctgtaccgataaaagagaatggtggactggacgtcttgctctggaccatcggatggaggtgctgatagccagcctagaaaagtcggttctggggtgctggaaaggcctattactgcccagcagtgaagagccagggcctgcccaggaagcaagcagactgcaggagctgcttcaggactgcgggtggaagtacccagatcgcaccctgctcaagattatgttgagtggtgcaggtgctctgactcctcaggacatacaagctctggcatatggactgtgccctacacagccggagagggcccaggagctgctaaatgaggccgtggggaggttacaggggctaacggttccatcaaattcccacttggtgctcgtccttgataaagacctccagaagttaccatgggaaagcatgccgagcctacaagcactgcctgtcacacgacttccctctttcaggtttttactgtcgtacagcattatcaaggaatatggcgcatctccagtcctgtcccaaggagtggaccccagatcaacattttatgtcctgaatcctcataacaatttgagttccacagaagagcagttcagggccaactttagcagcgaggccggctggcggggggtggttggcgaggtgcctagaccagaacaggtccaagaagcactgacaaagcacgacttgtatatatacgctgggcatggcgctggcgcaagatttcttgatggacaggccgtgctgcgcctgtcttgtcgcgctgtagcgcttctgtttgggtgttctagcgctgcactggctgtcaggggaaacctggagggcgcaggcattgttctaaagtatatcatggctgggtgcccactgttcctggggaacctatgggacgtcaccgaccgcgatatcgataggtatacagaggccctcttacagggatggctgggggccggtcctggtgctccccttctttactatgtgaatcaggctcgacaagctccacgcctgaaatacctgatcggagccgcaccaatcgcatacgggctgcctgtcagtcttcgttag

SEQ ID NO: 173722 - DNA, 5388 bp, Artificial Sequence
  derived and/or modified sequence
atggaagctcctagcccccccctacgtgccctctacgaaagctgccaattcttcctctcggggctggagcgagggaccaaacgccgttacaggctcgacgctattctatctttgttcgccttcctaggaggatactgcagcttgctgcagcaattgagggacgatggcgtctatgggggttccagcaaacaacagcaatcatttctgcagatgtatttccagggtttgcacctgtacacggttgtggtctacgattttgcgcaggggtgtcagatagttgatctggccgacttaactcaactggtcgacagttgcaaatcaaccgtcgtgtggatgttagaagccttagaaggcctgagtggacaggagctcactgatcatatgggaatgacagcctcctatacaagcaacctcgcctacagcttctacagccacaaactgtatgccgaagcgtgcgctatcagcgagcccctatgccagcacttgggattggtgaagccaggtacctaccccgaggtgcctccagaaaaactccaccgctgtttccgtctgcaggtggagtccctgaagaaactggggaaacaggcacagggctgcaagatggttatactgtggctcgcagctctgcagccttgcagtcctgaacacatggctgaacccgttactttctgggtacgagtgaagatggacgccgcacgggctggggacaaggagctgcagctgaagaccttgcgggacagtctatccgggtgggatcctgagaccttggctcttctgctgagagaggagttgcaggcctacaaggctgtgagggcagataccggtcaggagcgttttaacatcatttgtgacttactggagttatcgcccgaggaaactccagcaggagcctgggctcgcgccacccacctggttgagctcgcacaggttctctgttaccacgattttacacagcaaacaaattgttctgcccttgatgcgatcagggaagccctgcagcttttagattcagtcagacccgaagctcaagctagggaccagctcctggacgacaaagcccaagctttgctctggctgtacatctgcaccttagaggccaagatgcaggagggaattgaacgcgatcgacgtgcccaggctcctgggaatctggaggagttcgaagttaatgacctcaactacgaggacaagctgcaagaagaccgattcctgtactccaacatcgcatttaacctggctgcggatgcagcccagtcaaagtgtctggaccaggctctagccctgtggaaggaactcctcacgaaggggcaggcccctgccgtgcgatgtctgcagcagacagccgctagtctgcaaattctagctgcactttaccagctggtcgcaaaacccatgcaagctctggaagtgctcctgctgctccgtatcgtgtccgagaggctgaaggaccactccaaagcggcaggcagctcttgtcatattacccagctgttgctcacactcggatgtccatcatacgcgcagttgcatctcgaggaggcggcaagtagcctcaaacacctggatcaaactacggacacttacctcctgctgagcttgacctgtgatctccttaggtctcagctgtactggacacaccagaaggtgactaagggggtaagcctcttgctgagtgtgctgagagaccccgctctgcagaaaagcagtaaggcctggtatctgttgcgtgtacaagtactccagctcgtggctgcgtacttgtcacttccctccaacaatctgtcacacagcctgtgggaacagctttgtgcccagggctggcagacgcccgagattgcgctgatagactcacataagctgttgcgcagcataatcctcctgttgatgggctctgacatcctttctacccagaaggcagcggtggaaacatcattccttgactatggtgagaatttggtgcagaaatggcaggtcctcagtgaagtgctctcgtgttccgaaaaactagtatgccacctgggaaggctgggctcggtgtcagaggctaaggcattctgtttggaggccctgaagctgaccaccaaactacaaattccccggcagtgtgcattattcctcgtgctgaagggcgaactggagctggctcggaacgatatcgacctatgtcagtcagatcttcaacaggttctgtttctgctggagagctgtaccgagtttggcggcgttacccagcatttggactccgttaagaaggtgcatctgcagaagggcaagcagcaggcccaggtcccttgcccgccacagcttcctgaggaggagctcttcctccgcgggccagctctggagctcgttgccaccgtcgccaaagagcccggcccaattgctccatctacaaactcttccccggttctcaaaacaaaacctcaacccattcctaacttccttagtcattcccctacatgtgactgctccctctgcgcctcgcctgtattgaccgccgtctgcctacggtgggtgctggttactgccggtgtgcggttagctatgggtcatcaggcacagggtctcgacctcctccaggtggtgctcaaaggttgtccagaggcagccgagcggctcacacaggcactgcaggcatctctcaatcataagacgccccctagtcttgtgccttctttgctagacgagatacttgcccaggcatacactctgctggcattggagggcctcaatcagccttccaatgagagtcttcagaaagtcctacagagcggacttaagtttgtggccgcccgaatccctcacctcgagccgtggcgagcaagtcttctgctaatttgggctcttacaaagctggggggactgtcatgttgcactacccagcttttcgcttcttcttggggctggcagcctcctctgataaaatcagtgccagggtccgaaccatctaagacccaagggcaaaaaagatccggcaggggacgtcagaagctagcctccgcccctcttaggctgaataatacctctcagaaaggactggagggacggggcctgccgtgtactccaaaaccacccgatagaattcggcaggccggccctcacgtgcccttcaccgtgtttgaggaggtgtgccctacagagtcaaagccagaagtgcctcaggccccccgtgtgcagcagagggttcagacacggcttaaggtcaatttttctgacgactctgacttggaggatcctgttagcgccgaggcctggttagcagaggaacctaaacgccggggaacagccagccggggaagaggacgggcccgtaaaggtttgtcactaaaaaccgacgcagtagtcgccccaggttccgcgccagggaacccggggctgaacggtcgcagtcgtcgtgctaagaaggtggcatcccgacactgcgaagagagaaggcctcaacgggctagcgatcaagcgcgacccgggcctgaaattatgagaacgattccggaagaagagctgaccgacaactggcgcaaaatgtctttcgagatactgagagggtccgacggcgaagacagcgccagcggaggaaagacaccagcccctggtcctgaagcggcttcaggtgaatgggaactactgcgtctggactcatcaaagaagaaactaccatcaccctgccccgataaggaaagtgacaaagatctgggcccacgtcttcgactcccctcagcgcccgtggcaacaggactttccactctggatagcatttgcgattctctgtccgtcgcgtttagaggcattagtcactgtccccctagtgggttgtacgcccacctgtgtcggtttctcgccctctgtctgggacatcgtgatccgtacgccacagcattcttagtgacggagtctgtgagcattacctgtcggcatcagttactgacccacctgcaccggcagctgtccaaagcccagaaacacagaggaagcctggaaatcgcagaccagctgcaggggctcagcttgcaggagatgcccggagatgttccgctagcaagaatccagcgtcttttttccttcagagccctggagtccggccactttccccagcccgagaaggagtcgtttcaggaacgtctggccctcataccttccggggtcactgtgtgtgttctcgccctggccactctccagcccggcactgtgggaaataccctgctgttgaccaggctggaaaaagactctccccctgtctccgttcagatccctacaggtcagaacaaactgcaccttcgtagcgtcctcaatgagtttgacgctattcagaaagcccagaaggagaattctagctgtacagataagagagagtggtggactgggcgcctcgccctggaccatcggatggaggtgcttattgctagtctggagaagtcggtgctgggatgttggaagggtttgctcttgccaagtagtgaagaacccgggcccgcccaagaagcctcgagactacaggagctgttacaggactgcggctggaagtacccggatcgaactctactcaagatcatgttgtcaggcgcaggcgctctgactcctcaggatatccaggccttggcctacggcttgtgcccaacccagccagaacgcgcccaggagctgctcaacgaggccgtgggacgtctgcagggcctgaccgtgccatctaattcccacttggtattggtgctcgataaagatctgcaaaaactgccttgggaatcaatgcccagtctccaggccctgcccgtcaccagattaccctccttcagattcctgttgtcctactccatcatcaaggagtatggagctagcccagtgctgagccagggtgtcgacccgcggtctaccttttacgtacttaacccgcacaacaatctctcctccacagaagagcaattcagggcgaacttctcttccgaagccggatggaggggcgttgtgggcgaggtacctagacctgagcaggttcaggaagctctcacaaaacacgatctgtacatctacgccgggcacggagccggcgcccggtttctggatggacaggcagtactgcggctttcctgtcgggcagtggccctcctcttcggctgcagttcggcagcccttgccgttcgggggaatctggagggggccggcattgttctgaagtacattatggcaggatgccccctgttcctcggaaatctttgggatgtcacagaccgtgacattgaccggtatactgaagctctactgcagggttggctcggggctggtccaggggcacccctgctgtactacgtgaaccaagcgcgccaagctccacgcctaaagtatcttatcggggcagcccccattgcatatgggctacctgtgtcccttagatag

SEQ ID NO: 173723 - DNA, 6363 bp, Artificial Sequence
  derived and/or modified sequence
atgaggagcttcaagagggtgaactttggcaccctgctgagcagccagaaggaggccgaggagctgctgcctgccctgaaggagttcctgagcaaccccccagctggcttccccagcagcagaagtgatgctgagcggcggcaggcctgtgatgccatcctgcgggcctgcaaccagcagctgacagccaagctggcctgccccaggcacctgggcagcctgctggagctggccgagctggcctgtgatggctacctggtgtccaccccccagaggcctcccctgtacctggagcgcatcctgtttgtgctgctgagaaatgctgctgcccagggcagccctgaggccaccctgcggctggcccagcccctgcacgcctgcctggtgcagtgcagccgggaggccgccccccaggactatgaggccgtggcccggggcagcttcagcctgctgtggaagggagctgaggccctgctggagaggagagctgcctttgctgcccggctgaaggccctgtccttcctggtgctgctggaggatgagagcaccccctgtgaggtgccccactttgccagccccacagcctgcagagctgtggccgcccaccagctgtttgatgccagcggccacggcctgaatgaagcagatgctgacttcctggatgacctgctgagcagacatgtgatccgggccctggtgggggagcggggcagcagcagcggcctgctgagcccccagagggccctgtgcctgctggagctgaccctggagcactgccgccgcttctgctggagccgccaccacgacaaggccatctctgctgtggagaaggcccacagctacctgaggaacaccaacctggcccccagcctgcagctgtgccagctgggcgtgaagctgctgcaggtgggggaggagggcccccaggccgtggccaagctgctgatcaaggccagcgctgtgctgagcaagtccatggaggcccccagcccccccctgcgggccctgtatgagagctgccagttcttcctgagcggcctggagcggggcaccaagaggcgctaccgcctggatgccatcctgagcctgtttgccttcctgggcggctactgcagcctgctgcagcagctgagagatgatggagtgtatggaggcagcagcaagcagcagcagagcttcctgcagatgtacttccagggcctgcacctgtacacagtggtggtgtatgactttgcccagggctgccagatcgtggacctggccgacctgacccagctggtggacagctgcaagagcacagtggtgtggatgctggaggccctggagggcctgagcggccaggagctgacagaccacatgggcatgacagccagctacaccagcaacctggcctacagcttctacagccacaagctgtatgcagaggcctgtgccatcagcgagcccctgtgccagcacctgggcctggtgaagccaggcacctacccagaggtgcccccagagaagctgcaccgctgcttccggctgcaggtggagagcctgaagaagctgggcaagcaggcccagggctgcaagatggtgatcctgtggctggccgccctgcagccctgcagccctgagcacatggccgagcctgtgaccttctgggtgcgggtgaagatggatgctgcccgggccggggacaaggagctgcagctgaagaccctgcgggacagcctgagcggctgggaccctgagaccctggccctgctgctgcgggaggagctgcaggcctacaaggctgtgcgggctgacaccggccaggagcgcttcaacatcatctgtgacctgctggagctgagccctgaggagaccccagctggggcctgggcccgggccacccacctggtggagctggcccaggtgctgtgctaccatgacttcacccagcagaccaactgcagcgccctggatgccatccgggaggccctgcagctgctggacagcgtgcggcctgaggcccaggcccgggaccagctgctggatgacaaggcccaggccctgctgtggctgtacatctgcaccctggaggccaagatgcaggagggcatcgagcgggacagaagagcccaggcccctggcaacctggaggagtttgaggtgaatgacctgaactatgaggacaagctgcaggaggaccgcttcctgtacagcaacatcgccttcaacctggccgcagatgctgcccagagcaagtgcctggaccaggccctggccctgtggaaggagctgctgaccaagggccaggccccagctgtgcgctgcctgcagcagacagctgccagcctgcagatcctggccgccctgtaccagctggtggccaagcccatgcaggccctggaggtgctgctgctgctgagaattgtgtctgagcggctgaaggaccacagcaaggctgctggcagcagctgccacatcacccagctgctgctgaccctgggctgccccagctatgcccagctgcacctggaggaggccgccagcagcctgaagcacctggaccagaccacagacacctacctgctgctgagcctgacctgtgacctgctgcggagccagctgtactggacccaccagaaggtgaccaagggcgtgtccctgctgctgtctgtgctgcgggaccctgccctgcagaagagcagcaaggcctggtacctgctgcgggtgcaggtgctgcagctggtggccgcctacctgagcctgcccagcaacaacctgagccacagcctgtgggagcagctgtgtgcccagggctggcagaccccagaaattgccctgattgacagccacaagctgctgcggagcatcatcctgctgctgatgggcagtgacatcctgagcacccagaaggctgctgtggagaccagcttcctggactatggagagaacctggtgcagaagtggcaggtgctgtctgaggtgctgagctgcagcgagaagctggtgtgccacctgggccgcctgggctctgtgtctgaggccaaggccttctgcctggaggccctgaagctgaccaccaagctgcagatcccccggcagtgtgccctcttcctggtgctgaagggggagctggagctggccagaaatgacatcgacctgtgccagagcgacctgcagcaggtgctcttcctgctggagagctgcacagaatttggaggagtgacccagcacctggacagcgtgaagaaggtgcacctgcagaagggcaagcagcaggcccaggtgccctgccccccccagctgcctgaggaggagctgttcctgcggggccctgccctggagctggtggccaccgtggccaaggagcccggccccatcgcccccagcaccaacagcagccctgtgctgaagaccaagccccagcccatccccaacttcctgagccacagccccacctgtgactgcagcctgtgtgccagccctgtgctgacagctgtgtgcctgcgctgggtgctggtgacagctggggtgcggctggccatgggccaccaggcccagggcctggacctgctgcaggtggtgctgaagggctgcccagaggccgctgagcggctgacccaggccctgcaggccagcctgaaccacaagaccccacccagcctggtgcccagcctgctggatgagatcctggcccaggcctacaccctgctggccctggagggcctgaaccagcccagcaatgaaagcctgcagaaggtgctgcagagcggcctgaagtttgtggccgcccgcatcccccacctggagccctggagggccagcctgctgctgatctgggccctgaccaagctgggcggcctgagctgctgcaccacccagctgtttgccagctcctggggctggcagcccccactcatcaagtctgtgcccggcagcgagcccagcaagacccagggccagaagaggagcggccggggccggcagaagctggccagcgcccccctgcggctgaacaacaccagccagaagggcctggagggccggggcctgccctgcacccccaagcccccagaccgcatccggcaggccggcccccacgtgcccttcaccgtgtttgaggaggtgtgccccacagagagcaagccagaggtgccccaggccccccgggtgcagcagagggtgcagacccggctgaaggtgaacttcagtgatgacagcgacctggaggaccctgtgtctgctgaggcctggctggccgaggagcccaagagaagaggaacagccagccggggccggggccgggccaggaagggcctgagcctgaagacagatgctgtggtggcccctggcagcgcccctggcaaccctggcctgaatggccgcagccggcgggccaagaaggtggccagccgccactgtgaggagcggcggccccagagggccagtgaccaggcccggcccggccctgagatcatgaggaccatccctgaggaggagctgacagacaactggaggaagatgagctttgagatcctgcggggcagtgatggagaagattctgccagcggcggcaagaccccagcccctggccctgaggccgccagcggggagtgggagctgctgcggctggacagcagcaagaagaagctgcccagcccctgcccagacaaggagagtgacaaggacctgggcccccggctgcggctgcccagcgcccctgtggccaccggcctgagcaccctggacagcatctgtgacagcctgtctgtggccttccggggcatcagccactgcccccccagcggcctgtatgcccacctgtgccgcttcctggccctgtgcctgggccaccgggacccctatgccacagccttcctggtgacagaatctgtgtccatcacctgccgccaccagctgctgacccacctgcaccggcagctgagcaaggcccagaagcaccggggcagcctggagattgctgaccagctgcagggcctgagcctgcaggagatgcctggagatgtgcccctggcccgcatccagaggctcttctccttccgggccctggagagcggccacttcccccagcctgagaaggagagcttccaggagcggctggccctgatccccagcggcgtgacagtgtgtgtgctggccctggccaccctgcagcccggcaccgtgggcaacaccctgctgctgacccggctggagaaggacagcccccctgtgtctgtgcagatccccaccggccagaacaagctgcacctgcggtctgtgctgaatgaatttgatgccatccagaaggcccagaaggagaacagcagctgcacagacaagcgggagtggtggacaggccgcctggccctggaccacaggatggaggtgctgattgccagcctggagaagtctgtgctgggctgctggaagggcctgctgctgcccagcagcgaggagcccggccctgcccaggaggccagccggctgcaggagctgctgcaggactgtggctggaagtacccagacaggaccctgctgaagatcatgctgagcggggccggggccctgaccccccaggacatccaggccctggcctacggcctgtgccccacccagcctgagcgggcccaggagctgctgaatgaggccgtgggccgcctgcagggcctgactgtgcccagcaacagccacctggtgctggtgctggacaaggacctgcagaagctgccctgggagagcatgcccagcctgcaggccctgcctgtgacccggctgcccagcttccgcttcctgctgagctacagcatcatcaaggagtatggagccagccctgtgctgagccagggcgtggaccccaggagcaccttctacgtgctgaacccccacaacaacctgagcagcacagaggagcagttccgggccaacttcagcagcgaggccggctggaggggcgtggtgggggaggtgcccaggcctgagcaggtgcaggaggccctgaccaagcatgacctgtacatctatgccggccatggagctggggcccgcttcctggatggccaggccgtgctgcggctgagctgcagagctgtggccctgctgtttggctgcagcagcgctgccctggccgtgcggggcaacctggagggcgccggcatcgtgctgaagtacatcatggccggctgccccctcttcctgggcaacctgtgggatgtgacagaccgggacatcgaccgctacacagaggccctgctgcagggctggctgggcgccggccctggggcccccctgctgtactacgtgaaccaggcccggcaggccccccggctgaagtacctgattggagctgcccccatcgcctacggcctgcctgtgtccctgaggtag

SEQ ID NO: 173724 - DNA, 5388 bp, Artificial Sequence
  derived and/or modified sequence
atggaggcccccagcccccccctgcgggccctgtatgagagctgccagttcttcctgagcggcctggagcggggcaccaagaggcgctaccgcctggatgccatcctgagcctgtttgccttcctgggcggctactgcagcctgctgcagcagctgagagatgatggagtgtatggaggcagcagcaagcagcagcagagcttcctgcagatgtacttccagggcctgcacctgtacacagtggtggtgtatgactttgcccagggctgccagatcgtggacctggccgacctgacccagctggtggacagctgcaagagcacagtggtgtggatgctggaggccctggagggcctgagcggccaggagctgacagaccacatgggcatgacagccagctacaccagcaacctggcctacagcttctacagccacaagctgtatgcagaggcctgtgccatcagcgagcccctgtgccagcacctgggcctggtgaagccaggcacctacccagaggtgcccccagagaagctgcaccgctgcttccggctgcaggtggagagcctgaagaagctgggcaagcaggcccagggctgcaagatggtgatcctgtggctggccgccctgcagccctgcagccctgagcacatggccgagcctgtgaccttctgggtgcgggtgaagatggatgctgcccgggccggggacaaggagctgcagctgaagaccctgcgggacagcctgagcggctgggaccctgagaccctggccctgctgctgcgggaggagctgcaggcctacaaggctgtgcgggctgacaccggccaggagcgcttcaacatcatctgtgacctgctggagctgagccctgaggagaccccagctggggcctgggcccgggccacccacctggtggagctggcccaggtgctgtgctaccatgacttcacccagcagaccaactgcagcgccctggatgccatccgggaggccctgcagctgctggacagcgtgcggcctgaggcccaggcccgggaccagctgctggatgacaaggcccaggccctgctgtggctgtacatctgcaccctggaggccaagatgcaggagggcatcgagcgggaccggcgggcccaggcccctggcaacctggaggagtttgaggtgaatgacctgaactatgaggacaagctgcaggaggaccgcttcctgtacagcaacatcgccttcaacctggccgcagatgctgcccagagcaagtgcctggaccaggccctggccctgtggaaggagctgctgaccaagggccaggccccagctgtgcgctgcctgcagcagacagctgccagcctgcagatcctggccgccctgtaccagctggtggccaagcccatgcaggccctggaggtgctgctgctgctgcgcatcgtgtctgagcggctgaaggaccacagcaaggccgccggcagcagctgccacatcacccagctgctgctgaccctgggctgccccagctatgcccagctgcacctggaggaggccgccagcagcctgaagcacctggaccagaccacagacacctacctgctgctgagcctgacctgtgacctgctgcggagccagctgtactggacccaccagaaggtgaccaagggcgtgtccctgctgctgtctgtgctgcgggaccctgccctgcagaagagcagcaaggcctggtacctgctgcgggtgcaggtgctgcagctggtggccgcctacctgagcctgcccagcaacaacctgagccacagcctgtgggagcagctgtgtgcccagggctggcagaccccagagatcgccctgattgacagccacaagctgctgcggagcatcatcctgctgctgatgggcagtgacatcctgagcacccagaaggctgctgtggagaccagcttcctggactatggagagaacctggtgcagaagtggcaggtgctgtctgaggtgctgagctgcagcgagaagctggtgtgccacctgggccgcctgggctctgtgtctgaggccaaggccttctgcctggaggccctgaagctgaccaccaagctgcagatcccccggcagtgtgccctcttcctggtgctgaagggggagctggagctggccagaaatgacatcgacctgtgccagagcgacctgcagcaggtgctcttcctgctggagagctgcacagaatttggaggagtgacccagcacctggacagcgtgaagaaggtgcacctgcagaagggcaagcagcaggcccaggtgccctgccccccccagctgcctgaggaggagctgttcctgcggggccctgccctggagctggtggccaccgtggccaaggagcccggccccatcgcccccagcaccaacagcagccctgtgctgaagaccaagccccagcccatccccaacttcctgagccacagccccacctgtgactgcagcctgtgtgccagccctgtgctgacagctgtgtgcctgcgctgggtgctggtgacagctggggtgcggctggccatgggccaccaggcccagggcctggacctgctgcaggtggtgctgaagggctgcccagaggccgctgagcggctgacccaggccctgcaggccagcctgaaccacaagaccccacccagcctggtgcccagcctgctggatgagatcctggcccaggcctacaccctgctggccctggagggcctgaaccagcccagcaatgaaagcctgcagaaggtgctgcagagcggcctgaagtttgtggccgcccgcatcccccacctggagccctggagggccagcctgctgctgatctgggccctgaccaagctgggcggcctgagctgctgcaccacccagctgtttgccagctcctggggctggcagcccccactcatcaagtctgtgcccggcagcgagcccagcaagacccagggccagaagaggagcggccggggccggcagaagctggccagcgcccccctgcggctgaacaacaccagccagaagggcctggagggccggggcctgccctgcacccccaagcccccagaccgcatccggcaggccggcccccacgtgcccttcaccgtgtttgaggaggtgtgccccacagagagcaagccagaggtgccccaggccccccgggtgcagcagagggtgcagacccggctgaaggtgaacttcagtgatgacagcgacctggaggaccctgtgtctgctgaggcctggctggccgaggagcccaagaggcggggcacagccagccggggccggggccgggccaggaagggcctgagcctgaagacagatgctgtggtggcccctggcagcgcccctggcaaccctggcctgaatggccgcagcagaagagccaagaaggtggccagccgccactgtgaggagcggcggccccagagggccagtgaccaggcccggcccggccctgagatcatgaggaccatccctgaggaggagctgacagacaactggaggaagatgagctttgagatcctgcggggcagtgatggagaggacagcgccagcggcggcaagaccccagcccctggccctgaggccgccagcggggagtgggagctgctgcggctggacagcagcaagaagaagctgcccagcccctgcccagacaaggagagtgacaaggacctgggcccccggctgcggctgcccagcgcccctgtggccaccggcctgagcaccctggacagcatctgtgacagcctgtctgtggccttccggggcatcagccactgccccccatctggcctgtatgcccacctgtgccgcttcctggccctgtgcctgggccaccgggacccctatgccacagccttcctggtgacagagagcgtgtccatcacctgccgccaccagctgctgacccacctgcaccggcagctgagcaaggcccagaagcaccggggcagcctggagattgctgaccagctgcagggcctgagcctgcaggagatgcctggagatgtgcccctggcccgcatccagaggctcttctccttccgggccctggagagcggccacttcccccagcctgagaaggagagcttccaggagcggctggccctgatccccagcggcgtgacagtgtgtgtgctggccctggccaccctgcagcccggcaccgtgggcaacaccctgctgctgacccggctggagaaggacagcccccctgtgtctgtgcagatccccaccggccagaacaagctgcacctgcggtctgtgctgaatgaatttgatgccatccagaaggcccagaaggagaacagcagctgcacagacaagcgggagtggtggacaggccgcctggccctggaccacaggatggaggtgctgattgccagcctggagaagtctgtgctgggctgctggaagggcctgctgctgcccagcagcgaggagcccggccctgcccaggaggccagccggctgcaggagctgctgcaggactgtggctggaagtacccagacaggaccctgctgaagatcatgctgtctggagctggggccctgaccccccaggacatccaggccctggcctacggcctgtgccccacccagcctgagcgggcccaggagctgctgaatgaagctgtgggccgcctgcagggcctgactgtgcccagcaacagccacctggtgctggtgctggacaaggacctgcagaagctgccctgggagagcatgcccagcctgcaggccctgcctgtgacccggctgcccagcttccgcttcctgctgagctacagcatcatcaaggagtatggagccagccctgtgctgagccagggcgtggaccccaggagcaccttctacgtgctgaacccccacaacaacctgagcagcacagaggagcagttccgggccaacttcagcagcgaggccggctggaggggcgtggtgggggaggtgcccaggcctgagcaggtgcaggaggccctgaccaagcatgacctgtacatctatgccggccacggggccggggcccgcttcctggatggccaggccgtgctgcggctgagctgcagagctgtggccctgctgtttggctgcagcagcgctgccctggccgtgcggggcaacctggagggcgccggcatcgtgctgaagtacatcatggccggctgccccctcttcctgggcaacctgtgggatgtgacagaccgggacatcgaccgctacacagaggccctgctgcagggctggctgggcgccggccctggggcccccctgctgtactacgtgaaccaggcccggcaggccccccggctgaagtacctgattggagctgcccccatcgcctacggcctgcctgtgtccctgaggtag

SEQ ID NO: 173725 - DNA, 6363 bp, Artificial Sequence
  derived and/or modified sequence
atgcggagcttcaagcgggtgaacttcggcaccctgctgagcagccagaaggaagccgaagaactgctgccagccttgaaagaattcctgtctaatcccccagcagggttcccatctagcagatccgacgcagaacgacggcaagcctgcgacgccatcctgcgtgcctgtaatcagcaacttaccgccaagctggcatgccctcggcatctcgggtccctcttggagctcgcggaattggcttgcgatggttacctggtatcaaccccacagagacctcccctgtatctggagcgcatcctttttgtgctcttacggaatgctgccgctcagggttctcccgaagcaaccctccggctagcacagcctttgcacgcctgcctggtacaatgttccagggaggctgctccccaagactacgaggctgtggccagggggagcttctcccttctgtggaaaggcgcggaggcgttattagagagacgtgccgcctttgccgctcgtctgaaggccttgagttttctcgtgctcctagaggatgagtccaccccatgtgaagttcctcactttgcatctcccactgcttgcagagccgtcgctgcacatcagctgttcgatgctagtgggcatgggctaaatgaggccgatgccgactttctggatgacctgcttagtcggcacgtaataagagctcttgtgggagaacgaggaagttcctctggcctgctctcgcctcagagagccctgtgcctgctggagctgacactggaacactgccgcagattttgttggtccagacatcacgacaaggccatttccgctgtcgaaaaggctcacagctatctccggaacactaatcttgcgccctccctacagctgtgtcagctgggagtgaaactcctgcaagtgggcgaggaaggcccgcaggcggtagcaaagctgcttatcaaggccagcgcagtgctcagtaaatctatggaggccccctcccctccgctgcgggctttgtatgagtcctgtcagttctttcttagcgggctggaaagaggcacgaaacggcgatatagattggatgctatcctgtcactgtttgccttccttgggggatactgttcgctattgcagcagttgcgggacgacggagtgtacggaggctcgtcgaaacagcagcagagcttccttcagatgtattttcagggcctgcacctgtataccgtcgttgtttacgacttcgcccaggggtgtcagatcgtggaccttgctgatttgacacagctcgtggacagctgcaaaagcaccgtagtgtggatgctggaggcgctggaagggttgtctggacaggaactaacagatcacatgggaatgaccgcttcctacacatctaacctcgcctattccttttactcccacaaactttatgctgaagcatgtgcaatatcagagccactgtgccagcatcttggcctggtaaagcccggcacgtatccagaggttcccccggagaaacttcatcgctgctttaggctgcaggtcgagagtctaaagaagctgggaaagcaggctcaggggtgcaagatggtgatcctgtggcttgcagctctccagccttgctccccagagcatatggcagagcccgtgactttttgggtgcgcgtcaagatggatgccgccagggccggagacaaggaactgcagttaaaaacacttcgggatagtctgagcgggtgggaccccgagaccctggcactgctgttaagggaggagctgcaagcatacaaggcagtcagggcggacaccgggcaggagaggtttaacatcatctgtgacctgctggaactgagtcccgaggagaccccagctggtgcctgggcacgggccacccatcttgttgagctggctcaggtgctttgttaccacgattttacgcaacaaactaactgcagcgccttagacgccatccgggaagccctgcagttgctggacagcgtaaggccagaagcccaggcgcgagaccagctcctggacgataaggcgcaggccctgttatggctgtatatctgtactctggaagccaagatgcaggaaggaattgaaagggaccggcgagcgcaggctcccggtaatctcgaagagttcgaagtgaacgatcttaactacgaggacaagttgcaggaggacaggtttctgtacagcaatattgcctttaatctggccgctgacgcggctcaaagcaagtgcctggatcaggcccttgctctatggaaggagctgctgactaagggccaggcaccagccgtccgttgcctccagcagactgccgcctctctccagattctagccgccctctaccagctggtggcaaagcccatgcaggccttggaagtccttcttttgctccggatcgtcagtgaaagactcaaggaccactccaaagcagctggaagctcctgccacataacccaactgctgctcactttggggtgtcccagttacgcccagttacacctggaggaagctgcatccagcctgaaacaccttgaccagacaaccgacacgtacctcttgctgagcttgacctgtgatctgctccgtagccaattgtactggacccaccagaaagtcactaaaggggtctcactgctgctgagcgtactgcgggacccggcgctccagaaatccagcaaggcatggtacctgctgcgggtgcaagttctacagttagtggctgcctacctgagcctgccaagcaacaatctgtctcattccttgtgggagcagctgtgcgctcagggttggcaaacccccgagatcgccctaattgatagccacaagctgctacggagcatcatactccttctcatgggcagtgatatcctctccacccagaaggcagccgtggaaacctcttttctggactacggggaaaatctggtgcaaaaatggcaggtgctttccgaggtgttgtcctgttccgagaagctggtgtgccacctgggcaggctgggctccgtaagtgaagcaaaagccttttgtctggaggcgctcaagctgacaacaaagttgcagatacccaggcagtgcgcactgtttctggtcctgaagggcgagctagaactcgccaggaatgatatcgacctctgccagtctgatttgcaacaggtgctgttccttcttgagtcttgcacagaattcgggggcgttacccagcaccttgacagcgttaagaaggtgcacttacagaaaggcaaacaacaggcacaggtgccatgtcccccgcaactgcctgaggaagaattattccttcgtggtccagctctggagctggtggcaaccgtggcaaaggaacctggaccaattgcccctagtactaatagctctccggtgcttaaaaccaagccccaacctatcccgaactttttgagtcacagcccgacctgtgactgctcactgtgcgctagcccagtcctcacagcggtgtgcttgcggtgggttcttgtaactgccggagtcagacttgcgatgggtcatcaggcccagggactggatcttctccaggtcgtactgaagggttgtcccgaagctgccgaacgtctcacccaggcgctgcaagcgagcctgaatcataagacgcccccgtccctcgttccttccctgcttgacgaaatcttagctcaagcatacacattgttagctttggagggcctgaatcagccctctaacgagagtctgcagaaagtcttacagtctggattaaagttcgtggccgctagaatcccacatttagaaccttggcgagccagtctcctgctaatttgggccctgactaagctaggcggattatcttgttgcacaacccaactgttcgcatcaagctggggctggcaacccccactcattaaatccgttcccggctcggagccttccaaaacccaaggacagaagaggagcggccgcggccgccaaaaactggcctcggcaccactgcgactgaacaatacaagccagaagggacttgagggaagggggctgccttgtacccccaagccaccggaccggatacgacaggcagggccccatgttccttttactgtatttgaagaggtatgtcctactgaatccaaaccagaagttccccaagcaccccgggtacaacagcgagtgcagacacgcctcaaggtaaattttagtgacgatagcgatttagaggatcctgtctcagctgaggcctggcttgcagaggagcctaaacgccgtggtaccgcttctcgcggcagaggcagagcgcggaaggggctcagcttgaagaccgatgccgtggtggctcccggaagcgctcctggaaatccgggactgaacggcaggagtcggcgagcaaagaaggtcgcctctcggcattgcgaggagaggcgcccacagcgtgccagtgatcaggctcgccctggccctgaaatcatgcgaaccatcccagaagaagagttgaccgacaactggcgaaaaatgtctttcgaaatcttgcgtgggagcgatggagaggacagcgcaagtggaggtaaaacccccgcgccgggaccggaagcagcatcgggagagtgggaactcctgaggcttgacagtagcaagaagaaactaccttctccatgtcccgataaggaaagcgataaggacctcgggccccggctcagactcccaagcgcacccgtggccaccgggctctcgaccctcgacagtatctgtgatagtttaagtgtggcatttcgcggtatttctcattgtcctccctcaggcttgtatgcccacctctgccggtttctagctctttgcttgggccatcgcgatccctatgctaccgcctttcttgtgaccgaatctgtgtcgatcacatgtcgtcaccagctgctgacacacctccatcggcagctatcaaaggctcagaagcacagaggcagtttggagattgcagatcagctacaggggctgtccctgcaggagatgccgggtgacgtaccattagccaggatccagagactcttttccttccgcgccctcgagtcagggcacttcccccagcccgagaaggaatcctttcaggaacggctagctctgatccctagcggagtcaccgtctgtgtgctggccctggccaccctgcagcccggaactgttggaaacacactacttttaacgagactagaaaaagattcccccccggtttcagtccagatcccgactgggcagaacaagttgcacctgaggtcagtccttaatgaattcgatgccattcagaaagcgcaaaaggagaattctagttgtactgataaaagggaatggtggactgggcgattagcactcgaccatagaatggaggtactgatcgctagcctcgagaaaagcgtgctgggctgttggaagggcctgctacttcctagcagcgaggagcccggccctgcccaggaggcttcccggttacaggaactcctgcaagactgcggctggaagtatccggaccggacactattgaaaattatgttgagtggggcaggagccctgaccccacaggatatacaagcgctggcatatggtctgtgtcccactcagcccgagagggcccaggaactcctgaacgaggccgttggcagactccaggggctgactgttccttctaattcccatttggtactggtcttagacaaggacttacagaaactgccttgggagtcaatgcccagcctgcaggcactgccagtgaccagattaccgagcttcaggtttctcctttcctactccatcattaaggaatacggagcttcacctgtgctgtctcagggggtcgaccctcgcagcacattctacgtgctcaatcctcataacaacttgagctctacagaggagcagtttcgggctaacttcagcagcgaagccggttggcgtggcgtcgtgggggaggtacctcgccctgagcaggtgcaggaggccctcacgaagcatgatctctacatttacgcgggtcatggtgcgggggctcgctttctggatggtcaagccgttctgaggctttcttgcagggctgtggccttactttttgggtgttcttccgccgccctggccgtccgcggcaacttggagggtgccgggattgtgcttaagtacattatggctggctgccctttattcctcggaaatctgtgggacgtcacggacagggatatcgatcgttatacagaggcgctcttgcaaggctggctgggtgcaggtccgggcgcccctctgctctactacgtcaatcaagctcgccaggcccctaggctaaaatatctgatcggagcagctccaattgcctacggattgccagtgagtctgaggtag

SEQ ID NO: 173726 - DNA, 6363 bp, Artificial Sequence
  derived and/or modified sequence
atgcggagcttcaagcgggtgaacttcggcaccctgctgagcagccagaaggaggccgaggagctccttcctgctctcaaggagttcctgtctaaccctcctgccggttttccaagctcacgcagcgatgccgaacgccgccaggcttgtgacgcaattctgagggcatgtaatcaacagctgaccgccaagctcgcatgtcccaggcacctcggaagtctgcttgaactggctgagcttgcctgtgacgggtacctcgtgagcactccacagcggcctcccctttacttagaacgaatcctattcgtgttacttagaaatgctgcagcacagggttcgcctgaggccactttgcgtctggcccagccactccacgcgtgcctggtgcagtgctcgagagaagccgctccacaggactatgaggctgtggctcgggggtcattctccctgctttggaagggtgccgaggccttacttgaacgtcgggcagcttttgccgcgcggctgaaagctctgagttttctggttctgcttgaggatgagtccaccccttgtgaggtgcctcatttcgcgtcacccacagcctgcagggcggtggctgctcaccagctttttgacgctagcggtcacggcctgaatgaagctgatgctgatttcctggacgacctactcagtcgtcacgtcatacgcgctctggtaggcgagcggggctcttcctcgggtctgctgagtcctcagcgagctctgtgcctcctggagttgacgcttgagcattgtcggaggttctgctggtcccgccaccacgacaaggctatttccgcagtggagaaagctcactcatatctcagaaatactaacttggcaccttcgctccagttgtgccaactgggcgtgaagctcctacaagtcggtgaggaagggccccaagctgtggctaagctacttatcaaggccagcgcagtactgagcaagtctatggaggccccttccccacctctgcgggccctctatgagtcttgccagtttttcctaagcggcttggagcgagggaccaagaggaggtaccgcctcgatgctatactgtcactgtttgcctttctcggcggctattgtagtctgctgcagcagctccgggacgacggtgtgtacggagggtctagcaaacaacagcagtcattcctacagatgtattttcaggggttacacttatacaccgtggtggtgtacgattttgcacaggggtgccaaattgtggacctcgctgacttgactcagcttgtagacagctgcaagtcaacagtggtgtggatgctcgaagcactggagggattaagtggccaggaacttacggaccatatgggcatgaccgctagctacacctcgaatcttgcttacagtttttactctcacaagctgtacgccgaagcttgcgccatttctgagccgctatgtcaacaccttgggctggtaaaacctgggacctatccagaagtgcctccagaaaagctccacagatgcttccgactacaggtggagtcgctgaagaaactcgggaagcaggcacagggctgcaaaatggtgattctctggctcgccgccctgcaaccctgctcacccgagcatatggctgaacctgttacattttgggtgcgggtgaaaatggacgccgcccgagccggggacaaggaactccagttgaaaaccctgagggattctctgagcggctgggaccctgagacactcgctcttctcctcagggaagaacttcaagcatataaggccgtgcgagcagataccgggcaggaaagattcaacatcatttgtgacctgctggaattatcacctgaggaaacccccgcaggcgcgtgggctcgtgcgacacacttagttgagttggctcaggtactctgctaccatgattttacacaacagacaaactgcagtgccctggatgcaatccgggaggctctccagctgttggacagtgttcggcccgaggcccaggctcgggatcagctcctcgacgataaagcacaggcacttctgtggttatacatttgcacactggaggcaaagatgcaggagggcattgagagggaccgccgggcacaggctccaggtaacctcgaggagttcgaagtgaacgaccttaactatgaggacaagctgcaggaggacagattcttgtattcaaatatcgcattcaacttggctgcggacgccgcacagtccaagtgcttagatcaggccctcgctttatggaaggaactcctgactaagggccaggcacccgcagtgaggtgcctccagcagactgccgctagcttgcagatccttgcggcactgtatcagttggttgctaagccaatgcaggccctggaggtgcttctcctgttgcggatcgtgtccgaacggctcaaagatcatagcaaagccgccggcagctcctgccacattacccaactgcttttaactctcggatgccctagttacgcccagttacacctagaggaggcagcctcgagccttaaacacctagaccaaacaactgacacctatctgcttctctcgttaacctgcgatctactcaggagtcagctatactggacacaccagaaagtgacgaagggcgtgagtctgctactgagcgtgctgcgggacccggcgctccagaaatcttctaaagcctggtacctattacgggtccaggtcttacaactggtggcggcctatttgtccctacccagcaataacctatcccatagcttgtgggagcagctatgcgcacaggggtggcagacacctgagattgcccttatcgattcccacaaactgctgcggtctataatcctgctgctgatggggtccgatatcttaagtactcaaaaggccgctgttgagacatcctttctcgattatggggagaaccttgtccaaaagtggcaggtgctctccgaggtcttgtcctgctccgaaaagcttgtgtgccatttggggcgactgggtagcgttagtgaagccaaggcgttttgtttagaagctctgaaactgacaactaagttgcagatcccacggcagtgcgcattattcctcgtccttaagggagagctcgagctggcaaggaacgatatcgatctttgtcaatccgatctgcagcaggtgctattccttcttgagtcctgcaccgaatttggtggggtaacgcagcatttagattccgtcaagaaggtccaccttcagaaaggcaaacagcaagcccaggtaccatgtccccctcaactcccagaagaagaattgtttttgaggggaccagctctggagttggttgctactgtcgccaaggagccaggtcccattgcaccttcaactaacagctccccagtgctaaagactaagccacagcccatccccaattttctgtcccactcaccaacctgcgactgtagcctgtgtgcatcccctgtcctgaccgctgtctgcctgcgttgggtgttggtaactgctggggtgcgtcttgccatggggcaccaggcccagggtctggaccttctccaggtggtgttaaaaggctgtcctgaggccgcagaaaggttaactcaggcattacaggcgtccttaaaccacaaaacccctcctagccttgtcccctccctgctggacgagattctcgcacaggcttacactttattagcactcgaggggctgaaccagccttcaaacgagagcctacagaaagtgctgcagagcggccttaaatttgtggcagcacggatcccacacctggagccctggagagctagcttgctgctcatctgggcactcacaaaactgggcggtctttcatgttgcactacccagctgttcgcctcctcttggggctggcagccgccgctgatcaaatctgtccctgggtcagaaccctctaaaacacagggacagaaacgatccggcagggggcgacagaagttagcatccgcccccctgcggttaaataacacctcacaaaagggcctcgaaggaagagggttgccctgcaccccaaaaccccccgaccgcattagacaggccggcccccacgtgccgtttacagtgtttgaggaagtgtgtcctaccgagtctaagcctgaagtcccccaggcgcccagagttcagcaaagggtccagacccggctgaaagtaaacttctcggatgattcagatctcgaagacccggtgagcgccgaggcatggttggctgaggaaccaaagaggcgcggaaccgcatcacgcgggcgagggcgggcgaggaagggactgtccttgaaaacggacgccgttgtggcccccggctcggctcctggtaatcctgggctgaatggccggtctagacgggcaaaaaaggtggcttctcgtcactgcgaggaacgtaggccccaacgagcgtcagaccaggcccgccctggcccagagatcatgaggactattccagaggaagaactgaccgacaattggagaaagatgtcgttcgaaattctgagaggaagcgatggggaagatagcgcctccggcgggaaaactcctgctccaggacctgaggctgcgtctggcgagtgggaactgctgcggctggactcctcgaaaaaaaaattaccatccccctgtccagacaaggagtcagacaaagacttaggaccgagactgcggctacctagcgcccccgtggcaacaggtttatctactcttgactcaatctgcgattcactgtctgtagcatttagaggcattagtcactgcccccccagcggattgtacgctcatttgtgcagattcctggccctatgccttggacaccgggacccctatgctacagcattcttggtgaccgagagcgttagtataacgtgtcgtcatcagctccttactcacctgcatagacaactgtccaaagcacagaaacatcgtggatctctggagatcgcagatcagttgcaaggactgagtctacaggagatgcctggggatgttcccctggcccgcatacagagactgtttagctttagagcccttgaaagcggccactttccgcaaccggagaaggagtctttccaggaacggctggcgctgatcccctccggcgttacggtatgcgttttagcgttagcaacactccaaccggggaccgtcgggaacacgctgctactcacaagattggagaaagattctcctcctgtgagcgtgcaaatcccaactgggcaaaacaaactgcatttgagaagcgttctgaacgagtttgatgcaattcaaaaggcgcaaaaggagaactcatcctgcaccgataagcgggagtggtggacaggtagattagcgctggatcaccgaatggaggtgcttattgcttccctagaaaagtctgtgctggggtgttggaaaggccttctgctgccaagctcagaggaaccgggccctgctcaggaggcatccaggctccaggagttgttacaggattgtggctggaagtaccccgaccgcacactcctcaaaattatgctctccggtgcaggggctctgactccacaggacattcaggcattagcatatggactctgtccaactcagcccgaacgagcacaagagttgctaaacgaggctgtggggcgcctgcaaggacttactgttccatcgaacagccacttagtgctggtcctggacaaggacctccagaaactgccctgggaatcaatgcccagtctccaggcattgcccgtgacccggctccctagcttcagattccttctaagctattccattatcaaggagtatggcgccagccccgtgctgagtcagggcgtcgatcctcggtccacattctatgtgctgaatcctcacaataatctcagtagcaccgaggaacagttcagagccaactttagcagcgaggccggttggcgaggtgtggttggcgaagtgcccagacccgagcaggtgcaagaggccctgactaagcacgacctgtatatatacgctggccatggcgccggagcccgattcttggacggccaagctgtgctgcgtttaagttgccgggcggtggccctcctcttcgggtgttctagcgccgccctcgcagttcgggggaacctggaaggcgctgggatagtgctcaagtatataatggcagggtgtcccctatttctaggcaacctctgggatgtgacggatagggacatcgatcggtacactgaggccctgcttcagggatggctcggggccggacccggcgctccactcctatattatgttaaccaggctagacaggcccccagattgaagtatctcatcggagccgcaccaatagcttatggacttcccgtaagcctgcgctag

SEQ ID NO: 173727 - DNA, 5388 bp, Artificial Sequence
  derived and/or modified sequence
atggaggcccccagcccccccctgcgggccctgtacgagagctgccagttctttcttagtggccttgagagggggactaaacgaaggtaccggctggatgccattctgagtctgttcgcatttttgggtggttattgcagcctgctgcagcaactgcgggatgacggcgtttacgggggatcttcaaaacaacagcaatctttcctccaaatgtactttcagggccttcacctatatactgtggtcgtctacgatttcgcgcagggctgccagattgtcgaccttgccgacctgactcagctggttgacagttgcaagagcacggtagtgtggatgctagaggctctggaaggcctgtccggtcaggagttgacagatcacatggggatgactgcttcttatacttcgaacttagcttatagtttctactcccacaagctctatgccgaagcctgtgctatctctgaacctctgtgtcagcacctaggtctcgtgaaaccgggaacatacccagaggtgcccccagagaaattgcaccgctgttttcgacttcaggttgagagtttaaaaaagctcgggaagcaggctcagggctgtaagatggtgatactatggctagccgccctgcagccctgctctccagagcacatggccgagcctgtgaccttctgggtaagggttaagatggacgccgccagggctggagataaggaattacagttgaaaacgcttcgtgattcattgtcgggttgggaccccgagaccctagctctcctgcttcgcgaggaactccaggcctataaagccgtccgagcagacacgggccaagagcgtttcaatatcatctgtgaccttctcgagctctctccagaagagactccagccggagcttgggcccgcgccacacaccttgttgaactggcccaggtcctctgttaccacgattttactcagcaaaccaactgttcagctcttgacgcaatccgcgaagctctgcagctgctggacagcgtgcgacctgaggcccaggcacgggaccagttgctggacgataaagcacaggccttactgtggctttatatttgcactctggaggccaagatgcaagagggtattgagagggatcggcgggcacaagctccgggtaatcttgaggagttcgaagtcaacgacctaaattatgaggacaaactccaagaggaccgttttttgtactcgaacattgctttcaacttggcggccgatgccgcacaatccaaatgcctggaccaagccttagcactgtggaaggagcttctgacaaaaggtcaggcccccgcggtccgttgcctgcaacagacagccgcatccctgcaaatcctggcagctctgtaccagttggtggcaaagccgatgcaggccctggaggtcttgctgctgctgcgtatcgtgagcgagagactgaaagaccacagtaaggcagcaggcagcagctgtcacataactcagcttttactcacgctgggctgtccatcttatgcccagctccacctggaggaggcggcatcttccttgaaacatctcgatcagacaaccgatacctacctgcttttgtctctgacctgcgacctactccgctctcagctctactggactcatcaaaaggtgactaaaggggtatcgctgctgctcagcgtcctccgggatcctgctctgcagaagtcttctaaagcttggtatctcctccgggtgcaagtactccagctggttgccgcatacttgtctctaccaagcaataatttgtctcacagcctgtgggagcagctctgcgcgcaggggtggcagacaccggagattgctctgatcgatagtcacaagttgcttaggagtatcattctcctactgatgggaagtgatatcctatcgacccagaaggccgccgtagagactagtttcctggactatggagaaaacctggtccagaagtggcaggtcctgtctgaggtcctgagctgttcagaaaagctggtgtgccacctggggcgcctgggatccgttagtgaggcaaaggcattttgcttagaagctctgaagcttacaacaaaactccagatcccccgtcagtgtgccctattcctcgtgttgaagggtgaacttgagctggctcggaatgacattgatctctgtcagtcagatctgcagcaggtactgtttctactggaatcctgcaccgaattcggcggagtgacacaacacctggattccgtgaagaaggtccacttacagaaaggcaaacaacaggcccaggtgccttgtcctcctcagctaccagaggaagagctgttcctgcgcgggcccgcactggaactggttgccacagtggccaaggaacctgggcctattgccccaagcaccaactcaagtcccgttctgaagacaaagccacagcctattccaaactttttgagccactcaccaacctgcgactgttccttatgtgcttcccccgtgctgactgcggtctgtctgcgctgggtgctagtcacggcaggagtgcgcctggctatggggcaccaggctcaggggctggacctccttcaggtggtcctcaaaggctgcccagaggccgctgagaggctgacccaggctttgcaggccagtcttaaccacaagacgcctccatcgctggtgcccagcctgttagatgaaatactggcccaggcttacactttgctggcactggaggggttaaaccagccatccaacgaaagtctgcaaaaagtgctgcagtccgggctcaaattcgtggctgcacgaatcccccatcttgaaccttggcgtgcgtctttgctgctgatttgggcattgacaaagctggggggactgtcatgctgcaccacgcaattgtttgcgtcttcttggggctggcagccgcccctcatcaaaagcgtgcctgggtccgaaccttctaagacccagggccagaagaggtccggccggggccgacaaaagctggcctccgcacctctcagactgaataatacttctcagaagggtctggaaggccggggacttccttgcaccccaaagccacccgatcgaatcaggcaggcaggaccacatgtgcctttcacagttttcgaagaggtgtgcccaaccgagtcaaagcccgaggtcccgcaggcacctcgggttcagcagagggtgcagacaagactaaaggtgaattttagcgatgatagcgacctggaagatcccgtgtctgccgaggcttggctcgccgaggagcccaaacgccgtggcaccgcctcccgagggcgcggccgggctagaaaaggcctgtcactgaagaccgacgccgttgtggcaccaggcagtgctcccggaaaccctggcctgaacgggcggagtcgacgggctaagaaagtagcgagcagacactgcgaagaacgaaggcctcagagagccagcgaccaggcaaggcccggccctgagatcatgcgcactattcccgaagaagagttgactgacaattggaggaaaatgtcttttgaaattctgagaggcagcgacggtgaagattccgccagtggaggcaagacgcctgcacccgggccggaagccgcctccggcgaatgggaattactgcgccttgactctagcaagaaaaagctcccatctccatgtcccgacaaggaatccgataaggaccttgggcctcgtctgcggctaccttctgccccagttgctaccggtctgtccaccctcgacagtatttgcgattccctgtctgtggcgttccggggcatttcacattgtccccctagcggtctgtatgcccacctctgccggtttctcgccctctgtttaggtcatagggatccttacgcaactgcttttctggttacagaatcggtgagtataacttgtcggcatcaattgctgactcatctgcaccgccagctcagcaaagcccagaaacaccgcgggtctcttgagattgctgaccagctacagggattgtccttgcaggaaatgcctggcgatgtccctctggcacgaattcaaagactgttcagttttagagccctggaaagcgggcatttcccccaacccgaaaaggaaagtttccaagaacgtctcgccttgatcccttctggcgtgacagtgtgtgtactggccctggctacactgcagcccggcaccgtgggtaatacactgcttcttacaagacttgagaaagactctcctcccgttagcgtccagatcccaaccggccagaacaagctccacttgaggtcggtgctcaacgagttcgacgccatccagaaggcccagaaagagaatagttcatgtacagacaagagggaatggtggacaggccggttggcactcgatcatcgcatggaggtgctgatagcaagcctggaaaaaagcgtgcttggctgctggaaggggctgcttttaccatctagtgaggaaccaggcccagctcaggaggcatccaggctgcaggagctgcttcaggattgcgggtggaaatatccagatagaaccttgctgaagataatgctgtctggggccggcgcacttacaccccaggatatccaggctcttgcatacggcttgtgccctacacagccagagagggctcaagagctcctgaacgaagccgttggcagactgcagggccttacagtgccttctaactctcatctcgtcctggtcctcgacaaggacctgcagaagctcccctgggaatccatgccttcactgcaagctctgcctgtcacccgcttaccatcattcagattcctcctctcctatagtatcattaaggaatacggggcctcacccgtgctgtctcagggtgtggatccaagatctacattctacgtgctcaatcctcacaataatttgtcgtccaccgaggaacagtttcgtgctaatttctccagtgaggctggctggcggggcgtggttggggaagtccccagacccgaacaggtgcaggaagcccttaccaagcatgacctgtatatctatgccggccatggtgctggggcaagatttctcgatggacaggcggtcttacggctgtcctgccgggccgtagcccttctgttcggatgctctagcgcagctctggcagttcgaggaaacctcgaaggcgcaggcatagtgcttaagtacatcatggccggctgtccattgttcctgggaaatctgtgggatgtgaccgaccgagatatcgataggtacactgaagctctgctgcagggatggctgggtgctggtcccggagcacctctgctctactatgtaaatcaggccaggcaggcccctagactaaagtatctgattggtgccgcgcctatagcctacggcttacccgtgagcctgaggtag

SEQ ID NO: 173728 - DNA, 6363 bp, Artificial Sequence
  derived and/or modified sequence
atgcgctcatttaagagagttaactttggtactctgctgtccagtcaaaaggaggctgaggaactgctgcccgctctgaaagaatttctgagtaatccccctgccggtttccctagctctcggtccgacgctgaacggcgtcaagcctgcgacgcaatcctccgtgcttgtaatcagcagttgacagctaaacttgcctgccctagacacctcggttcactcctcgaactcgccgaactggcgtgcgacgggtatctggtgtctacccctcagagaccaccattgtacctggagcgcatcctgtttgtgcttctaagaaacgccgctgctcaaggctcacctgaggccacactgcgcctagcacagccactccatgcttgcttggtgcaatgttcaagggaagcagcaccgcaagactacgaagcagtcgctcggggaagcttttcattactttggaagggcgctgaagctctgttggagcggagagctgcattcgctgcgaggctgaaagcattgagtttcttagtattgctcgaggacgagagcacaccgtgcgaagtgcctcattttgcatctcccaccgcctgccgggctgtggctgctcatcagcttttcgatgcaagcggacacggactaaatgaggcggacgcagacttcctggatgaccttctctcccgccacgtcattcgcgcactcgtaggcgaacgtggtagttctagcgggctattaagcccccagcgcgcactgtgcctgctcgagttgacattggaacattgccggaggttctgctggtcaaggcaccacgacaaagccatctccgccgtggagaaggcacacagctatctcaggaataccaatctcgccccttcccttcagctttgtcagctgggtgtaaaactgctgcaggttggagaggagggaccgcaggctgtcgccaaactgcttattaaggcttccgcagtcctcagcaagtcaatggaggcccctagcccccctctgcgggctctgtatgaatcttgtcagttttttctgtccggtctggagagagggacaaagagacgatatcggctggatgccatcctgtctctcttcgcctttctaggtggttattgtagcctcctgcagcagttgagagatgacggcgtatacggcggaagtagcaagcagcagcagtcttttctgcaaatgtatttccaaggcctacacctgtacacagtagtggtctatgactttgcccagggctgccagatcgttgacctggctgacctgacacaactggtggatagttgcaaatcgactgtcgtttggatgctggaagcactggagggcctctctggccaggagctgaccgaccacatgggcatgacagctagttacacttcgaacttggcctactctttttactcccataagctgtatgccgaagcctgtgccattagcgagcctctttgtcagcatctcggactagtcaaacccggaacatatccagaagtgccaccggaaaagcttcatcgatgcttcaggctacaggtcgagtcactcaaaaagctgggcaaacaagctcagggttgcaagatggtaattttgtggcttgccgcacttcagccgtgcagcccagaacatatggctgagccggttactttctgggtcagagtcaagatggatgccgctagggctggagacaaagagctgcagttaaaaactttgcgcgacagcctgagcgggtgggacccggagaccttagctctgctattgagagaagagttacaagcctacaaagctgtgagggccgacacaggtcaggagaggtttaatattatttgtgatttattggagctgagccctgaggagacccccgcaggtgcttgggctagggccactcacctggtcgaactggcacaggtgctgtgttaccatgacttcacccagcagaccaactgctctgcattggatgcaattagagaggccctgcaactcctagattccgtaagaccagaagcgcaggctagggatcagttgctcgatgataaggcccaggcccttctgtggctgtacatttgcaccctggaagctaaaatgcaagaaggcatcgagcgggaccgccgagcacaagctcctggaaatctagaggagtttgaagtgaacgatctgaattacgaggataaactccaggaagacagattcctgtattctaatatcgcatttaacctggcagccgacgctgctcagagtaaatgcctggatcaggctcttgccttgtggaaggaactgttgacgaaaggtcaagcccctgccgttagatgtctgcagcaaactgctgcctcgcttcagatcctggccgcactgtatcagctggtggctaaacccatgcaggccctcgaggtattgttgttgctaagaatcgtaagcgagagactcaaggaccactcaaaggctgctggttcctcttgtcacattacacagttactgcttacactcggctgcccatcgtacgcacagcttcacctggaggaagctgcttcatccctgaaacacctggaccaaacaacagacacctacttgctgctgtccctgacatgcgacctgctccggtcccagctctattggacccaccagaaagtcactaaaggcgtgtctcttctgttaagtgtgctccgtgatccagcattgcagaagtcaagcaaagcatggtaccttctccgcgtccaggttctccaactggtcgctgcctacctgagcttgccctctaataacctgagtcactctctctgggagcaattgtgcgcgcagggatggcaaaccccggaaattgcactgatagatagtcataaactgctgcggagcataatcttgctgttgatgggctctgacattctatcaacacagaaggctgccgtggaaaccagtttcctagactacggagaaaacctggtacagaaatggcaggtcctcagcgaggtattatcctgctccgaaaagctcgtctgccatctgggacgcctgggcagcgtttccgaggccaaagccttttgtctggaggccctcaagcttacaacaaaactccagattccacgacaatgcgcgttgtttctggttctgaagggtgaactagagctagcgagaaacgatattgatctatgtcagagtgatctgcagcaagtgttgttccttcttgagagctgcactgagtttggcggagtgacccagcatctggacagcgtgaagaaagtacacctccagaaaggaaaacagcaagcacaggtgccttgccctccccagctgcccgaggaggagctcttcttgaggggccctgctttagagctcgtagccactgtggctaaagaacccggacccatagcacctagtaccaactctagccctgtcttgaaaactaaaccccagccaatcccaaattttttaagccactcgcctacttgtgactgttccctctgtgcatcaccggttttgactgcagtctgcctgagatgggtgctggtaaccgcgggagtgcggcttgccatggggcatcaggctcaggggctggatctgttgcaggtcgtgcttaaaggctgtccagaggctgctgaaagactgactcaggcgcttcaggcatcgctgaaccataaaacacctccatctttggtgccctcgttgctggacgagatcttggcccaggcttatacactgcttgcactggagggactgaatcagccaagcaatgaaagccttcagaaggtccttcagagtgggctgaagttcgttgccgcacgcattccacatctggaaccttggagggcctctctgctactgatctgggccctaaccaagcttggtggtctgtcctgctgcacaactcagcttttcgcctcatcatgggggtggcaacctcctttaatcaagtctgtgccaggttccgaaccatccaagacccagggacagaagcgctcagggagggggcgtcagaaactggcgtcagcaccactcagattgaacaataccagccagaaaggccttgagggcagaggcttgccgtgcacgcctaaaccacccgataggataagacaggccggacctcacgttcccttcaccgtgttcgaggaggtgtgccccactgagtccaagcctgaagtgcctcaggcgcctcgcgtgcagcagcgcgtgcagaccagactgaaagttaatttcagcgacgactccgatttagaggacccagtgtctgctgaagcgtggctcgccgaggaacccaagcgaaggggaaccgcctccagaggccgaggtagggccagaaaaggcttaagcctcaaaaccgacgccgttgtggctccagggagcgcaccaggcaatccagggctgaacggtagatctcggcgagcaaagaaggtagctagccgccattgtgaggaacgtcgccctcagcgggctagcgaccaggccaggccaggcccagagattatgcgcacaattccggaggaagagctgaccgataactggcgtaaaatgtcctttgaaattctgagaggctccgatggcgaagattctgccagtggtggaaaaaccccagcccctgggccagaagccgcttctggcgaatgggagttgcttaggctggatagtagcaagaagaaactcccttcgccttgtcccgacaaggaatccgacaaggatctggggccacggctcaggctcccctcagctcccgtcgcgactggactatctactctggactccatctgtgactccttgagtgtagcattccggggtatttcccactgtccaccgtcaggcctgtatgcgcatctgtgccgatttctggccttatgccttggtcatagggacccctacgccacagcttttcttgttaccgaatccgtgagcattacctgtagacaccagctcctcacacaccttcacagacagttatccaaagcccaaaagcatcgcggttccctcgagatcgctgatcaactgcagggattgtcgttgcaggaaatgccaggtgacgtaccactggccaggatccagcgattgttcagcttccgcgctcttgaatccggccactttccccagcccgaaaaggagtcattccaagagagactagcactgatcccctccggcgtgacagtgtgtgtgctagctttagcgaccctgcagcccggtaccgtgggcaataccctcttactcacgagactggagaaggactcgcctcccgtgtccgtgcagatccccaccggccaaaataagcttcacctgcgaagtgtactgaacgagtttgacgccattcagaaggcacagaaggagaactccagttgcaccgataagagagagtggtggactggacggcttgccctggatcatcggatggaagtcctcattgcatccctggaaaagtccgttttgggttgttggaaagggcttctgctaccatcatctgaggagcctggtccagcacaggaggctagcagattacaggagctgctccaggattgtggatggaagtatccagaccgcacactgctaaaaattatgctctctggagcgggtgcactcaccccgcaagatatacaggctctggcctatgggttgtgccccacacagccagagcgggctcaggaattgctcaatgaggctgttgggagactgcagggtctgaccgtgccatctaattcccacctcgtcctcgtgctagacaaggatctgcagaagctgccctgggagtctatgcccagtttgcaggccctgcctgttacaaggctccccagttttcggttcctgctgtcatacagcattattaaagaatacggcgcttccccagttttgtctcagggtgtcgatccacgctctacgttttacgtgctcaaccctcataataacctcagcagtaccgaagagcagttcagagcgaacttctccagtgaagcaggatggcgtggcgtggtgggggaagtgcctcggccagagcaagtacaggaagctttgacaaaacatgacctctatatttacgctggccacggcgctggcgctcgtttcctggatgggcaagctgtgctcaggctgagctgcagggcagtggccctcttatttggctgttctagtgctgcgctggccgtccgaggtaacctggaaggtgccggaatcgtgctcaagtatattatggctggatgtcctctgttcttggggaacttgtgggacgtaactgatagagatatcgaccggtataccgaagccctgctccaaggttggctgggggctggtccaggggcacccctgctgtactacgtgaatcaagctagacaggctcctaggctgaagtatcttatcggcgcagctcctattgcgtatggactgcccgtttcactgcgctaa

SEQ ID NO: 173729 - DNA, 6362 bp, Artificial Sequence
  derived and/or modified sequence
atgcggtctttcaagcgtgtgaacttcggcactcttctgagctcccaaaaggaggcggaggagctcctccccgcactgaaggagttcctgtccaatcctcctgccggtttcccttcgtcccgatccgacgctgagaggagacaagcgtgtgacgcaatcttgcgggcatgcaatcagcaattaacggcaaaactggcatgccctagacatttaggctcgctgctggagctcgccgaactggcatgtgatggataccttgtttccaccccacaacgacccccactgtatctggagagaattctgttcgtgctgctacggaatgctgctgctcaaggaagtcctgaagcgactttgaggctggcgcaacccctgcatgcttgtctcgtgcagtgctccagagaagcagccccacaggactacgaggccgtagccagaggctccttttctctcttgtggaaaggtgccgaagctctcctggaaagaagagccgcatttgcagctaggctgaaggcgctctcattcttagtgctcctggaagacgaatccaccccttgtgaagtcccccatttcgcctcgccgaccgcctgcagagcagtcgcagcacatcagctgtttgatgccagcgggcacggcctgaatgaagcagatgcagattttctggatgacctgctctctagacacgttattcgagcgctcgtaggcgagcggggaagtagctctggactactgtctccgcaacgcgctctgtgtctgctagaacttacccttgagcattgcagaaggttttgctggagccgacatcacgataaggcaataagtgctgtggagaaggctcactcttatttacggaacaccaatctagccccatccttgcagctgtgtcagctgggcgtgaagctccttcaggtgggggaagaaggacctcaggcagtcgctaagctcctgatcaaggcaagtgcggtgctatcgaaatctatggaggcaccttctccacccctgagggctctgtatgagtcgtgccagttttttctttcaggtctcgaacggggaacaaagcgtaggtacagactggatgcaatactgagcctattcgccttcctcggtgggtactgctctttgctgcaacagctgagggatgacggagtttatggcggaagctccaaacaacagcagtcattcctgcagatgtactttcagggtcttcatctgtacactgtagtggtgtatgattttgcgcagggatgtcaaatcgtcgacctcgcggacctgactcaactggtggactcatgtaaatcaaccgtcgtctggatgctggaagcactggagggcctgtctggccaggaactcaccgaccatatgggcatgacagctagttacacctccaatctggcctatagtttctattcacataaattatacgcagaggcttgtgctatctctgaacccttatgccagcatctgggccttgtcaaacctggcacatacccggaggtgcctccggagaaactccataggtgcttccggttacaagttgaatcactcaagaaactgggcaaacaggcacaggggtgcaagatggtaatactgtggctggctgcccttcaaccttgcagccctgagcatatggcggaacctgtgaccttttgggtccgagtgaaaatggacgccgcacgggctggtgacaaagagctgcaactaaaaactctgcgggacagtttatcagggtgggacccagagacactcgccctcttactgcgcgaagaactgcaggcatacaaggccgttcgcgctgataccggccaggaaaggtttaacattatatgtgacctcctcgagctgtctcccgaagagactccggctggggcttgggccagagctacacacttggttgaattggctcaggtgctgtgctatcacgacttcacccagcagacaaactgttctgcattggacgcaatcagggaagctctccagcttctggactcagtgaggccagaggcacaggctagggatcaactcctagatgataaagcacaggccctcttatggctctacatttgcactctggaggcaaagatgcaggaggggatcgagcgcgatcgcagagcccaggctcctgggaacttagaggagttcgaggtaaacgacctaaattacgaggataaattgcaggaggatcggttcttgtacagtaacattgcatttaacttagctgcagacgcagcccagtcaaagtgtttagatcaggcactcgcactgtggaaggagctgctcaccaaaggtcaggcccctgcggttaggtgtctgcaacagacagcggcatccctgcaaattctggcagcactgtatcagttagtagccaagcccatgcaggcgttggaagtgctgctcctgttacggatagtctctgagcgcctgaaagatcattcgaaggctgccggatcctcctgtcacatcacacaactcctattgaccctcggttgcccgtcatatgctcagctccatctcgaagaagctgcaagtagtctaaaacatctcgaccagacgaccgatacctacctcctgctttccctgacatgcgacctgcttaggtcacagttgtactggacacaccagaaagtcacaaagggtgtcagcttgctgttgagtgtcctgagagaccccgctctgcagaagagctccaaggcgtggtatctgttgagagtgcaggtgttacagctggttgccgcttatttgtccctgccctccaacaacctgtcacatagtctgtgggaacagctgtgcgcccagggctggcaaacacctgaaatcgctctgattgactctcacaaactgcttcggagcatcatattgctcctgatgggatctgatattctgtcaacccagaaggccgctgtcgagacatcatttcttgattacggcgagaaccttgttcagaaatggcaggtgctgtccgaagttctttcttgtagcgagaaactggtgtgtcatctcggcaggctcggcagcgtctctgaggcaaaggccttttgtctggaggccctcaagttgactacgaagctgcagattcctagacagtgcgctctgtttttagtcctgaaaggcgagctcgagcttgccagaaacgacatcgatttgtgccaatcggaccttcagcaagtgctttttctactcgagagttgcacagagtttgggggagtgacacagcacctcgactccgtgaagaaggtccatttgcagaagggtaagcaacaagcccaggtgccctgccccccacagctgcctgaagaagagctattcctacgcggtcccgcactggaactggtggccactgttgccaaggagcctggcccaatcgcgccatcgactaactcctcacccgtgctgaagacgaaaccccagccaatccccaactttctgagccattctccaacctgtgactgctctctctgcgcctcccccgttctgaccgccgtctgtctcagatgggtattagtcacggcaggcgtgaggctggccatggggcatcaggcccaaggactggacctgttgcaggtcgtccttaaagggtgtccagaagcagctgagaggcttacccaggccctacaggcaagtctgaaccacaaaacccctccaagccttgtcccaagtctgctggacgaaattctagcacaggcatataccttgctggcacttgaggggttgaatcagccctcaaatgagtcgctgcaaaaagtcttgcaaagcggcctgaagtttgtggcagctcgcatcccccatctcgagccctggagggcatcgttgctgctcatatgggcattgaccaagctgggcggattatcctgctgtaccacccaactatttgccagtagttggggatggcagcccccactgatcaagtctgtaccgggaagcgagccaagtaaaactcagggccagaagcgttcggggagagggagacaaaaactggccagtgcccctctgcgattgaataacacttcccaaaaggggctggaaggtcgtggcttgccatgcactccaaagccccctgaccgcatcagacaggccggacctcatgttcctttcacagtgttcgaggaggtttgcccaaccgaaagcaagcccgaagtgccccaagcccctagggtgcagcagagggtccagactaggctcaaagtgaacttctccgatgattcagatcttgaggacccagtctccgctgaggcctggcttgccgaggaacccaagagaagaggcactgctagtcggggtcgcggtcgtgccagaaaggggttgagtctgaaaaccgacgccgttgtggcccctggcagtgcaccaggtaaccctgggctgaatggcagaagtcggcgtgcaaaaaaggtcgcatcacgccattgcgaagaaagaaggccccagcgggcttcagatcaggcgagacctggacctgaaatcatgcgcactatcccagaggaagagcttacagacaattggcgtaaaatgtcatttgagatcctgagaggatccgatggagaggattccgcgagtggcggtaaaacccctgccccaggccctgaagctgcttccggtgaatgggaattgttgagattagacagttcaaagaagaagctgccttcaccctgtccagacaaagagagcgataaggatctcggacccaggctgagattacctagcgccccagtcgcgaccggactgtctactttagactctatctgcgatagcctatcagtggcattccggggtatttctcactgccctccttctggcctgtatgcccacctgtgcaggtttttagccttgtgcctggggcatcgcgatccctacgcgactgcctttttagtgaccgaatctgtgagcatcacctgccgacaccagctgcttacgcacctgcatcgccagctcagcaaagcccaaaagcaccggggtagcctggaaattgctgaccagttgcagggcctttccctccaggagatgccaggggatgtgcctctagcaagaatccagaggctatttagctttcgggcactcgagtccggacattttccccagcccgagaaggagtcgtttcaagaaagattggctctgattcccagcggtgtcaccgtgtgtgtcctggccttagctactctgcagcccggaacggtggggaacaccttgctgctaactagactggaaaaagattctccccctgtcagcgtgcagattcccactgggcagaataagctgcatttgaggtctgttctgaatgagttcgatgctatacagaaggctcagaaggagaactctagttgtactgataaaagggaatggtggactggccgattagcactggaccaccgaatggaagtgctcatcgcgtccctcgagaagtctgtgctgggatgctggaagggactgctgctgcctagcagcgaggaacctggacctgcccaagaagcctctcgcctgcaggaactgctccaggactgtggatggaagtacccggacagaaccttgttgaaaatcatgctcagcggcgctggagcactgactcctcaggacatccaggccctggcctacggactttgtcccacgcaacccgaaagggcacaggaactgctgaatgaggccgtcggtagactccagggacttacagtgcctagcaattcacatctagttctcgtgctggataaggacctgcagaaacttccatgggaaagcatgccctctctgcaagctctgccggttactcggttaccgagttttagatttctcttaagctacagtattataaaggagtatggagcctccccggtgctcagccagggagtcgaccctaggagcacattttatgtgctgaatccccacaacaatctgtcatctactgaagagcagtttcgggctaatttctcctctgaggctggctggcggggagttgtgggtgaggtgccgcgacctgagcaggtacaggaggccctcacaaagcatgatctgtatatttatgccggtcacggcgcaggcgcacggttcctagatggccaagccgtgctgcgtttgtcatgccgggctgtcgctctgttgttcggctgcagcagcgccgctctggccgtcagggggaacttggagggcgctggaatagtgctgaaatacattatggccggttgccccctgtttctaggcaatctatgggacgttacagatagagacattgatcggtatacagaggcattgcttcagggctggcttggagcagggccaggggctccactgctgtattatgtcaatcaagcacgacaagcacctaggctgaaatacctcattggggctgcacctatcgcttacggcctccccgtatccctgcggta

SEQ ID NO: 173730 - DNA, 5387 bp, Artificial Sequence
  derived and/or modified sequence
atggaagccccaagccctccactaagagccctgtatgagtcctgccagttctttctttcagggctggagcgtggcaccaagaggcgttacagattggacgcaatcctgagcctgttcgctttcctaggaggctactgcagtctgttacaacagctcagggacgatggagtctacggcggatcctcaaaacaacagcagtctttcctccagatgtatttccaggggctccacctctacactgtggtggtatacgactttgcccagggctgccagatcgtggacttggcagatctgacacagctcgttgatagctgcaagtccactgtagtttggatgctggaggctctggaaggactgtctgggcaggagctaaccgatcacatgggcatgaccgcatcatatacctctaatctggcctactctttctactcacataaactgtacgccgaagcatgcgccatctccgaaccattgtgccagcatctgggcttggtaaagcctggcacatatccggaagtccccccagagaaactgcaccgatgctttagactacaggtggaatcgctgaaaaaactggggaagcaagcgcaggggtgtaagatggtgatcctgtggcttgccgctcttcagccctgctctcccgaacacatggccgaacccgttacattttgggtccgggtgaagatggacgctgcaagggcaggcgataaggagctccagttgaaaacccttcgggacagccttagcggatgggatccagaaaccctggctctgctattgcgggaggagctgcaggcctacaaagccgtcagggctgacaccgggcaggagcgatttaatattatttgtgaccttctggagctttctcctgaagaaacccccgcaggagcctgggctagggcgacccacctggtggaactcgcacaagtgctgtgctatcacgactttacccagcaaacgaattgctcagcgctcgatgctattcgcgaggctttacagctgctggacagtgtacggccagaagctcaggccagggatcagttactggacgacaaggcgcaggctctgctctggctgtacatctgtaccctggaagccaaaatgcaggaaggaatagaacgcgaccgcagagctcaggccccaggaaacttggaagagtttgaggttaatgatttgaactacgaggataagctgcaagaagatcgctttctgtatagcaacatagcattcaatttggccgcagacgctgcacaatctaagtgtctagaccaggcgcttgcattgtggaaggagctgttaacgaagggacaggcacctgctgttcgatgtcttcagcagactgccgcttctctccagattctggctgccttataccaactggtggccaaaccaatgcaagcacttgaggtcctactgttgctcaggatcgtgtctgaaagacttaaggaccactcaaaagccgctggctcatcctgccacattacacagctgcttctgaccctgggctgccctagctacgctcagctgcatctggaagaggctgcgtcctctcttaagcatctagatcagacaacagacacatatctgttactctcattgacttgtgatctgctgcggtcacagttgtactggacacaccagaaagtcacaaaaggagtttctctgctgctatccgtcctgagggatcccgctttacaaaagtcctccaaggcctggtacctcttgagggtccaagttctgcagctggttgcagcctatctgtcactgccaagtaacaatttaagccactccctgtgggagcagctttgcgcccaaggttggcaaacccctgagattgcactgattgattcacacaagctgctgcgcagcatcattctcttgcttatgggaagcgacatcttgagcacccagaaggccgctgtggaaacttctttccttgactacggtgaaaacctcgttcagaaatggcaagtcctgtctgaggtgctgtcctgttccgagaaactggtatgccatctgggcaggctgggttcggtatccgaggctaaggctttctgccttgaggcccttaagttgaccactaaacttcaaatcccacgtcagtgtgccctgtttctcgtgctgaaaggagaactggaactggcccgaaacgatatcgacctttgccagtccgatctgcagcaggttttattccttttagagtcctgcactgagtttggtggcgtgactcaacacttggacagtgtgaaaaaagtccacctgcagaagggcaagcagcaggcacaggtcccatgccctcctcagctgcccgaggaggagttgtttctgagaggccctgcgctggaacttgtggccaccgtggccaaggaaccaggacctatcgcaccgtctactaactcatcacccgtgctgaaaaccaagcctcaacctatcccgaactttctatcacactcacctacctgtgactgttcactgtgtgctagcccagtgctcactgcagtgtgtctgaggtgggtgctcgtgaccgccggagtgaggctggctatgggccatcaggcccaggggctggacctgttgcaggttgtgctgaagggatgtcccgaagccgctgaaagactgactcaggcgcttcaggcctcactgaatcacaagacaccaccaagcctggtccctagcttgctcgacgagattctggctcaggcatatactcttctcgctctcgagggcttgaatcaaccttccaatgaaagcctgcagaaagtcctgcagtccggactgaaatttgtggcagccagaatcccacatctggagccctggagagctagtttgcttcttatttgggccttgacaaagctgggagggctgtcctgttgcacaacacagctttttgcttcgtcttggggttggcaaccaccgcttataaaaagcgtgccgggaagtgagccgagcaagacccaagggcagaaaagaagcggcagaggcaggcaaaaattggccagtgcccctttgaggctcaataacacatctcagaagggactcgagggacggggactaccatgcacacccaagccccctgatcgaatacggcaagctgggccacatgtgcccttcacagtgttcgaagaggtttgcccgacggaaagcaaaccagaagttcctcaggctcctagggtgcaacagagggtgcaaacaagactgaaggtgaactttagtgatgactctgacctggaggaccctgtgagcgctgaggcctggctggctgaagaacctaaaagacggggtacagcatctcgtggtcgagggagagccagaaaggggctctctctcaaaacagatgccgtggtcgccccagggtccgctccgggtaatccaggtttaaacggcaggagtcgcagggctaaaaaggttgcttcccgccactgcgaagaacgtaggccgcaaagagcttctgaccaggctagacccggacctgaaataatgcgtaccattccagaggaagagctgaccgataattggcgcaagatgtctttcgaaattctccggggaagcgacggcgaagactctgcctccggtggcaagactccagcccctggccctgaagccgcttccggggagtgggagctgctgagactcgattcaagcaaaaagaaactcccttcaccttgtccagacaaagagagcgataaagacttgggccctcggttgcggttgcctagcgcacccgtcgcaaccggtctgagtaccttagacagcatttgcgattctctcagtgttgcctttcggggtatttcacactgtcctcctagcggactctacgctcacctgtgtagatttttagctctgtgtcttgggcacagagacccctatgccaccgcctttctcgtcaccgagtcagtgtctattacctgccggcaccagctgctcacccatctccataggcagctctcaaaagcacagaagcacaggggatccctggagatcgctgatcagctgcaggggttgtcattacaggagatgccaggggatgtgccactggcaaggattcagaggttattcagcttccgtgcactggagtctggacactttcctcagcccgagaaagaatccttccaggagagactagcactgatccctagcggggtgactgtgtgcgtgttggcattagccacgcttcaacccggaacagtgggtaacacattgttactgactcgcctagaaaaggatagtcctccggtgtccgttcagattcctacaggccagaacaagttgcacttaaggtccgttctgaacgaattcgatgccattcaaaaggctcagaaagagaattcttcctgcacagataaaagagaatggtggaccggtcgcctggctctcgatcatagaatggaagtacttattgctagtttggaaaagagcgtcttaggatgctggaagggcttgctgctcccttcgtccgaggagccagggcctgcacaagaggctagccgactgcaggagcttttacaggattgcggctggaagtacccagaccgcacattgctgaagatcatgctttcaggtgcaggggctcttactccccaggacattcaggccctggcctacggactatgtccgacacagccagaaagagcacaggaactgctcaacgaggccgtgggacggcttcagggcctgaccgtgccaagtaacagccacctcgtgctggtgttggacaaagacctgcagaagctcccctgggagagcatgccaagtctgcaagctctacctgttacccgcctgccttcctttcggttcctcctgtcctactcaatcatcaaggagtacggagcctctcctgttctgagccagggggtagatcccaggtctactttttatgtccttaatccccataataacctgtccagcaccgaagagcagttccgggcaaacttttcctctgaggctgggtggcgcggtgtagtcggggaggtaccgcgtcctgagcaggtgcaggaagcccttaccaaacatgatctgtacatatacgccggacacggagcaggcgcacgcttcctggacggccaagcagtgttacgcctctcttgccgggcagtggctcttctgtttgggtgtagttcagctgctctggccgttcggggtaatctggagggtgcaggtattgttctcaaatatatcatggctggatgtccactcttcctagggaatctctgggatgtgacagacagggatatagatcgctacaccgaggctcttctccagggctggttaggagcaggcccaggcgcacccctcttgtactatgtgaaccaggcgagacaggctccaagattgaagtatctgattggcgctgccccaatagcatacggattaccagtaagtctgcgata

SEQ ID NO: 173731 - DNA, 6363 bp, Artificial Sequence
  derived and/or modified sequence
atgagaagcttcaagagagtgaacttcggcaccctgctgagcagccagaaggaggccgaggagctgctgcccgccctgaaggagttcctgagcaacccccccgccggcttccccagcagcagaagcgacgccgagagaagacaggcctgcgacgccatcctgagagcctgcaaccagcagctgaccgccaagctggcctgccccagacacctgggcagcctgctggagctggccgagctggcctgcgacggctacctggtgagcaccccccagagaccccccctgtacctggagagaatcctgttcgtgctgctgagaaacgccgccgcccagggcagccccgaggccaccctgagactggcccagcccctgcacgcctgcctggtgcagtgcagcagagaggccgccccccaggactacgaggccgtggccagaggcagcttcagcctgctgtggaagggcgccgaggccctgctggagagaagagccgccttcgccgccagactgaaggccctgagcttcctggtgctgctggaggacgagagcaccccctgcgaggtgccccacttcgccagccccaccgcctgcagagccgtggccgcccaccagctgttcgacgccagcggccacggcctgaacgaggccgacgccgacttcctggacgacctgctgagcagacacgtgatcagagccctggtgggcgagagaggcagcagcagcggcctgctgagcccccagagagccctgtgcctgctggagctgaccctggagcactgcagaagattctgctggagcagacaccacgacaaggccatcagcgccgtggagaaggcccacagctacctgagaaacaccaacctggcccccagcctgcagctgtgccagctgggcgtgaagctgctgcaggtgggcgaggagggcccccaggccgtggccaagctgctgatcaaggccagcgccgtgctgagcaagagcatggaggcccccagcccccccctgagagccctgtacgagagctgccagttcttcctgagcggcctggagagaggcaccaagagaagatacagactggacgccatcctgagcctgttcgccttcctgggcggctactgcagcctgctgcagcagctgagagacgacggcgtgtacggcggcagcagcaagcagcagcagagcttcctgcagatgtacttccagggcctgcacctgtacaccgtggtggtgtacgacttcgcccagggctgccagatcgtggacctggccgacctgacccagctggtggacagctgcaagagcaccgtggtgtggatgctggaggccctggagggcctgagcggccaggagctgaccgaccacatgggcatgaccgccagctacaccagcaacctggcctacagcttctacagccacaagctgtacgccgaggcctgcgccatcagcgagcccctgtgccagcacctgggcctggtgaagcccggcacctaccccgaggtgccccccgagaagctgcacagatgcttcagactgcaggtggagagcctgaagaagctgggcaagcaggcccagggctgcaagatggtgatcctgtggctggccgccctgcagccctgcagccccgagcacatggccgagcccgtgaccttctgggtgagagtgaagatggacgccgccagagccggcgacaaggagctgcagctgaagaccctgagagacagcctgagcggctgggaccccgagaccctggccctgctgctgagagaggagctgcaggcctacaaggccgtgagagccgacaccggccaggagagattcaacatcatctgcgacctgctggagctgagccccgaggagacccccgccggcgcctgggccagagccacccacctggtggagctggcccaggtgctgtgctaccacgacttcacccagcagaccaactgcagcgccctggacgccatcagagaggccctgcagctgctggacagcgtgagacccgaggcccaggccagagaccagctgctggacgacaaggcccaggccctgctgtggctgtacatctgcaccctggaggccaagatgcaggagggcatcgagagagacagaagagcccaggcccccggcaacctggaggagttcgaggtgaacgacctgaactacgaggacaagctgcaggaggacagattcctgtacagcaacatcgccttcaacctggccgccgacgccgcccagagcaagtgcctggaccaggccctggccctgtggaaggagctgctgaccaagggccaggcccccgccgtgagatgcctgcagcagaccgccgccagcctgcagatcctggccgccctgtaccagctggtggccaagcccatgcaggccctggaggtgctgctgctgctgagaatcgtgagcgagagactgaaggaccacagcaaggccgccggcagcagctgccacatcacccagctgctgctgaccctgggctgccccagctacgcccagctgcacctggaggaggccgccagcagcctgaagcacctggaccagaccaccgacacctacctgctgctgagcctgacctgcgacctgctgagaagccagctgtactggacccaccagaaggtgaccaagggcgtgagcctgctgctgagcgtgctgagagaccccgccctgcagaagagcagcaaggcctggtacctgctgagagtgcaggtgctgcagctggtggccgcctacctgagcctgcccagcaacaacctgagccacagcctgtgggagcagctgtgcgcccagggctggcagacccccgagatcgccctgatcgacagccacaagctgctgagaagcatcatcctgctgctgatgggcagcgacatcctgagcacccagaaggccgccgtggagaccagcttcctggactacggcgagaacctggtgcagaagtggcaggtgctgagcgaggtgctgagctgcagcgagaagctggtgtgccacctgggcagactgggcagcgtgagcgaggccaaggccttctgcctggaggccctgaagctgaccaccaagctgcagatccccagacagtgcgccctgttcctggtgctgaagggcgagctggagctggccagaaacgacatcgacctgtgccagagcgacctgcagcaggtgctgttcctgctggagagctgcaccgagttcggcggcgtgacccagcacctggacagcgtgaagaaggtgcacctgcagaagggcaagcagcaggcccaggtgccctgccccccccagctgcccgaggaggagctgttcctgagaggccccgccctggagctggtggccaccgtggccaaggagcccggccccatcgcccccagcaccaacagcagccccgtgctgaagaccaagccccagcccatccccaacttcctgagccacagccccacctgcgactgcagcctgtgcgccagccccgtgctgaccgccgtgtgcctgagatgggtgctggtgaccgccggcgtgagactggccatgggccaccaggcccagggcctggacctgctgcaggtggtgctgaagggctgccccgaggccgccgagagactgacccaggccctgcaggccagcctgaaccacaagaccccccccagcctggtgcccagcctgctggacgagatcctggcccaggcctacaccctgctggccctggagggcctgaaccagcccagcaacgagagcctgcagaaggtgctgcagagcggcctgaagttcgtggccgccagaatcccccacctggagccctggagagccagcctgctgctgatctgggccctgaccaagctgggcggcctgagctgctgcaccacccagctgttcgccagcagctggggctggcagccccccctgatcaagagcgtgcccggcagcgagcccagcaagacccagggccagaagagaagcggcagaggcagacagaagctggccagcgcccccctgagactgaacaacaccagccagaagggcctggagggcagaggcctgccctgcacccccaagccccccgacagaatcagacaggccggcccccacgtgcccttcaccgtgttcgaggaggtgtgccccaccgagagcaagcccgaggtgccccaggcccccagagtgcagcagagagtgcagaccagactgaaggtgaacttcagcgacgacagcgacctggaggaccccgtgagcgccgaggcctggctggccgaggagcccaagagaagaggcaccgccagcagaggcagaggcagagccagaaagggcctgagcctgaagaccgacgccgtggtggcccccggcagcgcccccggcaaccccggcctgaacggcagaagcagaagagccaagaaggtggccagcagacactgcgaggagagaagaccccagagagccagcgaccaggccagacccggccccgagatcatgagaaccatccccgaggaggagctgaccgacaactggagaaagatgagcttcgagatcctgagaggcagcgacggcgaggacagcgccagcggcggcaagacccccgcccccggccccgaggccgccagcggcgagtgggagctgctgagactggacagcagcaagaagaagctgcccagcccctgccccgacaaggagagcgacaaggacctgggccccagactgagactgcccagcgcccccgtggccaccggcctgagcaccctggacagcatctgcgacagcctgagcgtggccttcagaggcatcagccactgcccccccagcggcctgtacgcccacctgtgcagattcctggccctgtgcctgggccacagagacccctacgccaccgccttcctggtgaccgagagcgtgagcatcacctgcagacaccagctgctgacccacctgcacagacagctgagcaaggcccagaagcacagaggcagcctggagatcgccgaccagctgcagggcctgagcctgcaggagatgcccggcgacgtgcccctggccagaatccagagactgttcagcttcagagccctggagagcggccacttcccccagcccgagaaggagagcttccaggagagactggccctgatccccagcggcgtgaccgtgtgcgtgctggccctggccaccctgcagcccggcaccgtgggcaacaccctgctgctgaccagactggagaaggacagcccccccgtgagcgtgcagatccccaccggccagaacaagctgcacctgagaagcgtgctgaacgagttcgacgccatccagaaggcccagaaggagaacagcagctgcaccgacaagagagagtggtggaccggcagactggccctggaccacagaatggaggtgctgatcgccagcctggagaagagcgtgctgggctgctggaagggcctgctgctgcccagcagcgaggagcccggccccgcccaggaggccagcagactgcaggagctgctgcaggactgcggctggaagtaccccgacagaaccctgctgaagatcatgctgagcggcgccggcgccctgaccccccaggacatccaggccctggcctacggcctgtgccccacccagcccgagagagcccaggagctgctgaacgaggccgtgggcagactgcagggcctgaccgtgcccagcaacagccacctggtgctggtgctggacaaggacctgcagaagctgccctgggagagcatgcccagcctgcaggccctgcccgtgaccagactgcccagcttcagattcctgctgagctacagcatcatcaaggagtacggcgccagccccgtgctgagccagggcgtggaccccagaagcaccttctacgtgctgaacccccacaacaacctgagcagcaccgaggagcagttcagagccaacttcagcagcgaggccggctggagaggcgtggtgggcgaggtgcccagacccgagcaggtgcaggaggccctgaccaagcacgacctgtacatctacgccggccacggcgccggcgccagattcctggacggccaggccgtgctgagactgagctgcagagccgtggccctgctgttcggctgcagcagcgccgccctggccgtgagaggcaacctggagggcgccggcatcgtgctgaagtacatcatggccggctgccccctgttcctgggcaacctgtgggacgtgaccgacagagacatcgacagatacaccgaggccctgctgcagggctggctgggcgccggccccggcgcccccctgctgtactacgtgaaccaggccagacaggcccccagactgaagtacctgatcggcgccgcccccatcgcctacggcctgcccgtgagcctgagatag

SEQ ID NO: 173732 - DNA, 5388 bp, Artificial Sequence
  derived and/or modified sequence
atggaggcccccagcccccccctgagagccctgtacgagagctgccagttcttcctgagcggcctggagagaggcaccaagagaagatacagactggacgccatcctgagcctgttcgccttcctgggcggctactgcagcctgctgcagcagctgagagacgacggcgtgtacggcggcagcagcaagcagcagcagagcttcctgcagatgtacttccagggcctgcacctgtacaccgtggtggtgtacgacttcgcccagggctgccagatcgtggacctggccgacctgacccagctggtggacagctgcaagagcaccgtggtgtggatgctggaggccctggagggcctgagcggccaggagctgaccgaccacatgggcatgaccgccagctacaccagcaacctggcctacagcttctacagccacaagctgtacgccgaggcctgcgccatcagcgagcccctgtgccagcacctgggcctggtgaagcccggcacctaccccgaggtgccccccgagaagctgcacagatgcttcagactgcaggtggagagcctgaagaagctgggcaagcaggcccagggctgcaagatggtgatcctgtggctggccgccctgcagccctgcagccccgagcacatggccgagcccgtgaccttctgggtgagagtgaagatggacgccgccagagccggcgacaaggagctgcagctgaagaccctgagagacagcctgagcggctgggaccccgagaccctggccctgctgctgagagaggagctgcaggcctacaaggccgtgagagccgacaccggccaggagagattcaacatcatctgcgacctgctggagctgagccccgaggagacccccgccggcgcctgggccagagccacccacctggtggagctggcccaggtgctgtgctaccacgacttcacccagcagaccaactgcagcgccctggacgccatcagagaggccctgcagctgctggacagcgtgagacccgaggcccaggccagagaccagctgctggacgacaaggcccaggccctgctgtggctgtacatctgcaccctggaggccaagatgcaggagggcatcgagagagacagaagagcccaggcccccggcaacctggaggagttcgaggtgaacgacctgaactacgaggacaagctgcaggaggacagattcctgtacagcaacatcgccttcaacctggccgccgacgccgcccagagcaagtgcctggaccaggccctggccctgtggaaggagctgctgaccaagggccaggcccccgccgtgagatgcctgcagcagaccgccgccagcctgcagatcctggccgccctgtaccagctggtggccaagcccatgcaggccctggaggtgctgctgctgctgagaatcgtgagcgagagactgaaggaccacagcaaggccgccggcagcagctgccacatcacccagctgctgctgaccctgggctgccccagctacgcccagctgcacctggaggaggccgccagcagcctgaagcacctggaccagaccaccgacacctacctgctgctgagcctgacctgcgacctgctgagaagccagctgtactggacccaccagaaggtgaccaagggcgtgagcctgctgctgagcgtgctgagagaccccgccctgcagaagagcagcaaggcctggtacctgctgagagtgcaggtgctgcagctggtggccgcctacctgagcctgcccagcaacaacctgagccacagcctgtgggagcagctgtgcgcccagggctggcagacccccgagatcgccctgatcgacagccacaagctgctgagaagcatcatcctgctgctgatgggcagcgacatcctgagcacccagaaggccgccgtggagaccagcttcctggactacggcgagaacctggtgcagaagtggcaggtgctgagcgaggtgctgagctgcagcgagaagctggtgtgccacctgggcagactgggcagcgtgagcgaggccaaggccttctgcctggaggccctgaagctgaccaccaagctgcagatccccagacagtgcgccctgttcctggtgctgaagggcgagctggagctggccagaaacgacatcgacctgtgccagagcgacctgcagcaggtgctgttcctgctggagagctgcaccgagttcggcggcgtgacccagcacctggacagcgtgaagaaggtgcacctgcagaagggcaagcagcaggcccaggtgccctgccccccccagctgcccgaggaggagctgttcctgagaggccccgccctggagctggtggccaccgtggccaaggagcccggccccatcgcccccagcaccaacagcagccccgtgctgaagaccaagccccagcccatccccaacttcctgagccacagccccacctgcgactgcagcctgtgcgccagccccgtgctgaccgccgtgtgcctgagatgggtgctggtgaccgccggcgtgagactggccatgggccaccaggcccagggcctggacctgctgcaggtggtgctgaagggctgccccgaggccgccgagagactgacccaggccctgcaggccagcctgaaccacaagaccccccccagcctggtgcccagcctgctggacgagatcctggcccaggcctacaccctgctggccctggagggcctgaaccagcccagcaacgagagcctgcagaaggtgctgcagagcggcctgaagttcgtggccgccagaatcccccacctggagccctggagagccagcctgctgctgatctgggccctgaccaagctgggcggcctgagctgctgcaccacccagctgttcgccagcagctggggctggcagccccccctgatcaagagcgtgcccggcagcgagcccagcaagacccagggccagaagagaagcggcagaggcagacagaagctggccagcgcccccctgagactgaacaacaccagccagaagggcctggagggcagaggcctgccctgcacccccaagccccccgacagaatcagacaggccggcccccacgtgcccttcaccgtgttcgaggaggtgtgccccaccgagagcaagcccgaggtgccccaggcccccagagtgcagcagagagtgcagaccagactgaaggtgaacttcagcgacgacagcgacctggaggaccccgtgagcgccgaggcctggctggccgaggagcccaagagaagaggcaccgccagcagaggcagaggcagagccagaaagggcctgagcctgaagaccgacgccgtggtggcccccggcagcgcccccggcaaccccggcctgaacggcagaagcagaagagccaagaaggtggccagcagacactgcgaggagagaagaccccagagagccagcgaccaggccagacccggccccgagatcatgagaaccatccccgaggaggagctgaccgacaactggagaaagatgagcttcgagatcctgagaggcagcgacggcgaggacagcgccagcggcggcaagacccccgcccccggccccgaggccgccagcggcgagtgggagctgctgagactggacagcagcaagaagaagctgcccagcccctgccccgacaaggagagcgacaaggacctgggccccagactgagactgcccagcgcccccgtggccaccggcctgagcaccctggacagcatctgcgacagcctgagcgtggccttcagaggcatcagccactgcccccccagcggcctgtacgcccacctgtgcagattcctggccctgtgcctgggccacagagacccctacgccaccgccttcctggtgaccgagagcgtgagcatcacctgcagacaccagctgctgacccacctgcacagacagctgagcaaggcccagaagcacagaggcagcctggagatcgccgaccagctgcagggcctgagcctgcaggagatgcccggcgacgtgcccctggccagaatccagagactgttcagcttcagagccctggagagcggccacttcccccagcccgagaaggagagcttccaggagagactggccctgatccccagcggcgtgaccgtgtgcgtgctggccctggccaccctgcagcccggcaccgtgggcaacaccctgctgctgaccagactggagaaggacagcccccccgtgagcgtgcagatccccaccggccagaacaagctgcacctgagaagcgtgctgaacgagttcgacgccatccagaaggcccagaaggagaacagcagctgcaccgacaagagagagtggtggaccggcagactggccctggaccacagaatggaggtgctgatcgccagcctggagaagagcgtgctgggctgctggaagggcctgctgctgcccagcagcgaggagcccggccccgcccaggaggccagcagactgcaggagctgctgcaggactgcggctggaagtaccccgacagaaccctgctgaagatcatgctgagcggcgccggcgccctgaccccccaggacatccaggccctggcctacggcctgtgccccacccagcccgagagagcccaggagctgctgaacgaggccgtgggcagactgcagggcctgaccgtgcccagcaacagccacctggtgctggtgctggacaaggacctgcagaagctgccctgggagagcatgcccagcctgcaggccctgcccgtgaccagactgcccagcttcagattcctgctgagctacagcatcatcaaggagtacggcgccagccccgtgctgagccagggcgtggaccccagaagcaccttctacgtgctgaacccccacaacaacctgagcagcaccgaggagcagttcagagccaacttcagcagcgaggccggctggagaggcgtggtgggcgaggtgcccagacccgagcaggtgcaggaggccctgaccaagcacgacctgtacatctacgccggccacggcgccggcgccagattcctggacggccaggccgtgctgagactgagctgcagagccgtggccctgctgttcggctgcagcagcgccgccctggccgtgagaggcaacctggagggcgccggcatcgtgctgaagtacatcatggccggctgccccctgttcctgggcaacctgtgggacgtgaccgacagagacatcgacagatacaccgaggccctgctgcagggctggctgggcgccggccccggcgcccccctgctgtactacgtgaaccaggccagacaggcccccagactgaagtacctgatcggcgccgcccccatcgcctacggcctgcccgtgagcctgagatag

SEQ ID NO: 173733 - protein, 1136 aa, Artificial Sequence
  derived and/or modified sequence
MFSRKKRELMKTPSISKKNRAGSPSPQPSGELPRKDGADAVFPGPSLEPPAGSSGVKATGTLKRPTSLSRHASAAGFPLSGAASWTLGRSHRSPLTAASPGELPTEGAGPDVVEDISHLLADVARFAEGLEKLKECVLRDDLLEARRPRAHECLGEALRVMHQIISKYPLLNTVETLTAAGTLIAKVKAFHYESNNDLEKQEFEKALETIAVAFSSTVSEFLMGEVDSSTLLAVPPGDSSQSMESLYGPGSEGTPPSLEDCDAGCLPAEEVDVLLQRCEGGVDAALLYAKNMAKYMKDLISYLEKRTTLEMEFAKGLQKIAHNCRQSVMQEPHMPLLSIYSLALEQDLEFGHSMVQAVGTLQTQTFMQPLTLRRLEHEKRRKEIKEAWHRAQRKLQEAESNLRKAKQGYVQRCEDHDKARFLVAKAEEEQAGSAPGAGSTATKTLDKRRRLEEEAKNKAEEAMATYRTCVADAKTQKQELEDTKVTALRQIQEVIRQSDQTIKSATISYYQMMHMQTAPLPVHFQMLCESSKLYDPGQQYASHVRQLQRDQEPDVHYDFEPHVSANAWSPVMRARKSSFNVSDVARPEAAGSPPEEGGCTEGTPAKDHRAGRGHQVHKSWPLSISDSDSGLDPGPGAGDFKKFERTSSSGTMSSTEELVDPDGGAGASAFEQADLNGMTPELPVAVPSGPFRHEGLSKAARTHRLRKLRTPAKCRECNSYVYFQGAECEECCLACHKKCLETLAIQCGHKKLQGRLQLFGQDFSHAARSAPDGVPFIVKKCVCEIERRALRTKGIYRVNGVKTRVEKLCQAFENGKELVELSQASPHDISNVLKLYLRQLPEPLISFRLYHELVGLAKDSLKAEAEAKAASRGRQDGSESEAVAVALAGRLRELLRDLPPENRASLQYLLRHLRRIVEVEQDNKMTPGNLGIVFGPTLLRPRPTEATVSLSSLVDYPHQARVIETLIVHYGLVFEEEPEETPGGQDESSNQRAEVVVQVPYLEAGEAVVYPLQEAAADGCRESRVVSNDSDSDLEEASELLSSSEASALGHLSFLEQQQSEASLEVASGSHSGSEEQLEATAREDGDGDEDGPAQQLSGFNTNQSNNVLQAPLPPMRLRGGRMTLGSCRERQPEFV

SEQ ID NO: 173734 - protein, 948 aa, Artificial Sequence
  derived and/or modified sequence
MFSRKKRELMKTPSISKKNRAGSPSPQPSGELPRKDGADAVFPGPSLEPPAGSSGVKATGTLKRPTSLSRHASAAGFPLSGAASWTLGRSHRSPLTAASPGELPTEGAGPDVVEDISHLLADVARFAEGLEKLKECVLRDDLLEARRPRAHECLGEALRVMHQIISKYPLLNTVETLTAAGTLIAKVKAFHYESNNDLEKQEFEKALETIAVAFSSTVSEFLMGEVDSSTLLAVPPGDSSQSMESLYGPGSEGTPPSLEDCDAGCLPAEEVDVLLQRCEGGVDAALLYAKNMAKYMKDLISYLEKRTTLEMEFAKGLQKIAHNCRQSVMQEPHMPLLSIYSLALEQDLEFGHSMVQAVGTLQTQTFMQPLTLRRLEHEKRRKEIKEAWHRAQRKLQEAESNLRKAKQGYVQRCEDHDKARFLVAKAEEEQAGSAPGAGSTATKTLDKRRRLEEEAKNKAEEAMATYRTCVADAKTQKQELEDTKVTALRQIQEVIRQSDQTIKSATISYYQMMHMQTAPLPVHFQMLCESSKLYDPGQQYASHVRQLQRDQEPDVHYDFEPHVSANAWSPVMRARKSSFNVSDVARPEAAGSPPEEGGCTEGTPAKDHRAGRGHQVHKSWPLSISDSDSGLDPGPGAGDFKKFERTSSSGTMSSTEELVDPDGGAGASAFEQADLNGMTPELPVAVPSGPFRHEGLSKAARTHRLRKLRTPAKCRECNSYVYFQGAECEECCLACHKKCLETLAIQCGHKKLQGRLQLFGQDFSHAARSAPDGVPFIVKKCVCEIERRALRTKGIYRVNGVKTRVEKLCQAFENGKELVELSQASPHDISNVLKLYLRQLPEPLISFRLYHELVGLAKDSLKAEAEAKAASRGRQDGSESEAVAVALAGRLRELLRDLPPENRASLQYLLRHLRRIVEVEQDNKMTPMRLRGGRMTLGSCRERQPEFV

SEQ ID NO: 173735 - DNA, 3411 bp, Artificial Sequence
  derived and/or modified sequence
atgttctcccggaaaaaacgggaactgatgaagacaccttctatctccaagaaaaatcgtgcaggctctccttctcctcagccaagtggtgagctacctagaaaggacggagctgatgcagtctttcctgggccgtctttagagccccctgcaggatcaagtggggtaaaggcaaccggaaccctgaaacggcccactagcctctctcgccatgcaagcgcagcgggatttcctctcagcggagcagcttcatggacactgggacgcagccacagatcacctctgacagcagcaagcccaggagagttacccaccgaaggagccggaccagatgtggttgaggacataagtcacctgctggccgacgtggctcggtttgccgaaggactcgaaaaactgaaagagtgtgtccttcgcgacgatctgttggaagccaggcgtccaagggctcacgaatgtctgggcgaagctctccgggttatgcaccaaataatcagtaaatacccactcctgaacaccgtggagacattgaccgccgctggcacacttattgcaaaagtgaaggctttccattacgagtctaacaatgacctggagaagcaggagtttgagaaggcgttggagactatagccgtggccttttcttcaacagtgtcagaattcctcatgggggaagtggactcatccacgctgctcgctgttccccccggcgactcgtcacagagcatggaaagtctgtatggacctggctctgaaggaactccgcccagccttgaagattgcgacgcaggctgcctgccagctgaggaggtggacgtgctcctccagcgctgcgaagggggcgtggatgctgccctgctctacgcaaagaacatggctaagtatatgaaggacctaatttcatatctggaaaagcggacaactcttgaaatggagttcgccaaggggctgcagaaaattgcgcacaactgccggcagagcgtgatgcaagagccacatatgcctctcctgagtatctattcactggcgcttgaacaggatttagagttcgggcactctatggttcaggccgtgggtaccctgcagactcagaccttcatgcagccgttgaccctgagaagattggagcatgaaaaaagacgaaaggaaattaaggaagcctggcacagggcccagagaaagctccaagaggcagagtccaaccttcgaaaagctaagcagggctacgtacaaaggtgtgaagaccacgataaggccaggtttcttgtggccaaggccgaggaagagcaggcagggagtgcgccaggagcgggctccaccgccacgaaaacacttgacaaaaggaggcggttggaagaggaagctaagaacaaggccgaggaggccatggcaacttaccgtacgtgcgtggcggatgcaaaaacccagaagcaggagttagaggacacgaaggtcactgctctcaggcagatccaggaggtgatacggcagagcgaccaaaccataaaatcagctaccatatcatactatcagatgatgcacatgcagactgcacccttgccagttcacttccagatgctgtgcgagtccagcaagttatacgatcccggccaacaatacgcttcccacgtcaggcagcttcagcgcgatcaggaacctgatgttcactatgatttcgaacctcatgtttccgccaatgcttggagcccggtaatgagggcaagaaaatctagcttcaatgtgagtgacgtggcacgcccagaggccgctgggagccctccggaggaaggtggttgtacggaaggcacaccagccaaggaccaccgggcaggtagggggcaccaggtgcacaagtcttggccactgagcatatctgattccgatagcgggctggatcctgggccaggggctggtgactttaaaaagtttgagcggacatcttcatccggaactatgtcctctaccgaggagttggttgatcccgacggaggtgcaggcgccagcgccttcgaacaggccgacctcaatggcatgactcccgagcttcccgtggccgttccttcgggcccctttcgccacgaaggcttaagcaaagccgctcggactcacagactgcgcaagctcaggaccccagctaagtgcagggagtgtaattcctacgtttattttcaaggcgccgagtgcgaagagtgttgtctcgcctgtcataagaagtgcttggagacccttgctattcaatgtggccacaagaagctgcagggccggctacagctcttcggccaagacttctcgcatgctgcccgctctgcccctgacggagtcccttttattgtgaagaaatgcgtgtgcgagatcgagagacgggccttgaggacgaaggggatttatcgcgtaaacggtgtgaaaaccagagtcgagaaactgtgtcaggcatttgagaacggcaaggagctggtcgagctgtcgcaagcttcccctcacgatattagcaacgtactgaagctgtacctccgccagctgcctgaacccctgatttcctttcggctataccatgaacttgtgggtttagccaaagacagtctaaaagcagaagcagaagcaaaggccgcatctcgcggtagacaagatgggtccgagtctgaagccgtggcggttgccctggcagggaggttgagagagctgctacgggacctgccaccagaaaacagggccagcctccaatacttgctcaggcacctgcggcgtatagtggaagttgagcaggacaacaagatgaccccaggcaacctgggaatagtgttcggtcctaccttactgcggcccagacctacagaggccaccgtgagcctgagtagtcttgttgactacccacatcaagcaagagtgatcgagaccctcatcgtgcattatgggctggtattcgaagaggaaccagaggagactcccggcggacaggacgagagttcaaatcagcgggcggaagtagtcgtccaggtgccctacctcgaggccggcgaggccgtagtttaccccctgcaggaggcggctgcagatggctgccgagaatccagggtggtgagcaacgattcagactccgacctggaagaagcctctgaattgctttcttcctctgaggccagcgccctggggcatctcagttttctggaacaacagcagtcagaagctagccttgaagttgctagtggatcacacagcggcagtgaggagcaactggaagccactgcccgagaggacggcgatggcgacgaggacgggcctgcccagcagttatctggctttaataccaatcagagtaacaatgtactgcaagcacctctaccccccatgagactcaggggaggtcgcatgactttaggatcttgtagagagcggcagcctgagtttgtttag

SEQ ID NO: 173736 - DNA, 2847 bp, Artificial Sequence
  derived and/or modified sequence
atgttcagcagaaagaagcgcgagctcatgaagaccccttccatcagtaagaaaaacagggcgggcagccctagtcctcagcccagcggagaactgccgcggaaagacggcgctgatgccgtattcccgggcccgtcgctggagccccctgccggtagcagcggcgttaaagccaccggcactctcaaacgccccacaagcctcagtcgccacgctagtgccgccggcttccctctcagtggggctgcatcatggacccttggtcgatcacatcgatcccctttgacggcagcatctcccggagaactcccaacagaaggtgccggccccgatgtggtggaagacatttcacacctattggcagacgtagcacggtttgccgaaggcctcgagaagcttaaagagtgcgtgctgcgggacgatctcttggaggccaggcggccacgcgctcacgagtgtctgggggaggctctcagagtgatgcatcagatcatttccaaatatcctctcctaaacacggtggagacccttaccgccgccggcaccttgatcgccaaagtaaaggcatttcattatgagtcaaacaatgacctcgagaaacaagagtttgaaaaggcccttgaaaccattgccgtggcctttagcagcaccgtgagtgagttcctgatgggtgaagtggactcgtctactctcctcgcagtgcctccaggcgactcttcgcaatcaatggagtctctctacggcccgggtagcgagggcaccccgccctctttggaggattgcgacgctgggtgtctccccgccgaagaagtcgacgttctcctgcagcgttgtgagggaggcgttgatgcagcactgttgtacgcaaagaatatggccaaatatatgaaagatctgatttcttatctggaaaaaaggaccacgctggagatggaatttgccaaaggactgcagaaaatagcacacaactgcaggcagagcgtgatgcaagagccacatatgccactattgagcatatactctttagccctcgaacaggacttggaatttggacactctatggttcaggctgtagggacacttcaaacgcagacattcatgcagcccctcacattgcgcaggttggagcatgagaaaaggcgtaaggagatcaaagaggcatggcaccgagcccagcggaaactgcaggaggctgagtccaatctgcgcaaggctaaacagggctatgttcagcgatgcgaagaccatgataaagccaggttcctggtagccaaggctgaggaggagcaggccggatctgctccaggagccggcagcacagctactaagacgctcgacaagcggcggcggctcgaggaagaagctaagaataaggccgaggaagcgatggcaacataccgaacctgcgttgctgatgctaagacgcagaaacaagaattggaggacactaaggtgaccgcactgcggcagatacaggaggtcatccgccagtctgaccagacgatcaaatctgccacaatctcatactaccaaatgatgcacatgcaaaccgcccctcttccagtgcattttcagatgctctgcgaatccagcaaactgtatgaccctggacagcagtacgcctctcacgtgcgacagctgcagcgagaccaagagcctgacgtgcattatgactttgagccccacgtcagcgctaacgcttggagtcccgttatgcgtgcccgtaaatcttctttcaatgtcagtgacgtggcaaggcccgaagctgccgggagcccccccgaagaagggggctgcaccgaaggcacccccgcaaaggaccacagagcggggagagggcaccaagtccataagtcatggccactgtctataagcgatagtgactcagggctggatccaggccctggggccggggatttcaaaaagtttgaaagaacctcttccagtggtaccatgagttccactgaggaactcgtcgaccctgacggaggcgcaggggcctccgctttcgaacaggccgatctgaacggcatgactccagagctccccgtggccgtgccttctggcccattccgtcatgagggactctccaaagcggcccgcacccatagactgcgaaagttgcgcacacctgcgaaatgtagggaatgtaactcatacgtgtacttccagggtgccgagtgcgaggagtgttgcctggcttgtcataagaaatgtctggaaacgctggctattcagtgcgggcataagaaattacagggacgcctccaactttttggccaggatttcagtcacgcagcccggagtgcaccagacggggtcccattcattgtaaaaaagtgcgtttgtgagatagagagacgggcactccgaacaaaaggtatttatcgggtcaacggagttaagacccgtgtggagaagctgtgccaggccttcgagaatggtaaagagctggtcgagcttagccaggccagtccacacgacattagcaacgtgctgaagttgtaccttaggcagctccccgaacccctgatttcattccgactctaccacgaactggtaggcctcgctaaggattctcttaaggctgaggccgaggctaaggcggcaagtaggggacggcaggacggctctgaaagcgaagccgtggccgtagccctggcaggacggctgcgcgaattactgcgagatctgcccccggagaacagggcttctttacagtatctgttgaggcacctgcgcagaattgttgaggtggagcaggacaacaagatgacaccaatgcggctacggggcggacgcatgacactaggctcttgccgcgaacgccagccagaatttgtgtag

SEQ ID NO: 173737 - DNA, 3492 bp, Artificial Sequence
  derived and/or modified sequence
atgttttctagaaaaaagcgcgaattgatgaaaaccccgagtataagtaaaaagaaccgagcagggtccccatctccacagccttcaggcccccattttattagtggagaaaccgaggccgtcagcagacccgagaacccttttaatgagctgcccagcgatctccccaaggagctgcccaggaaagatggagcagatgccgtgtttcctgggccatcactggagccaccagccggctccagcggggttaaagcgacaggcacacttaagcgacccacgagcctttctcggcacgccagcgcagctggcttcccgctctccggtgcagcttcttggacactgggccgcagtcacagaagtcccttgacagccgcctcaccaggagagctgcccactgaaggagctgggcctgatgtggtcgaggatatatcccacctgctagctgacgtggccagattcgctgagggtttggagaagctgaaggagtgcgtcctgagagatgaccttctcgaggcacgtagaccccgtgctcacgagtgcctcggagaggcactgcgagtcatgcatcagatcatttccaagtaccccctgctcaataccgtggaaactttaactgctgccgggactctgatcgccaaggtgaaagcctttcactacgagagcaacaatgacctagaaaagcaggagttcgagaaggcattggagactatcgcagtcgctttctcaagcacagtcagcgagttcctgatgggggaagtagactcgtctacccttctggccgtgccgccaggtgactctagtcagagtatggagagcctctatgggcctgggtcagaggggacgccaccttcgcttgaagactgtgacgcaggctgtctccccgccgaggaggtcgatgtgctcctccagaggtgcgaagggggcgtcgatgccgccctgttgtacgccaagaatatggccaagtacatgaaagaccttataagctatctagaaaagcgaaccactttggagatggaatttgccaaaggtttgcaaaaaattgcccacaattgtaggcaatcggtcatgcaagagccgcatatgcccctgctgtctatctactccctggccctggagcaagacttggaattcggtcatagcatggtgcaggcagtgggcacacttcaaacccagacattcatgcagccgctcacacttcggagactggaacacgagaagcggcgtaaggagattaaagaggcgtggcatcgagcacaacgcaagttacaggaggcagagagtaatctcaggaaggcaaagcagggctacgtccaaaggtgcgaggaccacgataaggcacgattcctggttgctaaagccgaggaggaacaggctggctctgctccaggggccgggtctaccgccacaaaaactcttgataaaaggagacggttggaggaagaagcgaagaataaggccgaagaggccatggcaacttaccggacatgcgttgcagacgcaaagactcagaagcaagagttagaagatacaaaggtcacggccttgcggcagatccaggaagtgatccgacaaagtgaccaaactattaagagcgcaactatctcgtactaccagatgatgcacatgcagacagcgcccctgcccgttcacttccagatgctgtgcgagtctagcaaactctacgaccctggccagcagtatgcgagccacgtgcggcagctccagcgggaccaggagcccgatgttcactacgacttcgagcctcatgtgtccgctaatgcttggtctccagtgatgcgggcacgaaagtcaagtttcaatgttagcgacgtggcccggccggaagccgctggttctcccccggaggagggaggctgtaccgaaggtacgcctgccaaagaccacagggccggcagaggtcaccaggtgcataagtcatggcctctgtcaatctctgacagcgactctgggctggacccggggccaggtgccggagatttcaagaagtttgagagaacctccagctctgggaccatgtcttcaactgaggagctggtggacccggacgggggcgccggcgcgagcgcgtttgaacaggccgatctaaatggaatgacccctgagctgcctgtggctgttccaagcggaccgtttcgccacgaagggctgagcaaagccgcccgcacacataggcttcgcaagctgcgcactcctgctaagtgccgggagtgcaatagctacgtttatttccagggagcagaatgcgaagagtgctgcctcgcctgccacaagaagtgtcttgaaaccctggctattcaatgcgggcacaagaagctgcagggccgcctgcagctctttgggcaagattttagccatgccgcgcgctccgctcctgatggcgtgccatttatagttaaaaagtgcgtttgtgaaatcgagcgccgagcgctgcgaacgaagggcatctatcgggtcaatggtgtaaaaacccgcgtcgagaaattatgccaagcctttgaaaatggcaaggagctcgttgagctgagccaggctagtccacacgacataagcaatgtgctgaaactctatctccggcagctgccggagccacttatcagtttccgactataccacgagttagttggactcgccaaggatagtctgaaggctgaggcagaggccaaggcagcctctcggggccggcaggacgggagtgaaagcgaggcagtggccgtagccctggcgggaagactccgcgaactattacgcgatctccctccagaaaacagagctagcttgcagtaccttctgaggcacttacggagaattgtggaagtggagcaagataataagatgactcctggaaacttggggattgtgtttggacctaccttgctcagaccacgtccaacagaagccacagtgtcactatctagtctggtggactacccccaccaggccagagtgattgagacattgattgttcactatggtttggtatttgaagaagaacctgaggagacccctggagggcaggacgaaagttcaaatcaacgggccgaggtcgttgtacaggtgccctacctagaggccggtgaggcagtggtttatcccttgcaggaggccgctgcggatggctgcagagaaagtcgggttgtatctaatgacagtgactctgacttagaagaggcatctgagctattaagcagctctgaagcaagcgcactggggcatttgtcctttcttgaacagcagcagtcagaggcgtctctggaggtcgctagtggatcccattctggctcagaagagcagctcgaagcgactgctagggaagacggggacggagacgaggatggccctgcccagcaattgagcggctttaacaccaaccagagtaataacgtcttgcaggctcctctccctcctatgcgactaaggggagggcggatgactttggggagttgtcgggagcggcaacctgagttcgtgtag

SEQ ID NO: 173738 - DNA, 4264 bp, Artificial Sequence
  derived and/or modified sequence
gagccgcaggctgaggccgggaagggtcgggggcgaggccgcgtcgccgcctccccgaagccttttcctgttggggggagggcccgccagtgacggccgggcctgtcacgtgggcctgacagctggggagggggtggccggcgacaatgtggtcccgaagcggccagcgccgggagctgcagcgctgagacccccagcccgccccctcgggctcccggccggggccccatcatgttctccaggaagaaacgagagctcatgaaaaccccttccatctcgaaaaagaaccgcgcgggaagccccagcccgcagccctcgggggagctgcccaggaaggatggggctgacgcggtgttccccggaccaagcctggagccgcccgctgggtcctccggcgtcaaggccacagggaccctcaagcggcccaccagcctgagccgccacgccagcgcggctggcttccccctgtcgggtgctgcctcctggacactgggccggagccaccggagcccactgacagccgccagcccgggcgagctgcccaccgagggtgccggcccggacgtcgtcgaggacatctcccatctgctggcggacgtggcccgcttcgctgagggccttgagaaacttaaggagtgtgtgttgcgtgacgacctccttgaggcccgccgcccgcgggcccacgagtgcctgggtgaggctctgcgtgtcatgcatcagatcatctccaagtacccgctgctgaacaccgtggagacgctcaccgcagccggcaccctcattgccaaggtcaaagccttccattatgagagcaacaatgatctggagaaacaggagttcgagaaggccctggagacgattgctgtggccttcagtagcacagtgtccgagttcctcatgggtgaagtggacagcagcaccctcctagcagtgcctcctggggactcgagccagtccatggaaagcctgtatggaccgggcagtgagggcacgcctcccagcctggaagactgtgacgccggctgcctgcccgccgaggaggtggacgtgctgctacagcgctgtgaggggggcgtggatgccgcactgctgtatgccaagaacatggccaagtacatgaaggacctcatcagctacctggagaagcggacgacgctggagatggagtttgccaagggcctgcagaagatcgctcacaactgcagacagagcgtcatgcaggagccccacatgccgctcctgtccatctactcgctggccctggagcaggacctggagttcggccacagcatggtgcaggcggtgggcaccttgcagacccagaccttcatgcagcccctgaccctgcggcggcttgaacacgagaagcgcaggaaggagatcaaggaggcctggcaccgtgcccagaggaagctgcaagaggcggagtccaacctgcgcaaggccaagcagggttacgtgcagcgctgcgaggaccacgacaaggctcgcttcctcgtggccaaggcggaggaggagcaggctggcagcgcgccgggagcaggcagcacggccaccaagaccctggacaagcggcggcggctggaggaggaggccaagaacaaggcggaggaagctatggccacctaccgcacctgcgtggccgacgcgaagacgcagaagcaggagctggaggataccaaggtgacggcgctgcggcagatccaggaggtcatccggcagagcgaccaaaccatcaagtcggccacgatctcctactaccagatgatgcatatgcagacggcgccgctgcccgtgcacttccagatgctgtgtgagagcagcaagctgtatgacccaggccagcagtacgcctcccacgtgcgccagctgcagcgggaccaggagcccgatgtgcactacgactttgagccccacgtctccgccaacgcctggtcccccgtcatgcgtgcccggaagagcagcttcaacgtgagtgatgtggcgcggccggaggctgccgggagccccccagaagaaggcgggtgcactgagggcacacctgccaaggaccacagggccgggcgaggacaccaggttcacaagtcatggccgctctcgatctcagactcggacagtgggctggaccccggccctggcgcaggggactttaagaagttcgagcggacgtcatccagtggtaccatgtcgtccacggaggagctggtggacccagacggtggagccggggcttcagcctttgagcaggctgacctcaacggcatgacccccgagctgccggtggccgtgcccagtggaccgttccgccacgaggggctgtccaaggcggcccgtactcaccggctccggaagctccgcacgcccgccaagtgccgcgagtgcaacagctacgtctacttccagggtgctgagtgtgaagagtgctgcctggcctgccacaagaaatgtctggagacgctggccatacagtgcgggcacaagaagctgcaaggccgcctgcagctgttcggccaggacttcagccacgcggcccgcagcgcccccgacggcgtgcccttcatcgtcaagaagtgcgtctgcgagatcgagcggcgggcgctgcgcaccaagggcatctaccgggtcaatggggtaaagacacgcgtggagaagctgtgccaggccttcgagaacggcaaggagctggtcgagctgtcgcaggcctcgccccacgacatcagcaacgtcctcaagctctacctgcgtcagcttcccgagccgctcatctccttccgcctctaccacgagctcgtagggctggccaaggacagcctgaaggcagaggccgaggccaaggcggcgtcccggggccggcaggacggctcggagagcgaggcagtggcggtggccctggcaggtcggctgcgggagctcctgcgggacctgccgcctgagaaccgggcctcgctgcagtacctgctgcgtcacctacgcaggatcgtggaggtggagcaggacaacaagatgacccccgggaacctgggcatcgtgttcgggcccacgctgcttcggccacggcccaccgaggccaccgtgtccctctcctccctggtggattatccccatcaggcccgcgtcatcgagactctcatcgtccactacggcctggtcttcgaggaggagccggaggagacccccgggggccaggacgagtcatccaaccagcgagctgaggtagtcgtccaggtgccgtacctggaggcgggcgaggcggtggtctacccgctgcaggaggcggcggcggacgggtgcagagaatcccgagttgtgtccaacgattcggactcggacctagaggaggcctccgagctgctgtcctcatcggaggccagtgccctgggccacctcagcttcctggagcagcagcagagcgaggccagcctagaggtggcttctggcagccacagcggcagtgaggagcagctggaggccacagcccgggaggacggggacggggacgaggacggcccggcccagcagctctcaggattcaacaccaaccagtccaacaacgtgctgcaggccccactgccccccatgaggctccgtggcgggcggatgacactgggctcctgcagggaaaggcagccggaattcgtgtgagctggggtggggctgggaccacaggtggcttctctcttgcctgctcctgtccctccagcacgtcccctgcaccacggcatagcttaggtgcgccgtcctggggtcgctgccgagagcgcctggacttcgacgtcccaccagcgggcgcctcctcccagaggcttccaggagcacgagggccttgcggcacaggactgtgccctgtgctgtcccctgcaccccggctcagctgagctggggaacactgctgtcgtgtgaagtcacagtggccttgttggtgcccacagggctgtgtggatggaggaagctgtccctgcccagtgcatcccccaggtcatcacggggacgcaggaggcaggccctgccctgccctctcctcacaggtctgttgcagggactccagaaaccattctgggagccgtggatgggggcggagctggggtttggtgcagtttccagggtgcagtacagcagggcctgaatactggccctggactcccttttccagaacaccaggtgtggccacctggggctcaggtacacagtggggtctctcggaagccaccgtgtggttctttcacaggcacgtttattttgctgaaataaaaagtttttaatcggg

SEQ ID NO: 173739 - DNA, 3351 bp, Artificial Sequence
  derived and/or modified sequence
agctggggagggggtggccggcgacaatgtggtcccgaagcggccagcgccgggagctgcagcgctgagacccccagcccgccccctcgggctcccggccggggccccatcatgttctccaggaagaaacgagagctcatgaaaaccccttccatctcgaaaaagaaccgcgcgggaagccccagcccgcagccctcgggggagctgcccaggaaggatggggctgacgcggtgttccccggaccaagcctggagccgcccgctgggtcctccggcgtcaaggccacagggaccctcaagcggcccaccagcctgagccgccacgccagcgcggctggcttccccctgtcgggtgctgcctcctggacactgggccggagccaccggagcccactgacagccgccagcccgggcgagctgcccaccgagggtgccggcccggacgtcgtcgaggacatctcccatctgctggcggacgtggcccgcttcgctgagggccttgagaaacttaaggagtgtgtgttgcgtgacgacctccttgaggcccgccgcccgcgggcccacgagtgcctgggtgaggctctgcgtgtcatgcatcagatcatctccaagtacccgctgctgaacaccgtggagacgctcaccgcagccggcaccctcattgccaaggtcaaagccttccattatgagagcaacaatgatctggagaaacaggagttcgagaaggccctggagacgattgctgtggccttcagtagcacagtgtccgagttcctcatgggtgaagtggacagcagcaccctcctagcagtgcctcctggggactcgagccagtccatggaaagcctgtatggaccgggcagtgagggcacgcctcccagcctggaagactgtgacgccggctgcctgcccgccgaggaggtggacgtgctgctacagcgctgtgaggggggcgtggatgccgcactgctgtatgccaagaacatggccaagtacatgaaggacctcatcagctacctggagaagcggacgacgctggagatggagtttgccaagggcctgcagaagatcgctcacaactgcagacagagcgtcatgcaggagccccacatgccgctcctgtccatctactcgctggccctggagcaggacctggagttcggccacagcatggtgcaggcggtgggcaccttgcagacccagaccttcatgcagcccctgaccctgcggcggcttgaacacgagaagcgcaggaaggagatcaaggaggcctggcaccgtgcccagaggaagctgcaagaggcggagtccaacctgcgcaaggccaagcagggttacgtgcagcgctgcgaggaccacgacaaggctcgcttcctcgtggccaaggcggaggaggagcaggctggcagcgcgccgggagcaggcagcacggccaccaagaccctggacaagcggcggcggctggaggaggaggccaagaacaaggcggaggaagctatggccacctaccgcacctgcgtggccgacgcgaagacgcagaagcaggagctggaggataccaaggtgacggcgctgcggcagatccaggaggtcatccggcagagcgaccaaaccatcaagtcggccacgatctcctactaccagatgatgcatatgcagacggcgccgctgcccgtgcacttccagatgctgtgtgagagcagcaagctgtatgacccaggccagcagtacgcctcccacgtgcgccagctgcagcgggaccaggagcccgatgtgcactacgactttgagccccacgtctccgccaacgcctggtcccccgtcatgcgtgcccggaagagcagcttcaacgtgagtgatgtggcgcggccggaggctgccgggagccccccagaagaaggcgggtgcactgagggcacacctgccaaggaccacagggccgggcgaggacaccaggttcacaagtcatggccgctctcgatctcagactcggacagtgggctggaccccggccctggcgcaggggactttaagaagttcgagcggacgtcatccagtggtaccatgtcgtccacggaggagctggtggacccagacggtggagccggggcttcagcctttgagcaggctgacctcaacggcatgacccccgagctgccggtggccgtgcccagtggaccgttccgccacgaggggctgtccaaggcggcccgtactcaccggctccggaagctccgcacgcccgccaagtgccgcgagtgcaacagctacgtctacttccagggtgctgagtgtgaagagtgctgcctggcctgccacaagaaatgtctggagacgctggccatacagtgcgggcacaagaagctgcaaggccgcctgcagctgttcggccaggacttcagccacgcggcccgcagcgcccccgacggcgtgcccttcatcgtcaagaagtgcgtctgcgagatcgagcggcgggcgctgcgcaccaagggcatctaccgggtcaatggggtaaagacacgcgtggagaagctgtgccaggccttcgagaacggcaaggagctggtcgagctgtcgcaggcctcgccccacgacatcagcaacgtcctcaagctctacctgcgtcagcttcccgagccgctcatctccttccgcctctaccacgagctcgtagggctggccaaggacagcctgaaggcagaggccgaggccaaggcggcgtcccggggccggcaggacggctcggagagcgaggcagtggcggtggccctggcaggtcggctgcgggagctcctgcgggacctgccgcctgagaaccgggcctcgctgcagtacctgctgcgtcacctacgcaggatcgtggaggtggagcaggacaacaagatgacccccatgaggctccgtggcgggcggatgacactgggctcctgcagggaaaggcagccggaattcgtgtgagctggggtggggctgggaccacaggtggcttctctcttgcctgctcctgtccctccagcacgtcccctgcaccacggcatagcttaggtgcgccgtcctggggtcgctgccgagagcgcctggacttcgacgtcccaccagcgggcgcctcctcccagaggcttccaggagcacgagggccttgcggcacaggactgtgccctgtgctgtcccctgcaccccggctcagctgagctggggaacactgctgtcgtgtgaagtcacagtggccttgttggtgcccacagggctgtgtggatggaggaagctgtccctgcccagtgcatcccccaggtcatcacggggacgcaggaggcaggccctgccctgccctctcctcacaggtctgttgca

SEQ ID NO: 173740 - DNA, 4191 bp, Artificial Sequence
  derived and/or modified sequence
tcccgaagcggccagcgccgggagctgcagcgctgagacccccagcccgccccctcgggctcccggccggggccccatcatgttctccaggaagaaacgagagctcatgaaaaccccttccatctcgaaaaagaaccgcgcgggaagccccagcccgcagccctcggggccccacttcatttctggggaaactgaggccgtgtccaggccggaaaatccctttaacgagctcccctcggacctgcccaaggagctgcccaggaaggatggggctgacgcggtgttccccggaccaagcctggagccgcccgctgggtcctccggcgtcaaggccacagggaccctcaagcggcccaccagcctgagccgccacgccagcgcggctggcttccccctgtcgggtgctgcctcctggacactgggccggagccaccggagcccactgacagccgccagcccgggcgagctgcccaccgagggtgccggcccggacgtcgtcgaggacatctcccatctgctggcggacgtggcccgcttcgctgagggccttgagaaacttaaggagtgtgtgttgcgtgacgacctccttgaggcccgccgcccgcgggcccacgagtgcctgggtgaggctctgcgtgtcatgcatcagatcatctccaagtacccgctgctgaacaccgtggagacgctcaccgcagccggcaccctcattgccaaggtcaaagccttccattatgagagcaacaatgatctggagaaacaggagttcgagaaggccctggagacgattgctgtggccttcagtagcacagtgtccgagttcctcatgggtgaagtggacagcagcaccctcctagcagtgcctcctggggactcgagccagtccatggaaagcctgtatggaccgggcagtgagggcacgcctcccagcctggaagactgtgacgccggctgcctgcccgccgaggaggtggacgtgctgctacagcgctgtgaggggggcgtggatgccgcactgctgtatgccaagaacatggccaagtacatgaaggacctcatcagctacctggagaagcggacgacgctggagatggagtttgccaagggcctgcagaagatcgctcacaactgcagacagagcgtcatgcaggagccccacatgccgctcctgtccatctactcgctggccctggagcaggacctggagttcggccacagcatggtgcaggcggtgggcaccttgcagacccagaccttcatgcagcccctgaccctgcggcggcttgaacacgagaagcgcaggaaggagatcaaggaggcctggcaccgtgcccagaggaagctgcaagaggcggagtccaacctgcgcaaggccaagcagggttacgtgcagcgctgcgaggaccacgacaaggctcgcttcctcgtggccaaggcggaggaggagcaggctggcagcgcgccgggagcaggcagcacggccaccaagaccctggacaagcggcggcggctggaggaggaggccaagaacaaggcggaggaagctatggccacctaccgcacctgcgtggccgacgcgaagacgcagaagcaggagctggaggataccaaggtgacggcgctgcggcagatccaggaggtcatccggcagagcgaccaaaccatcaagtcggccacgatctcctactaccagatgatgcatatgcagacggcgccgctgcccgtgcacttccagatgctgtgtgagagcagcaagctgtatgacccaggccagcagtacgcctcccacgtgcgccagctgcagcgggaccaggagcccgatgtgcactacgactttgagccccacgtctccgccaacgcctggtcccccgtcatgcgtgcccggaagagcagcttcaacgtgagtgatgtggcgcggccggaggctgccgggagccccccagaagaaggcgggtgcactgagggcacacctgccaaggaccacagggccgggcgaggacaccaggttcacaagtcatggccgctctcgatctcagactcggacagtgggctggaccccggccctggcgcaggggactttaagaagttcgagcggacgtcatccagtggtaccatgtcgtccacggaggagctggtggacccagacggtggagccggggcttcagcctttgagcaggctgacctcaacggcatgacccccgagctgccggtggccgtgcccagtggaccgttccgccacgaggggctgtccaaggcggcccgtactcaccggctccggaagctccgcacgcccgccaagtgccgcgagtgcaacagctacgtctacttccagggtgctgagtgtgaagagtgctgcctggcctgccacaagaaatgtctggagacgctggccatacagtgcgggcacaagaagctgcaaggccgcctgcagctgttcggccaggacttcagccacgcggcccgcagcgcccccgacggcgtgcccttcatcgtcaagaagtgcgtctgcgagatcgagcggcgggcgctgcgcaccaagggcatctaccgggtcaatggggtaaagacacgcgtggagaagctgtgccaggccttcgagaacggcaaggagctggtcgagctgtcgcaggcctcgccccacgacatcagcaacgtcctcaagctctacctgcgtcagcttcccgagccgctcatctccttccgcctctaccacgagctcgtagggctggccaaggacagcctgaaggcagaggccgaggccaaggcggcgtcccggggccggcaggacggctcggagagcgaggcagtggcggtggccctggcaggtcggctgcgggagctcctgcgggacctgccgcctgagaaccgggcctcgctgcagtacctgctgcgtcacctacgcaggatcgtggaggtggagcaggacaacaagatgacccccgggaacctgggcatcgtgttcgggcccacgctgcttcggccacggcccaccgaggccaccgtgtccctctcctccctggtggattatccccatcaggcccgcgtcatcgagactctcatcgtccactacggcctggtcttcgaggaggagccggaggagacccccgggggccaggacgagtcatccaaccagcgagctgaggtagtcgtccaggtgccgtacctggaggcgggcgaggcggtggtctacccgctgcaggaggcggcggcggacgggtgcagagaatcccgagttgtgtccaacgattcggactcggacctagaggaggcctccgagctgctgtcctcatcggaggccagtgccctgggccacctcagcttcctggagcagcagcagagcgaggccagcctagaggtggcttctggcagccacagcggcagtgaggagcagctggaggccacagcccgggaggacggggacggggacgaggacggcccggcccagcagctctcaggattcaacaccaaccagtccaacaacgtgctgcaggccccactgccccccatgaggctccgtggcgggcggatgacactgggctcctgcagggaaaggcagccggaattcgtgtgagctggggtggggctgggaccacaggtggcttctctcttgcctgctcctgtccctccagcacgtcccctgcaccacggcatagcttaggtgcgccgtcctggggtcgctgccgagagcgcctggacttcgacgtcccaccagcgggcgcctcctcccagaggcttccaggagcacgagggccttgcggcacaggactgtgccctgtgctgtcccctgcaccccggctcagctgagctggggaacactgctgtcgtgtgaagtcacagtggccttgttggtgcccacagggctgtgtggatggaggaagctgtccctgcccagtgcatcccccaggtcatcacggggacgcaggaggcaggccctgccctgccctctcctcacaggtctgttgcagggactccagaaaccattctgggagccgtggatgggggcggagctggggtttggtgcagtttccagggtgcagtacagcagggcctgaatactggccctggactcccttttccagaacaccaggtgtggccacctggggctcaggtacacagtggggtctctcggaagccaccgtgtggttctttcacaggcacgtttattttgctgaaataaaaagtttttaatcg

SEQ ID NO: 173741 - DNA, 3411 bp, Artificial Sequence
  derived and/or modified sequence
atgttcagcaggaagaagcgggagctgatgaagacccccagcatcagcaagaagaacagagctggcagccccagcccccagcccagcggggagctgcccaggaaggatggagcagatgctgtgtttcctggccccagcctggagcccccagctggcagcagcggcgtgaaggccaccggcaccctgaagaggcccaccagcctgagcagacatgccagcgctgctggcttccccctgagcggggccgcctcctggaccctgggccgcagccacaggagccccctgacagctgccagccctggagagctgcccacagaaggagctggcccagatgtggtggaggacatcagccacctgctggctgatgtggccaggtttgctgagggcctggagaagctgaaggaatgtgtgctgagagatgacctgctggaggcccggcggccccgggcccacgagtgcctgggggaggccctgcgggtgatgcaccagatcatcagcaagtaccccctgctgaacacagtggagaccctgacagctgctggcaccctcatcgccaaggtgaaggccttccactatgagagcaacaatgacctggagaagcaggagtttgagaaggccctggagaccatcgctgtggccttcagcagcacagtgtctgagttcctgatgggagaggtggacagcagcaccctgctggccgtgcccccaggggacagcagccagagcatggagagcctgtatggccctggcagcgagggcaccccacccagcctggaggactgtgatgctggctgcctgcctgctgaggaggtggatgtgctgctgcagagatgtgagggcggcgtggatgctgccctgctgtatgccaagaacatggccaagtacatgaaggacctgatctcctacctggagaagaggaccaccctggagatggagtttgccaagggcctgcagaagatcgcccacaactgccggcagagcgtgatgcaggagccccacatgcccctgctgagcatctacagcctggccctggagcaggacctggagtttggccacagcatggtgcaggccgtgggcaccctgcagacccagaccttcatgcagcccctgaccctgcggcggctggagcacgagaagaggaggaaggagatcaaggaggcctggcaccgggcccagaggaagctgcaggaggccgagagcaacctgaggaaggccaagcagggctacgtgcagagatgtgaggaccatgacaaggcccgcttcctggtggccaaggccgaggaggagcaggccggcagcgcccctggagctggcagcacagccaccaagaccctggacaagagaagaaggctggaggaggaggccaagaacaaggccgaggaggccatggccacctaccgcacctgtgtggctgatgccaagacccagaagcaggagctggaggacaccaaggtgacagccctgcggcagatccaggaggtgatccggcagagcgaccagaccatcaagagcgccaccatctcctactaccagatgatgcacatgcagacagcccccctgcctgtgcacttccagatgctgtgtgagagcagcaagctgtatgaccccggccagcagtatgccagccacgtgcggcagctgcagagggaccaggagccagatgtgcactatgactttgagccccacgtgtctgccaatgcctggagccctgtgatgagggccaggaagagcagcttcaacgtgtctgatgtggcccggcctgaggccgccggcagccccccagaggagggcggctgcacagagggcaccccagccaaggaccaccgggccggccggggccaccaggtgcacaagtcctggcccctgagcatcagtgacagcgacagcggcctggaccccggccctggagctggggacttcaagaagtttgagaggaccagcagcagcggcaccatgagcagcacagaggagctggtggaccctgatggaggagctggggccagcgcctttgagcaggccgacctgaatggcatgaccccagagctgcctgtggccgtgcccagcggccccttcagacatgagggcctgagcaaggccgcccggacccaccggctgaggaagctgcggaccccagccaagtgccgggagtgcaacagctatgtgtacttccagggcgcagaatgtgaggagtgctgcctggcctgccacaagaagtgcctggagaccctggccatccagtgtggccacaagaagctgcagggccgcctgcagctgtttggccaggacttcagccacgccgcccggagcgccccagatggagtgcccttcatcgtgaagaagtgtgtgtgtgaaattgaaagaagagccctgcggaccaagggcatctacagagtgaatggagtgaagaccagggtggagaagctgtgccaggcctttgaaaatggcaaggagctggtggagctgagccaggccagcccccatgacatcagcaatgtgctgaagctgtacctgcggcagctgcctgagcccctcatctccttccggctgtaccacgagctggtgggcctggccaaggacagcctgaaggccgaggccgaggccaaggccgccagccggggccggcaggacggcagcgagagcgaggccgtggccgtggccctggccggccgcctgcgggagctgctgcgggacctgcccccagaaaatagagccagcctgcagtacctgctgcggcacctgcggcgcatcgtggaggtggagcaggacaacaagatgaccccaggcaacctgggcatcgtgtttggccccaccctgctgcggccccggcccacagaggccaccgtgtccctgagcagcctggtggactacccccaccaggcccgggtgattgagaccctgattgtgcactacggcctggtgtttgaggaggagcctgaggagacccctgggggccaggatgagagcagcaaccagagagctgaggtggtggtgcaggtgccctacctggaggccggggaggccgtggtgtaccccctgcaggaggccgctgctgatggctgccgggagagccgggtggtgtccaatgacagcgacagcgacctggaggaggccagcgagctgctgagcagcagcgaggccagcgccctgggccacctgtccttcctggagcagcagcagagcgaggccagcctggaggtggccagcggcagccacagcggcagcgaggagcagctggaggccacagcccgggaggatggagatggagatgaagatggccctgcccagcagctgagcggcttcaacaccaaccagagcaacaacgtgctgcaggcccccctgccccccatgaggctgcggggcggccgcatgaccctgggcagctgccgggagcggcagcctgagtttgtgtag

SEQ ID NO: 173742 - DNA, 2847 bp, Artificial Sequence
  derived and/or modified sequence
atgttcagcaggaagaagcgggagctgatgaagacccccagcatcagcaagaagaacagagctggcagccccagcccccagcccagcggggagctgcccaggaaggatggagcagatgctgtgtttcctggccccagcctggagcccccagctggcagcagcggcgtgaaggccaccggcaccctgaagaggcccaccagcctgagcagacatgccagcgctgctggcttccccctgagcggggccgcctcctggaccctgggccgcagccacaggagccccctgacagctgccagccctggagagctgcccacagaaggagctggcccagatgtggtggaggacatcagccacctgctggctgatgtggccaggtttgctgagggcctggagaagctgaaggaatgtgtgctgagagatgacctgctggaggcccggcggccccgggcccacgagtgcctgggggaggccctgcgggtgatgcaccagatcatcagcaagtaccccctgctgaacacagtggagaccctgacagctgctggcaccctcatcgccaaggtgaaggccttccactatgagagcaacaatgacctggagaagcaggagtttgagaaggccctggagaccatcgctgtggccttcagcagcacagtgtctgagttcctgatgggagaggtggacagcagcaccctgctggccgtgcccccaggggacagcagccagagcatggagagcctgtatggccctggcagcgagggcaccccacccagcctggaggactgtgatgctggctgcctgcctgctgaggaggtggatgtgctgctgcagagatgtgagggcggcgtggatgctgccctgctgtatgccaagaacatggccaagtacatgaaggacctgatctcctacctggagaagaggaccaccctggagatggagtttgccaagggcctgcagaagatcgcccacaactgccggcagagcgtgatgcaggagccccacatgcccctgctgagcatctacagcctggccctggagcaggacctggagtttggccacagcatggtgcaggccgtgggcaccctgcagacccagaccttcatgcagcccctgaccctgcggcggctggagcacgagaagaggaggaaggagatcaaggaggcctggcaccgggcccagaggaagctgcaggaggccgagagcaacctgaggaaggccaagcagggctacgtgcagagatgtgaggaccatgacaaggcccgcttcctggtggccaaggccgaggaggagcaggccggcagcgcccctggagctggcagcacagccaccaagaccctggacaagagaagaaggctggaggaggaggccaagaacaaggccgaggaggccatggccacctaccgcacctgtgtggctgatgccaagacccagaagcaggagctggaggacaccaaggtgacagccctgcggcagatccaggaggtgatccggcagagcgaccagaccatcaagagcgccaccatctcctactaccagatgatgcacatgcagacagcccccctgcctgtgcacttccagatgctgtgtgagagcagcaagctgtatgaccccggccagcagtatgccagccacgtgcggcagctgcagagggaccaggagccagatgtgcactatgactttgagccccacgtgtctgccaatgcctggagccctgtgatgagggccaggaagagcagcttcaacgtgtctgatgtggcccggcctgaggccgccggcagccccccagaggagggcggctgcacagagggcaccccagccaaggaccaccgggccggccggggccaccaggtgcacaagtcctggcccctgagcatcagtgacagcgacagcggcctggaccccggccctggagctggggacttcaagaagtttgagaggaccagcagcagcggcaccatgagcagcacagaggagctggtggaccctgatggaggagctggggccagcgcctttgagcaggccgacctgaatggcatgaccccagagctgcctgtggccgtgcccagcggccccttcagacatgagggcctgagcaaggccgcccggacccaccggctgaggaagctgcggaccccagccaagtgccgggagtgcaacagctatgtgtacttccagggcgcagaatgtgaggagtgctgcctggcctgccacaagaagtgcctggagaccctggccatccagtgtggccacaagaagctgcagggccgcctgcagctgtttggccaggacttcagccacgccgcccggagcgccccagatggagtgcccttcatcgtgaagaagtgtgtgtgtgaaattgaaagaagagccctgcggaccaagggcatctacagagtgaatggagtgaagaccagggtggagaagctgtgccaggcctttgaaaatggcaaggagctggtggagctgagccaggccagcccccatgacatcagcaatgtgctgaagctgtacctgcggcagctgcctgagcccctcatctccttccggctgtaccacgagctggtgggcctggccaaggacagcctgaaggccgaggccgaggccaaggccgccagccggggccggcaggacggcagcgagagcgaggccgtggccgtggccctggccggccgcctgcgggagctgctgcgggacctgcccccagaaaatagagccagcctgcagtacctgctgcggcacctgcggcgcatcgtggaggtggagcaggacaacaagatgacccccatgaggctgcggggcggccgcatgaccctgggcagctgccgggagcggcagcctgagtttgtgtag

SEQ ID NO: 173743 - DNA, 3492 bp, Artificial Sequence
  derived and/or modified sequence
atgttcagcaggaagaagcgggagctgatgaagacccccagcatcagcaagaagaacagagctggcagccccagcccccagcccagcggcccccacttcatctctggagaaacagaggccgtgtccaggcctgagaaccccttcaatgagctgcccagcgacctgcccaaggagctgcccaggaaggatggagcagatgctgtgtttcctggccccagcctggagcccccagctggcagcagtggagtgaaggccaccggcaccctgaagaggcccaccagcctgagcagacatgccagcgctgctggcttccccctgtctggagctgcctcctggaccctgggccgcagccacaggagccccctgacagctgccagccctggagagctgcccacagagggcgccggcccagatgtggtggaggacatcagccacctgctggctgatgtggccaggtttgctgagggcctggagaagctgaaggaatgtgtgctgagagatgacctgctggaggcccggcggccccgggcccatgaatgtctgggggaggccctgcgggtgatgcaccagatcatcagcaagtaccccctgctgaacacagtggagaccctgacagctgctggcaccctgattgccaaggtgaaggccttccactatgagagcaacaatgacctggagaagcaggagtttgagaaggccctggagaccatcgctgtggccttcagcagcacagtgtctgagttcctgatgggagaggtggacagcagcaccctgctggccgtgcccccaggggacagcagccagagcatggagagcctgtatggccctggcagcgagggcaccccacccagcctggaggactgtgatgctggctgcctgcctgctgaggaggtggatgtgctgctgcagagatgtgagggcggcgtggatgctgccctgctgtatgccaagaacatggccaagtacatgaaggacctgatctcctacctggagaagaggaccaccctggagatggagtttgccaagggcctgcagaagatcgcccacaactgccggcagagcgtgatgcaggagccccacatgcccctgctgagcatctacagcctggccctggagcaggacctggagtttggccacagcatggtgcaggccgtgggcaccctgcagacccagaccttcatgcagcccctgaccctgcggcggctggagcacgagaagaggaggaaggagatcaaggaggcctggcaccgggcccagaggaagctgcaggaggccgagagcaacctgaggaaggccaagcagggctacgtgcagagatgtgaagatcatgacaaggcccgcttcctggtggccaaggccgaggaggagcaggccggcagcgcccctggggccggcagcacagccaccaagaccctggacaagagaagaaggctggaggaggaggccaagaacaaggccgaggaggccatggccacctaccgcacctgtgtggctgatgccaagacccagaagcaggagctggaggacaccaaggtgacagccctgcggcagatccaggaggtgatccggcagagcgaccagaccatcaagagcgccaccatctcctactaccagatgatgcacatgcagacagcccccctgcctgtgcacttccagatgctgtgtgagagcagcaagctgtatgaccccggccagcagtatgccagccacgtgcggcagctgcagagggaccaggagccagatgtgcactatgactttgagccccacgtgtctgccaatgcctggagccctgtgatgagggccaggaagagcagcttcaacgtgtctgatgtggcccggcctgaggccgccggcagccccccagaggagggcggctgcacagagggcaccccagccaaggaccacagagctggccggggccaccaggtgcacaagtcctggcccctgagcatcagtgacagcgacagcggcctggaccccggccctggggccggggacttcaagaagtttgagaggaccagcagcagcggcaccatgagcagcacagaggagctggtggaccctgatggaggagctggggccagcgcctttgagcaggccgacctgaatggcatgaccccagagctgcctgtggccgtgcccagcggccccttcagacatgagggcctgagcaaggccgcccggacccaccggctgaggaagctgcggaccccagccaagtgccgggagtgcaacagctatgtgtacttccagggcgcagaatgtgaggagtgctgcctggcctgccacaagaagtgcctggagaccctggccatccagtgtggccacaagaagctgcagggccgcctgcagctgtttggccaggacttcagccatgctgcccggagcgccccagatggagtgcccttcatcgtgaagaagtgtgtgtgtgaaattgaaagaagagccctgcggaccaagggcatctacagagtgaatggagtgaagaccagggtggagaagctgtgccaggcctttgaaaatggcaaggagctggtggagctgagccaggccagcccccatgacatcagcaatgtgctgaagctgtacctgcggcagctgcctgagcccctcatctccttccggctgtaccacgagctggtgggcctggccaaggacagcctgaaggccgaggccgaggccaaggccgccagccggggccggcaggacggcagcgagagcgaggccgtggccgtggccctggccggccgcctgcgggagctgctgcgggacctgcccccagagaacagagccagcctgcagtacctgctgcggcacctgcggagaattgtggaggtggagcaggacaacaagatgaccccaggcaacctgggcatcgtgtttggccccaccctgctgcggccccggcccacagaggccaccgtgtccctgagcagcctggtggactacccccaccaggcccgggtcatcgagaccctcatcgtgcactacggcctggtgtttgaggaggagcctgaggagaccccaggcggccaggatgagagcagcaaccagagagctgaggtggtggtgcaggtgccctacctggaggccggggaggccgtggtgtaccccctgcaggaggccgctgctgatggctgccgggagagccgggtggtgtccaatgacagcgacagcgacctggaggaggccagcgagctgctgagcagcagcgaggccagcgccctgggccacctgtccttcctggagcagcagcagagcgaggccagcctggaggtggccagcggcagccacagcggcagcgaggagcagctggaggccacagccagagaagatggagatggagatgaagatggccctgcccagcagctgagcggcttcaacaccaaccagagcaacaacgtgctgcaggcccccctgccccccatgaggctgcggggcggccgcatgaccctgggcagctgccgggagcggcagcctgagtttgtgtag

SEQ ID NO: 173744 - DNA, 3411 bp, Artificial Sequence
  derived and/or modified sequence
atgttcagccggaagaagcgggagctgatgaagacccccagcatctccaagaagaaccgggctggaagtccctctcctcagcctagcggtgagcttccacggaaggatggagcggatgccgtattcccaggcccctctctggagccgccagcaggcagcagcggagtgaaggcaaccgggaccctgaaacgaccaacaagtttgtctcgacacgccagtgccgctggttttcctctgagcggcgcagcgagttggacactcggccgaagccaccgatctcctctcaccgcagcaagccctggcgaacttccaacggagggagcggggcctgatgtggtggaggatatttcccatctcctggcagatgttgctagatttgcagagggtctggagaaacttaaggaatgcgtgctgcgggacgatctgctcgaggctagacgcccgcgcgctcacgagtgtctgggtgaggccctgcgtgtcatgcatcagattattagtaaatacccgcttcttaacacagtggagacacttaccgctgctggcaccctcatagccaaagtcaaagctttccactacgaatccaataacgatttggagaaacaggagttcgagaaagctctggaaaccatagcggttgctttctcctccacagtgtcagagttcctcatgggagaagttgatagtagcacccttctggccgtgccaccaggagactctagccagagcatggaatctctatacggcccaggctctgagggtacccctccttctcttgaagactgcgacgccggatgcctccccgccgaggaagttgatgtcctgttacaaaggtgtgaggggggcgttgatgctgccctgctttacgcgaagaacatggccaagtatatgaaggaccttatcagctaccttgagaagcgcaccaccctggagatggagtttgccaagggtctgcagaagatcgctcataattgtcgccagtcagtcatgcaagaacctcacatgccgctgctctctatctactcactggcccttgaacaagacttagagttcggccacagtatggtgcaagccgtcggcacgctgcagacgcaaacttttatgcagcctctgaccctgaggcgtctggagcatgagaagcggcgcaaggagatcaaggaggcttggcacagggcccaacggaaattgcaagaggctgagagcaatctgcgaaaagcaaagcaagggtatgtccagagatgcgaagatcatgacaaggccagattcttagtggcaaaggccgaagaggaacaggctgggagcgctcctggggccggaagcactgcaacaaaaaccctagataagagacggcgcctggaggaggaggcaaaaaacaaagccgaagaggcaatggcaacttaccggacttgcgtagccgatgctaagacacagaagcaggagctggaggatactaaggtgactgccttgagacagatccaggaggttatccggcagtccgatcagaccatcaagtccgcgaccatctcctattaccagatgatgcacatgcaaacagctcccctgcccgtgcacttccaaatgctgtgcgaaagctccaagctgtatgacccaggacagcagtatgcatcacacgttagacagttacagagagatcaagagcccgatgtgcactacgactttgagccccacgtatctgctaacgcttggtcccccgtgatgcgggctaggaagtcgagcttcaatgtgtctgacgttgcacggcccgaagcagccggatcaccccccgaggaaggcgggtgtacggaaggcactccagctaaagaccacagggccggccgaggtcaccaggttcacaagtcttggcccctcagcatatcggactccgactcaggccttgatcccggcccaggtgcgggcgattttaaaaaattcgaaagaacttcatcaagcggcaccatgtcaagcacagaggagttggtcgaccccgatggcggggcgggtgcttctgccttcgagcaggctgacctcaatgggatgacacccgagctgccagttgctgtgccctcaggccccttccggcacgaggggctcagtaaagcggcccggacgcacaggcttcgaaagttgaggactccggcaaaatgccgcgagtgcaatagctatgtctacttccaaggagctgagtgtgaggagtgctgtcttgcctgccataaaaagtgcttagaaacactcgccattcaatgcgggcacaaaaaattgcagggtcggctgcagttattcgggcaggacttctcgcatgcggctcgctccgcacccgacggcgtgccgtttattgtgaagaagtgtgtgtgcgaaatagagcggcgagccttacgaacaaagggcatttatagagtgaacggagtgaagaccagggtggagaagctgtgtcaggccttcgaaaacggcaaggagctggttgagttaagccaggcttccccccacgacatctcgaatgtgctgaaactatacctcaggcagctgcccgagccgcttatttccttcagactgtaccacgagctggttgggctggccaaggactctctgaaagccgaggccgaagccaaagccgcgagtcgcggtaggcaggatggctcagaatcagaggccgtcgctgtagccctggccgggagactgcgagagctgctcagggacttgccaccagagaaccgtgcaagtctgcagtatttgctccgacaccttcgaaggattgtggaggtggagcaagacaataaaatgactcctggtaatctaggaattgtgtttggcccaacacttctgcgaccaaggcccaccgaggccacagttagcctgtcctcgctggttgattatccgcatcaggcgcgcgtaattgaaacgcttattgtacactacggactggttttcgaggaggagcccgaagaaacccccgggggtcaggacgaatccagcaaccagcgagctgaggtggtcgttcaggtcccctacctcgaggcaggagaagctgtggtctatccgttacaggaagcagcagcagacggatgccgagaatctagggtcgtttctaacgattcagacagcgacctcgaagaggcctccgaactgctctcatcaagcgaagcgtctgccctgggccatctgtccttcctcgagcagcagcagagcgaagctagcctcgaggtcgccagcggatcccatagtggctccgaggaacagctggaggctacagcaagagaagatggtgacggagacgaggatggcccagcgcagcaactgagcggattcaataccaatcaaagtaacaacgtcctgcaggcacccttaccacctatgcgtctgaggggtggcagaatgactctggggtcgtgtcgggagaggcagccagaattcgtatag

SEQ ID NO: 173745 - DNA, 2847 bp, Artificial Sequence
  derived and/or modified sequence
atgttcagccggaagaagcgggagctgatgaagacccccagcatctccaagaagaaccgagccggaagcccctcacctcagccaagtggggagttgcctaggaaagacggggccgacgctgtctttcccggtccgagcctggaacccccagccggatcctcaggcgtgaaggctacagggacgttgaaaaggccaacctctctgtctagacatgcttctgccgctgggttcccactgtctggggccgcttcttggacgctgggcaggagtcataggagccctcttacagcggcgtctcccggagaactgcccactgaaggagcaggacccgacgttgtcgaagacatctcccacctgctggccgatgtcgctagatttgctgagggcctcgagaagctaaaggagtgcgttctaagagacgacctgctggaggcgcgtcgccctcgcgcccacgagtgtttaggagaggctctgcgcgtcatgcaccagatcatctcgaaatatcccttgctgaacacagtggaaactctgaccgcagcaggaacgcttattgctaaagtgaaggctttccactacgagagcaacaatgaccttgaaaaacaggaatttgagaaggctctggagaccattgccgtggccttttcgtcgactgtgagtgagtttttaatgggagaggttgattctagcactctgcttgcggttccaccgggagacagctcccagagtatggagtctctgtatggccctgggagcgagggcacccctccatctctcgaggactgcgacgcagggtgcctgccagctgaggaggtggatgtgctactgcaaagatgcgagggcggagtggatgcagctctcctgtatgctaaaaatatggccaaatacatgaaggacctgatcagctatctggagaagagaacaaccttggagatggagttcgccaagggcctgcagaagatcgctcacaattgtcgacaatctgtgatgcaggaaccccatatgcctcttctttctatctatagcctggccctggaacaggacctggaattcggccactccatggtgcaggctgtgggtacgttacagacccagacattcatgcagccgcttactctgagacggcttgaacacgagaaaagaagaaaggaaattaaggaggcttggcacagagcgcagcgcaaactgcaagaggccgagtccaacctgcggaaagccaagcagggttacgtgcaaaggtgcgaggatcatgacaaagcaaggttcctcgtagccaaggccgaggaagagcaagcaggctccgctcctggggccggctccactgccaccaaaaccctagataaacgccggagactggaggaggaagcgaagaataaggccgaagaggccatggcaacgtatagaacctgcgtggccgacgcaaaaacacagaaacaggaactggaggacacgaaggtgacagctctacgtcagattcaagaagttatccgccagagtgatcagactatcaaatctgctaccatctcatactatcagatgatgcacatgcagaccgcaccattaccagttcactttcagatgttgtgcgagtcctccaagttatatgatcccggacagcaatatgcttcgcatgtgcggcagctgcagagggatcaagagcctgatgtccactacgactttgaaccacatgtgagtgccaatgcatggtcccccgtgatgagggcccgcaaatcaagctttaacgtgagcgacgtggcccgtccagaggccgcaggctcgcccccggaggagggcgggtgtaccgaggggactcctgcgaaagaccacagagctggtcggggacatcaggtgcacaaatcatggcccttgagtatcagcgattctgatagcgggctggacccaggtcccggcgctggcgatttcaagaagttcgagaggacttcctcttcgggcactatgagctctactgaagaactagtggatcctgacggaggagcgggggcgtctgcctttgagcaggcagaccttaacgggatgactccggagctgccagtagccgtgccaagcggcccctttcggcacgagggattgtctaaagctgcacgcacccatcgactgcgtaagctcaggacgcccgcaaaatgtcgcgaatgtaactcatacgtttatttccagggtgcagagtgcgaagagtgctgcctggcttgtcataaaaagtgtttggagacactggcaatacagtgcggccacaagaaactccagggcaggctgcagttgtttggtcaagacttcagtcacgctgccaggagtgcgcctgacggcgtgcccttcattgtcaaaaaatgtgtgtgtgagatcgagaggcgcgctctccggacaaagggcatctaccgggtgaacggggttaagactcgggtggagaagctttgtcaggcttttgaaaatggaaaggagctggtcgagctgtctcaggccagcccgcacgacatttcaaacgttctcaagttatacttaagacagcttccagagcccctgataagctttagactgtatcacgaactggtagggctcgcgaaagactctctgaaggccgaagccgaagctaaagcagcttctagaggccggcaggatggttccgagagcgaggcagtcgctgtcgcactggccggccgcttgagagagctgctgcgtgatctcccccccgagaaccgggcctcccttcagtatctcctccgccacctgcggagaatagtagaagtcgaacaggataataaaatgacccccatgaggctcagggggggcagaatgacgctgggctcttgtcgcgagaggcagcctgaattcgtatag

SEQ ID NO: 173746 - DNA, 3492 bp, Artificial Sequence
  derived and/or modified sequence
atgttcagccggaagaagcgggagctgatgaagacccccagcatctcgaagaaaaacagagctggtagtccaagtccgcagccctcaggaccacattttatctctggagagacggaggcagtctcccgtcctgaaaatcctttcaacgagctccccagcgacctccccaaggaacttccacggaaagacggagctgacgctgtcttccccggtccaagcctagagcctccagcgggatcttctggggtgaaggctacagggactctcaagaggccaacctctctttctagacatgcctccgcggctggattccctttaagcggagccgcttcatggaccctgggccgcagccaccgctcccctctcacggccgcctcacccggtgaactacctaccgagggcgctggccctgacgtggttgaggatatcagccacctgctggctgacgtcgctaggttcgccgagggactggagaaattgaaagagtgtgtgctccgcgacgacctgcttgaggctcgaagacccagggcccatgagtgtctcggcgaagcgctacgcgtgatgcaccaaattatctcaaaatacccactcctgaatacagtggaaactttaactgccgcaggaacactgattgctaaggtcaaagccttccactacgaaagtaataatgatttggagaagcaggagttcgagaaggcgctcgagactatagccgtcgcgttctcttcaactgtctccgaattcttaatgggcgaggtcgactccagtaccctgctggctgtcccgcccggcgacagctcccagagtatggagtccctctatggtcccgggagtgaaggaacaccaccttccttagaagattgtgatgctgggtgccttccggccgaggaggtagacgtcttgctccaaagatgtgagggaggagtggacgccgcgctgttgtacgctaagaatatggccaaatacatgaaagatctgattagctacttggaaaagcgcacgactttggaaatggaattcgccaaaggcctgcagaagatcgcccacaactgccggcagtcggtaatgcaagaaccgcacatgccgctcttgagtatttacagcctggccttagaacaagacctggaatttggccactccatggtgcaggcagtcggcacactgcagacacaaacgtttatgcagccactgaccctgagacggcttgagcacgagaaacgtcgcaaggagatcaaagaggcatggcaccgggcccagaggaagctacaggaggctgaatccaatttacgcaaggcgaaacaaggctacgtacaacggtgcgaagaccacgacaaggcgcgcttcctcgtggcaaaggccgaagaggaacaggcggggtcggccccgggagcgggctcaactgccacaaagaccctcgataagagacgtcggctggaagaggaagctaagaacaaagccgaagaggccatggcgacctaccgtacttgcgtggcagatgccaagacacaaaagcaggagctggaagacactaaagtgactgctctgcgccagattcaggaggtgattagacagtcggaccagacgattaaatccgccacaatctcatattaccagatgatgcacatgcagacagccccgttacctgtgcattttcaaatgttatgcgaaagtagcaaattgtacgacccaggacagcagtatgctagtcacgtccgccaattgcaaagagaccaagagcccgacgttcactacgacttcgaaccccacgtgtcggccaatgcttggtcaccagtgatgcgcgccagaaagtccagctttaacgtttccgatgtggcgcgccctgaggccgctggcagccccccggaggaagggggctgtacagagggaactcctgccaaggaccacagagctggcaggggacatcaagtgcataagagctggcccctctcgatctcagatagcgactctggactagacccaggcccgggcgccggggacttcaaaaagtttgaacggacaagctcttctggaacaatgagtagcaccgaagaattggtcgatcccgatgggggagctggagcctcagccttcgagcaggccgatctgaacgggatgacgcctgagttgccggtagccgtgccgtcagggccctttaggcatgagggactgtccaaagcagccaggacacaccgccttcgcaaattgcggacaccagctaagtgtagggagtgtaacagctacgtgtatttccagggcgctgaatgcgaagaatgttgtttagcatgccataaaaagtgtctcgaaacactggcgattcaatgtgggcacaaaaagttacagggacgattacagcttttcggacaggacttctcgcacgctgccaggtctgccccagacggtgtaccattcattgtgaaaaaatgcgtctgcgaaatcgaacgcagagccttgcggactaagggcatctaccgggtgaacggagtcaagactagagtcgaaaagctgtgtcaggcctttgaaaatggcaaggaactggtggaactttcacaagctagccctcacgacataagcaacgtgcttaagctttatctccggcagctgcccgaaccactgatttcctttcggctgtaccatgagctggttgggctagccaaagactccctgaaagccgaagccgaggctaaggcggcaagccgcggtaggcaagacggcagcgaaagcgaagctgtggctgtagctctggctggccgcttgcgtgaattgctcagggacctgcccccggagaatcgagcatccttacaatacctcttaagacaccttaggcgtattgtggaggtagaacaagacaataagatgacgcctgggaatctgggcatcgtgttcgggcccacactcctgaggccgcggccaacggaagccactgtgagtctatcatctcttgtggactatccccaccaagcacgggtgatcgaaacgttgatagtgcattatgggcttgtcttcgaagaggaaccagaggagacaccggggggccaggacgaaagcagcaatcagcgggccgaggtggtggtgcaggttccttacttggaggcaggggaggctgttgtgtaccccttacaggaggcggccgctgacggttgtcgtgaatcccgtgtggtcagtaatgattccgactctgacttagaagaggcctcagagcttctatcttcttctgaagcaagcgcgctgggacatctttctttcttggaacagcagcagtccgaggcgtctttagaagtcgcctctggctcgcacagcggctctgaggagcagttggaagccactgcacgcgaggacggggatggggatgaggatggacctgctcaacagctgtcaggttttaatacaaatcagtctaacaatgtcttgcaggccccactaccacccatgaggctgcggggcggacggatgactttagggtcctgcagagagagacagcctgagttcgtgtag

SEQ ID NO: 173747 - DNA, 3411 bp, Artificial Sequence
  derived and/or modified sequence
atgttttcccgtaagaaaagagagctgatgaaaaccccctctattagcaagaaaaatcgggcagggtcaccaagccctcagccttctggtgaacttcccagaaaagacggtgccgatgctgtgttcccagggccaagcctggagccaccagctgggtccagtggtgtaaaagctacggggaccttgaaacgtcctacttcactgtcgaggcatgcatctgctgcaggctttccactgtccggggcagcatcttggaccctgggcaggtcacatcgcagtcctttgacggctgctagtcccggtgaactccctaccgaaggagccggtcctgacgtggtcgaggacatatctcatttgctcgcagacgtagcccgattcgccgaagggctggagaagctaaaggaatgcgtcttgcgcgacgacttgcttgaggccagacgcccaagggctcacgaatgtttgggcgaggcactgcgagtcatgcatcagatcatatctaagtaccccctgctcaatacagtggagacgctcacagccgcaggaaccctgatagccaaggtgaaagccttccattatgagtctaacaacgaccttgaaaaacaggagttcgagaaagcgttagagacaatcgctgtcgcgttcagctctacagtctccgaattcttgatgggagaggtggacagtagcaccttgctagctgtgccgcctggtgacagctcccagagcatggaatcactgtacgggccaggatccgagggaacacccccatctcttgaggactgcgacgccggttgcctgcctgcggaggaggttgacgtcttacttcagcgctgcgaaggaggcgtggacgccgcactgctttacgccaaaaacatggctaaatatatgaaagacttaatttcctatttggaaaaacggaccaccctcgagatggaatttgctaagggtttgcaaaagattgcacacaattgcagacagagcgttatgcaggagccccatatgccgctcctctctatctactcactcgccctagaacaagatctggagttcgggcacagcatggtgcaagcagtgggtactctccagacgcagacctttatgcaacctctgactctccgacgcctggagcacgagaagagacggaaggaaattaaggaagcatggcatcgcgctcaaaggaagctgcaggaggccgaatcgaatctgagaaaggctaagcagggttacgtgcagagatgcgaagaccacgataaagctaggtttctcgtggcgaaagctgaggaggaacaggccggtagtgcacccggagctgggagcacagctacgaagacattggacaagaggcgtcgcctggaagaagaggcaaaaaataaggcggaggaggcaatggcgacttacaggacgtgcgtcgccgacgctaaaactcaaaagcaggaactggaggatactaaagtcacggccttacgacagatacaggaagtaattcgccagtcagatcagactatcaaatcggccaccatctcctattaccagatgatgcatatgcaaaccgcccctctgcccgtccatttccagatgctgtgtgaatccagtaaactgtatgaccccggacagcagtacgcatcccatgtcagacagctccagagagaccaggagccagacgtgcactatgactttgagcctcacgtgtccgccaatgcctggtctccggtcatgcgcgctaggaagagctcattcaacgtctctgacgtggctcgaccggaggcagctggatcacccccagaggagggcggatgcaccgaggggactcccgcaaaggatcaccgggctggtcgcggtcatcaggtacataaaagttggccactgtccataagcgactcagacagcgggctggaccccggtccgggtgcaggggatttcaaaaagtttgagcggacctctagctctggaactatgtcatccaccgaggagttggttgatcctgatggcggagctggagcgtcagcctttgagcaagcagatctgaacggaatgacccctgagttgccagtggctgtgccgtctggcccttttaggcatgaaggactgtcaaaagcagctcgcacgcaccggttgcgaaagctgagaacacctgcaaagtgccgcgagtgtaacagctacgtgtatttccagggggcagaatgtgaggaatgttgcctcgcctgccataagaaatgtttggagaccctggccatacaatgcgggcacaagaaactgcaaggaaggctgcagctctttggccaggattttagtcacgccgcaaggtctgcgcctgacggggttccattcatagttaagaaatgcgtttgcgagattgagagaagggccttgcgtacaaaaggtatctatagagtgaatggggtgaagaccagagttgagaaactctgtcaggcctttgaaaacggtaaggaactcgtggagctaagccaggcttcaccacacgatatctcgaatgttctgaagctgtatttgaggcagctacctgaacctctgatcagctttcgtctgtatcatgaactcgttggactcgctaaagacagcctaaaggctgaagctgaggccaaagcagcctccagaggaaggcaggatggctcagagagcgaggcagtcgccgtggccctggccggtcggctcagggaactgcttagagatttacctccggagaaccgggctagtctacagtatctcttgagacatttgcgacggattgtcgaagtggagcaagacaacaaaatgacaccaggcaatcttggaattgttttcggaccgacactgctacggcctagaccaaccgaagccacagtatctttgtcatccctcgtggactatccgcaccaagctcgggtcatagagaccctgattgtgcactacggcttagtctttgaagaagaaccggaggagacaccgggtggacaggatgagtccagcaaccaacgggctgaggtcgtggtacaggtgccctatctggaagccggagaagcagtggtctaccccctccaggaggccgctgccgacggctgtcgggagagccgagtggtgtccaacgacagcgattctgacctcgaggaagcttccgagctgctgtcaagttccgaggcatcagcactgggtcaccttagcttcctcgagcagcaacagtccgaggcatcactggaggtagcaagtggaagtcactcaggctctgaagaacagttagaggcaacggccagggaagacggcgatggggacgaagacggtcctgcacagcagcttagtggttttaatacaaatcagtcaaataacgtgctgcaagctccactccctcctatgcggctgcggggaggccgtatgacgctcggatcttgccgggaacgacaaccagagtttgtctag

SEQ ID NO: 173748 - DNA, 2847 bp, Artificial Sequence
  derived and/or modified sequence
atgtttagccgaaaaaaaagagaactgatgaagactccctccatcagcaaaaaaaaccgcgcaggctctccctcacctcagccgagcggagagttaccaagaaaggacggagccgacgctgtgtttcctggcccaagtctcgagccccctgcgggatcgagcggagtaaaagcaaccggcaccttgaaaagacccaccagtctgtcacgacatgcttccgctgctggatttcccctgagcggcgctgccagttggaccttaggaaggtcccaccgcagtcctcttactgcagcatccccgggtgaactgcccacagaaggagctggcccagatgtcgtggaagatatttctcatcttctggccgatgtggccaggtttgctgaagggttggaaaaactcaaggagtgtgtgctgcgggatgacttgctcgaagccagacggcctagggcgcacgaatgccttggcgaagcgctcagagtcatgcaccaaattatatccaagtaccctctactgaacacggtggagaccctgacggctgcgggtacattgattgccaaagtgaaggccttccattacgagtctaataatgaccttgagaagcaagagttcgaaaaagccctggaaacaatcgctgtggcgttcagctctacagtaagcgaatttttgatgggagaggtagattccagcaccctgttagcagtgccacctggagatagttcccagagtatggagtcgctttatgggccaggttccgagggcacgcctcctagcttggaagattgtgatgccggatgcttgccagccgaggaagtcgatgtcttgctgcaaagatgtgaggggggtgtggacgcggctctgctctatgccaaaaatatggccaaatatatgaaggatttgatctcatacctggagaagcggacaacactggagatggagtttgccaaaggccttcagaagatcgcacataactgccggcagtccgttatgcaggaaccccatatgccattgctatcaatttattccctggctttggagcaagatctggagtttggtcattctatggtgcaggctgtcggaaccctgcagacccagacgttcatgcaaccgttgaccctgagacgactcgagcacgagaaaagacgcaaggaaatcaaggaggcctggcatagggcccagcgtaagctccaggaggcagaaagcaaccttcgaaaagccaagcagggttatgtccagcgctgtgaagaccatgataaggctcgcttcttggtggccaaggctgaggaggaacaggctgggtctgcacctggggctggaagcactgccacaaagaccctcgataagcggagaaggttggaggaggaggccaaaaacaaggcagaagaagccatggctacttaccgcacctgtgtcgccgacgctaagacacagaagcaggaacttgaggatactaaggtgacggccctgagacagatccaggaagtcattaggcagtcagatcagactattaaaagcgccaccattagctactaccaaatgatgcacatgcaaacagctccactgccggtgcacttccagatgctgtgtgagagctccaagttatacgaccctggccagcaatacgcgtcacatgttcgccagcttcagagagaccaggagccagacgtccactacgacttcgaaccccatgtgagcgctaatgcctggagtcccgtgatgagagctcggaagtcatcctttaacgtcagtgatgtcgccagaccagaggccgctgggtccccgcctgaggaagggggatgcactgagggcacacccgctaaggaccaccgagcgggaaggggccatcaggtgcacaaaagttggccgctcagcatctccgattctgacagcggtctcgacccaggccctggggctggggatttcaagaagtttgaacggacctccagctccggcacaatgagctcaaccgaggagcttgttgaccctgacgggggagccggagcatcggcgttcgagcaggctgatctgaacgggatgacccccgagctacccgtggccgtgccttccggcccatttaggcacgaaggtctcagtaaagcggctcgaacccaccggctccggaaattgagaacacctgctaaatgtcgcgaatgtaattcttacgtgtactttcagggagccgaatgtgaggagtgttgtttggcatgccacaagaagtgcctcgagacactggcgatccaatgcggccataagaaactgcagggcagactacagttgttcggtcaggacttctcacacgctgcaagatccgctcccgatggagtgccgttcatcgtgaagaaatgtgtgtgcgagatcgaaaggagggctctgcgcaccaaaggtatttatcgggtgaatggggtgaagacacgcgtggagaaattatgccaggcgtttgaaaacgggaaggagctcgtggaactgagccaagcttcgccacatgatatcagtaacgtgctcaagctttatctgcgacaacttcctgagcccctgatatcttttcgcctctatcacgaactggtgggtctggctaaggacagcctgaaggcggaagcagaggccaaagccgctagtagaggtaggcaagatggaagcgagagcgaagccgtagcagtggctcttgccggtagacttagagaacttctgagagatttgcctccggagaatagggcttctttacagtacctgctccggcacttgcgaaggatagtcgaggttgagcaggacaataagatgactcccatgcgcctgaggggtggccgaatgacgttgggaagttgtagagaaaggcagccagagtttgtatag

SEQ ID NO: 173749 - DNA, 3492 bp, Artificial Sequence
  derived and/or modified sequence
atgttttcacggaaaaagagagaactgatgaagacgccctccatctccaagaaaaaccgcgctggttcccctagtcctcagccatcaggcccacacttcatttctggagaaacagaggcagtcagcagacccgaaaatcctttcaacgaactgccatcagatcttccaaaggagttgccaaggaaagatggggctgacgccgtctttcctgggcctagcctggaaccacccgctgggtccagtggcgtaaaagccacaggcaccctcaagagaccaacaagtctcagtcgccacgcttccgctgccggattccctctgtcaggagccgcatcttggacgctcgggaggtcgcaccggagccccctcaccgctgccagtccaggagagctacctaccgaaggcgcagggccagacgtggtcgaggatatcagccacttgctggcagacgttgcacggttcgcagaggggcttgagaagctcaaggaatgcgtgctaagagatgacctactggaggccaggagacccagggcccatgagtgtctgggtgaggcccttcgggtcatgcaccagattatttcaaaatacccactcctcaatacagttgagacactgactgccgcaggtaccttgattgccaaggttaaggcttttcactatgagtccaataacgatctcgagaagcaggagtttgagaaagctcttgagactatcgccgtggcgttctctagcaccgtctccgagtttttgatgggcgaggtggattcatcgacccttctcgcggttcctccaggtgattcatcacagagtatggaatcattgtatggtccaggctctgaagggacccccccatccttggaggattgcgacgcaggatgtctgcccgctgaagaagtggatgttcttcttcagcgctgtgagggcggtgtggacgccgcactgctttatgccaaaaacatggcgaagtacatgaaagatcttattagctacttggagaaaagaactaccctggagatggagttcgcaaagggcttacagaagattgctcacaactgtaggcaaagcgtgatgcaggagccacacatgccccttctgtctatttattccctggccctggagcaggatttggaatttggccactcaatggtccaggcagtaggtaccttgcaaacacaaacattcatgcagccgctgacactcagaagactcgagcacgagaaaaggcgaaaggagattaaggaggcatggcatagggcacagcgaaaactccaggaggcagaatctaatctccgaaaggccaaacaggggtatgttcagaggtgtgaagatcacgacaaggccaggtttctggttgccaaagcggaggaggagcaggccggatccgccccaggggcaggctctacagcgacaaagactctcgataagagacgtagattagaagaggaggcaaagaacaaagctgaagaggctatggctacctacaggacatgtgtggctgacgcaaaaacacagaagcaagaattagaagataccaaagtcactgctctcaggcagatacaagaggtgatccgtcaatcggaccagacaataaagagcgctacaatttcctactatcagatgatgcacatgcagaccgccccactgccagttcattttcaaatgctgtgtgaaagcagcaagttgtacgatccgggacaacagtacgcctctcacgtacggcagcttcagagggaccaagaacccgacgttcattatgactttgagccccacgtatccgccaatgcttggagccccgtgatgagagccagaaaaagctcctttaacgtctcagacgtcgctcgcccagaggccgcaggaagtccacctgaggaagggggttgtactgagggcactcccgcaaaggaccaccgagcagggcgaggccaccaggttcacaaatcatggcccctgtcaatctcagactccgactccggccttgacccagggccaggggcaggcgactttaagaaattcgagcggacttcaagttctggcacgatgtcctcaactgaggaattagtcgaccccgacgggggagctggtgcctctgctttcgaacaggccgatctgaatggaatgacgcctgagctgcctgtggctgtcccaagcggacccttcaggcacgaagggttgtccaaagccgcacgaacccacaggctgagaaaactcagaaccccagcaaagtgtagggaatgcaattcatatgtatattttcaaggcgcagaatgcgaggagtgttgcttagcgtgtcataagaaatgtctcgagaccctcgcgatccagtgtggacacaagaagcttcagggaagactgcagttgtttggtcaggacttttcccacgctgctcgtagcgctccagacggcgtcccttttatcgtcaaaaaatgcgtctgcgagatagaacgcagggccctacggaccaaaggaatatatcgcgtgaatggtgtgaaaaccagggttgaaaaattgtgccaggcatttgaaaatggaaaggagctggtcgagctgagccaggcctcccctcacgatatctccaacgtcctaaagctctatctcagacagcttccggaaccactgataagtttcaggctgtatcacgaattagtcgggctggctaaagactcccttaaggcagaagccgaggccaaggccgcttcaagaggacgacaggatggcagtgaatccgaagcagtggccgtagcactagcaggacggctgcgggaactgttacgggatttgcccccagaaaatcgggcaagcttgcagtacctgcttaggcacctaagaagaatagttgaggtggaacaggacaacaagatgacacctggaaatctggggatagtctttggaccgacactgttgcggcctcggccaactgaagccacagtcagcctgtcatccttagtggattacccccatcaggcccgtgtcatcgagaccctgatcgtgcattacggcctagttttcgaagaagagccagaagagacccccggtggtcaggacgagagcagtaaccagagagccgaagtcgtcgttcaggtaccatacctggaagccggtgaagccgtggtgtaccctctccaggaggcagcagccgatggctgcagagaaagcagggtcgtgagtaacgactctgactcggaccttgaggaggcctctgagctgttgagcagctctgaggcatccgcactcgggcatctcagttttctagagcagcaacagtctgaagcctcactcgaggtggccagcggatctcactcggggagcgaggagcagctggaggctacagcacgggaggatggtgacggcgacgaggacggacccgcacagcagctttccgggtttaacactaaccagtctaataacgttctgcaggctcccctgccacccatgaggcttcgcggaggcaggatgactcttgggtcgtgtcgagaacgccagccggagttcgtgtag

SEQ ID NO: 173750 - DNA, 3411 bp, Artificial Sequence
  derived and/or modified sequence
atgttcagcagaaagaagagagagctgatgaagacccccagcatcagcaagaagaacagagccggcagccccagcccccagcccagcggcgagctgcccagaaaggacggcgccgacgccgtgttccccggccccagcctggagccccccgccggcagcagcggcgtgaaggccaccggcaccctgaagagacccaccagcctgagcagacacgccagcgccgccggcttccccctgagcggcgccgccagctggaccctgggcagaagccacagaagccccctgaccgccgccagccccggcgagctgcccaccgagggcgccggccccgacgtggtggaggacatcagccacctgctggccgacgtggccagattcgccgagggcctggagaagctgaaggagtgcgtgctgagagacgacctgctggaggccagaagacccagagcccacgagtgcctgggcgaggccctgagagtgatgcaccagatcatcagcaagtaccccctgctgaacaccgtggagaccctgaccgccgccggcaccctgatcgccaaggtgaaggccttccactacgagagcaacaacgacctggagaagcaggagttcgagaaggccctggagaccatcgccgtggccttcagcagcaccgtgagcgagttcctgatgggcgaggtggacagcagcaccctgctggccgtgccccccggcgacagcagccagagcatggagagcctgtacggccccggcagcgagggcaccccccccagcctggaggactgcgacgccggctgcctgcccgccgaggaggtggacgtgctgctgcagagatgcgagggcggcgtggacgccgccctgctgtacgccaagaacatggccaagtacatgaaggacctgatcagctacctggagaagagaaccaccctggagatggagttcgccaagggcctgcagaagatcgcccacaactgcagacagagcgtgatgcaggagccccacatgcccctgctgagcatctacagcctggccctggagcaggacctggagttcggccacagcatggtgcaggccgtgggcaccctgcagacccagaccttcatgcagcccctgaccctgagaagactggagcacgagaagagaagaaaggagatcaaggaggcctggcacagagcccagagaaagctgcaggaggccgagagcaacctgagaaaggccaagcagggctacgtgcagagatgcgaggaccacgacaaggccagattcctggtggccaaggccgaggaggagcaggccggcagcgcccccggcgccggcagcaccgccaccaagaccctggacaagagaagaagactggaggaggaggccaagaacaaggccgaggaggccatggccacctacagaacctgcgtggccgacgccaagacccagaagcaggagctggaggacaccaaggtgaccgccctgagacagatccaggaggtgatcagacagagcgaccagaccatcaagagcgccaccatcagctactaccagatgatgcacatgcagaccgcccccctgcccgtgcacttccagatgctgtgcgagagcagcaagctgtacgaccccggccagcagtacgccagccacgtgagacagctgcagagagaccaggagcccgacgtgcactacgacttcgagccccacgtgagcgccaacgcctggagccccgtgatgagagccagaaagagcagcttcaacgtgagcgacgtggccagacccgaggccgccggcagcccccccgaggagggcggctgcaccgagggcacccccgccaaggaccacagagccggcagaggccaccaggtgcacaagagctggcccctgagcatcagcgacagcgacagcggcctggaccccggccccggcgccggcgacttcaagaagttcgagagaaccagcagcagcggcaccatgagcagcaccgaggagctggtggaccccgacggcggcgccggcgccagcgccttcgagcaggccgacctgaacggcatgacccccgagctgcccgtggccgtgcccagcggccccttcagacacgagggcctgagcaaggccgccagaacccacagactgagaaagctgagaacccccgccaagtgcagagagtgcaacagctacgtgtacttccagggcgccgagtgcgaggagtgctgcctggcctgccacaagaagtgcctggagaccctggccatccagtgcggccacaagaagctgcagggcagactgcagctgttcggccaggacttcagccacgccgccagaagcgcccccgacggcgtgcccttcatcgtgaagaagtgcgtgtgcgagatcgagagaagagccctgagaaccaagggcatctacagagtgaacggcgtgaagaccagagtggagaagctgtgccaggccttcgagaacggcaaggagctggtggagctgagccaggccagcccccacgacatcagcaacgtgctgaagctgtacctgagacagctgcccgagcccctgatcagcttcagactgtaccacgagctggtgggcctggccaaggacagcctgaaggccgaggccgaggccaaggccgccagcagaggcagacaggacggcagcgagagcgaggccgtggccgtggccctggccggcagactgagagagctgctgagagacctgccccccgagaacagagccagcctgcagtacctgctgagacacctgagaagaatcgtggaggtggagcaggacaacaagatgacccccggcaacctgggcatcgtgttcggccccaccctgctgagacccagacccaccgaggccaccgtgagcctgagcagcctggtggactacccccaccaggccagagtgatcgagaccctgatcgtgcactacggcctggtgttcgaggaggagcccgaggagacccccggcggccaggacgagagcagcaaccagagagccgaggtggtggtgcaggtgccctacctggaggccggcgaggccgtggtgtaccccctgcaggaggccgccgccgacggctgcagagagagcagagtggtgagcaacgacagcgacagcgacctggaggaggccagcgagctgctgagcagcagcgaggccagcgccctgggccacctgagcttcctggagcagcagcagagcgaggccagcctggaggtggccagcggcagccacagcggcagcgaggagcagctggaggccaccgccagagaggacggcgacggcgacgaggacggccccgcccagcagctgagcggcttcaacaccaaccagagcaacaacgtgctgcaggcccccctgccccccatgagactgagaggcggcagaatgaccctgggcagctgcagagagagacagcccgagttcgtgtag

SEQ ID NO: 173751 - DNA, 2847 bp, Artificial Sequence
  derived and/or modified sequence
atgttcagcagaaagaagagagagctgatgaagacccccagcatcagcaagaagaacagagccggcagccccagcccccagcccagcggcgagctgcccagaaaggacggcgccgacgccgtgttccccggccccagcctggagccccccgccggcagcagcggcgtgaaggccaccggcaccctgaagagacccaccagcctgagcagacacgccagcgccgccggcttccccctgagcggcgccgccagctggaccctgggcagaagccacagaagccccctgaccgccgccagccccggcgagctgcccaccgagggcgccggccccgacgtggtggaggacatcagccacctgctggccgacgtggccagattcgccgagggcctggagaagctgaaggagtgcgtgctgagagacgacctgctggaggccagaagacccagagcccacgagtgcctgggcgaggccctgagagtgatgcaccagatcatcagcaagtaccccctgctgaacaccgtggagaccctgaccgccgccggcaccctgatcgccaaggtgaaggccttccactacgagagcaacaacgacctggagaagcaggagttcgagaaggccctggagaccatcgccgtggccttcagcagcaccgtgagcgagttcctgatgggcgaggtggacagcagcaccctgctggccgtgccccccggcgacagcagccagagcatggagagcctgtacggccccggcagcgagggcaccccccccagcctggaggactgcgacgccggctgcctgcccgccgaggaggtggacgtgctgctgcagagatgcgagggcggcgtggacgccgccctgctgtacgccaagaacatggccaagtacatgaaggacctgatcagctacctggagaagagaaccaccctggagatggagttcgccaagggcctgcagaagatcgcccacaactgcagacagagcgtgatgcaggagccccacatgcccctgctgagcatctacagcctggccctggagcaggacctggagttcggccacagcatggtgcaggccgtgggcaccctgcagacccagaccttcatgcagcccctgaccctgagaagactggagcacgagaagagaagaaaggagatcaaggaggcctggcacagagcccagagaaagctgcaggaggccgagagcaacctgagaaaggccaagcagggctacgtgcagagatgcgaggaccacgacaaggccagattcctggtggccaaggccgaggaggagcaggccggcagcgcccccggcgccggcagcaccgccaccaagaccctggacaagagaagaagactggaggaggaggccaagaacaaggccgaggaggccatggccacctacagaacctgcgtggccgacgccaagacccagaagcaggagctggaggacaccaaggtgaccgccctgagacagatccaggaggtgatcagacagagcgaccagaccatcaagagcgccaccatcagctactaccagatgatgcacatgcagaccgcccccctgcccgtgcacttccagatgctgtgcgagagcagcaagctgtacgaccccggccagcagtacgccagccacgtgagacagctgcagagagaccaggagcccgacgtgcactacgacttcgagccccacgtgagcgccaacgcctggagccccgtgatgagagccagaaagagcagcttcaacgtgagcgacgtggccagacccgaggccgccggcagcccccccgaggagggcggctgcaccgagggcacccccgccaaggaccacagagccggcagaggccaccaggtgcacaagagctggcccctgagcatcagcgacagcgacagcggcctggaccccggccccggcgccggcgacttcaagaagttcgagagaaccagcagcagcggcaccatgagcagcaccgaggagctggtggaccccgacggcggcgccggcgccagcgccttcgagcaggccgacctgaacggcatgacccccgagctgcccgtggccgtgcccagcggccccttcagacacgagggcctgagcaaggccgccagaacccacagactgagaaagctgagaacccccgccaagtgcagagagtgcaacagctacgtgtacttccagggcgccgagtgcgaggagtgctgcctggcctgccacaagaagtgcctggagaccctggccatccagtgcggccacaagaagctgcagggcagactgcagctgttcggccaggacttcagccacgccgccagaagcgcccccgacggcgtgcccttcatcgtgaagaagtgcgtgtgcgagatcgagagaagagccctgagaaccaagggcatctacagagtgaacggcgtgaagaccagagtggagaagctgtgccaggccttcgagaacggcaaggagctggtggagctgagccaggccagcccccacgacatcagcaacgtgctgaagctgtacctgagacagctgcccgagcccctgatcagcttcagactgtaccacgagctggtgggcctggccaaggacagcctgaaggccgaggccgaggccaaggccgccagcagaggcagacaggacggcagcgagagcgaggccgtggccgtggccctggccggcagactgagagagctgctgagagacctgccccccgagaacagagccagcctgcagtacctgctgagacacctgagaagaatcgtggaggtggagcaggacaacaagatgacccccatgagactgagaggcggcagaatgaccctgggcagctgcagagagagacagcccgagttcgtgtag

SEQ ID NO: 173752 - DNA, 3492 bp, Artificial Sequence
  derived and/or modified sequence
atgttcagcagaaagaagagagagctgatgaagacccccagcatcagcaagaagaacagagccggcagccccagcccccagcccagcggcccccacttcatcagcggcgagaccgaggccgtgagcagacccgagaaccccttcaacgagctgcccagcgacctgcccaaggagctgcccagaaaggacggcgccgacgccgtgttccccggccccagcctggagccccccgccggcagcagcggcgtgaaggccaccggcaccctgaagagacccaccagcctgagcagacacgccagcgccgccggcttccccctgagcggcgccgccagctggaccctgggcagaagccacagaagccccctgaccgccgccagccccggcgagctgcccaccgagggcgccggccccgacgtggtggaggacatcagccacctgctggccgacgtggccagattcgccgagggcctggagaagctgaaggagtgcgtgctgagagacgacctgctggaggccagaagacccagagcccacgagtgcctgggcgaggccctgagagtgatgcaccagatcatcagcaagtaccccctgctgaacaccgtggagaccctgaccgccgccggcaccctgatcgccaaggtgaaggccttccactacgagagcaacaacgacctggagaagcaggagttcgagaaggccctggagaccatcgccgtggccttcagcagcaccgtgagcgagttcctgatgggcgaggtggacagcagcaccctgctggccgtgccccccggcgacagcagccagagcatggagagcctgtacggccccggcagcgagggcaccccccccagcctggaggactgcgacgccggctgcctgcccgccgaggaggtggacgtgctgctgcagagatgcgagggcggcgtggacgccgccctgctgtacgccaagaacatggccaagtacatgaaggacctgatcagctacctggagaagagaaccaccctggagatggagttcgccaagggcctgcagaagatcgcccacaactgcagacagagcgtgatgcaggagccccacatgcccctgctgagcatctacagcctggccctggagcaggacctggagttcggccacagcatggtgcaggccgtgggcaccctgcagacccagaccttcatgcagcccctgaccctgagaagactggagcacgagaagagaagaaaggagatcaaggaggcctggcacagagcccagagaaagctgcaggaggccgagagcaacctgagaaaggccaagcagggctacgtgcagagatgcgaggaccacgacaaggccagattcctggtggccaaggccgaggaggagcaggccggcagcgcccccggcgccggcagcaccgccaccaagaccctggacaagagaagaagactggaggaggaggccaagaacaaggccgaggaggccatggccacctacagaacctgcgtggccgacgccaagacccagaagcaggagctggaggacaccaaggtgaccgccctgagacagatccaggaggtgatcagacagagcgaccagaccatcaagagcgccaccatcagctactaccagatgatgcacatgcagaccgcccccctgcccgtgcacttccagatgctgtgcgagagcagcaagctgtacgaccccggccagcagtacgccagccacgtgagacagctgcagagagaccaggagcccgacgtgcactacgacttcgagccccacgtgagcgccaacgcctggagccccgtgatgagagccagaaagagcagcttcaacgtgagcgacgtggccagacccgaggccgccggcagcccccccgaggagggcggctgcaccgagggcacccccgccaaggaccacagagccggcagaggccaccaggtgcacaagagctggcccctgagcatcagcgacagcgacagcggcctggaccccggccccggcgccggcgacttcaagaagttcgagagaaccagcagcagcggcaccatgagcagcaccgaggagctggtggaccccgacggcggcgccggcgccagcgccttcgagcaggccgacctgaacggcatgacccccgagctgcccgtggccgtgcccagcggccccttcagacacgagggcctgagcaaggccgccagaacccacagactgagaaagctgagaacccccgccaagtgcagagagtgcaacagctacgtgtacttccagggcgccgagtgcgaggagtgctgcctggcctgccacaagaagtgcctggagaccctggccatccagtgcggccacaagaagctgcagggcagactgcagctgttcggccaggacttcagccacgccgccagaagcgcccccgacggcgtgcccttcatcgtgaagaagtgcgtgtgcgagatcgagagaagagccctgagaaccaagggcatctacagagtgaacggcgtgaagaccagagtggagaagctgtgccaggccttcgagaacggcaaggagctggtggagctgagccaggccagcccccacgacatcagcaacgtgctgaagctgtacctgagacagctgcccgagcccctgatcagcttcagactgtaccacgagctggtgggcctggccaaggacagcctgaaggccgaggccgaggccaaggccgccagcagaggcagacaggacggcagcgagagcgaggccgtggccgtggccctggccggcagactgagagagctgctgagagacctgccccccgagaacagagccagcctgcagtacctgctgagacacctgagaagaatcgtggaggtggagcaggacaacaagatgacccccggcaacctgggcatcgtgttcggccccaccctgctgagacccagacccaccgaggccaccgtgagcctgagcagcctggtggactacccccaccaggccagagtgatcgagaccctgatcgtgcactacggcctggtgttcgaggaggagcccgaggagacccccggcggccaggacgagagcagcaaccagagagccgaggtggtggtgcaggtgccctacctggaggccggcgaggccgtggtgtaccccctgcaggaggccgccgccgacggctgcagagagagcagagtggtgagcaacgacagcgacagcgacctggaggaggccagcgagctgctgagcagcagcgaggccagcgccctgggccacctgagcttcctggagcagcagcagagcgaggccagcctggaggtggccagcggcagccacagcggcagcgaggagcagctggaggccaccgccagagaggacggcgacggcgacgaggacggccccgcccagcagctgagcggcttcaacaccaaccagagcaacaacgtgctgcaggcccccctgccccccatgagactgagaggcggcagaatgaccctgggcagctgcagagagagacagcccgagttcgtgtag

SEQ ID NO: 173753 - protein, 1479 aa, Artificial Sequence
  derived and/or modified sequence
MAKRSRGPGRRCLLALVLFCAWGTLAVVAQKPGAGCPSRCLCFRTTVRCMHLLLEAVPAVAPQTSILDLRFNRIREIQPGAFRRLRNLNTLLLNNNQIKRIPSGAFEDLENLKYLYLYKNEIQSIDRQAFKGLASLEQLYLHFNQIETLDPDSFQHLPKLERLFLHNNRITHLVPGTFNHLESMKRLRLDSNTLHCDCEILWLADLLKTYAESGNAQAAAICEYPRRIQGRSVATITPEELNCERPRITSEPQDADVTSGNTVYFTCRAEGNPKPEIIWLRNNNELSMKTDSRLNLLDDGTLMIQNTQETDQGIYQCMAKNVAGEVKTQEVTLRYFGSPARPTFVIQPQNTEVLVGESVTLECSATGHPPPRISWTRGDRTPLPVDPRVNITPSGGLYIQNVVQGDSGEYACSATNNIDSVHATAFIIVQALPQFTVTPQDRVVIEGQTVDFQCEAKGNPPPVIAWTKGGSQLSVDRRHLVLSSGTLRISGVALHDQGQYECQAVNIIGSQKVVAHLTVQPRVTPVFASIPSDTTVEVGANVQLPCSSQGEPEPAITWNKDGVQVTESGKFHISPEGFLTINDVGPADAGRYECVARNTIGSASVSMVLSVNVPDVSRNGDPFVATSIVEAIATVDRAINSTRTHLFDSRPRSPNDLLALFRYPRDPYTVEQARAGEIFERTLQLIQEHVQHGLMVDLNGTSYHYNDLVSPQYLNLIANLSGCTAHRRVNNCSDMCFHQKYRTHDGTCNNLQHPMWGASLTAFERLLKSVYENGFNTPRGINPHRLYNGHALPMPRLVSTTLIGTETVTPDEQFTHMLMQWGQFLDHDLDSTVVALSQARFSDGQHCSNVCSNDPPCFSVMIPPNDSRARSGARCMFFVRSSPVCGSGMTSLLMNSVYPREQINQLTSYIDASNVYGSTEHEARSIRDLASHRGLLRQGIVQRSGKPLLPFATGPPTECMRDENESPIPCFLAGDHRANEQLGLTSMHTLWFREHNRIATELLKLNPHWDGDTIYYETRKIVGAEIQHITYQHWLPKILGEVGMRTLGEYHGYDPGINAGIFNAFATAAFRFGHTLVNPLLYRLDENFQPIAQDHLPLHKAFFSPFRIVNEGGIDPLLRGLFGVAGKMRVPSQLLNTELTERLFSMAHTVALDLAAINIQRGRDHGIPPYHDYRVYCNLSAAHTFEDLKNEIKNPEIREKLKRLYGSTLNIDLFPALVVEDLVPGSRLGPTLMCLLSTQFKRLRDGDRLWYENPGVFSPAQLTQIKQTSLARILCDNADNITRVQSDVFRVAEFPHGYGSCDEIPRVDLRVWQDCCEDCRTRGQFNAFSYHFRGRRSLEFSYQEDKPTKKTRPRKIPSVGRQGEHLSNSTSAFSTRSDASGTNDFREFVLEMQKTITDLRTQIKKLESRLSTTECVDAGGESHANNTKWKKDACTICECKDGQVTCFVEACPPATCAVPVNIPGACCPVCLQKRAEEKP

SEQ ID NO: 173754 - protein, 723 aa, Artificial Sequence
  derived and/or modified sequence
  misc_feature (1)..(1): Xaa can be any naturally occurring amino acid
XRGPGRRCLLALVLFCAWGTLAVVAQKPGAGCPSRCLCFRTTVRCMHLLLEAVPAVAPQTSILDLRFNRIREIQPGAFRRLRNLNTLLLNNNQIKRIPSGAFEDLENLKYLYLYKNEIQSIDRQAFKGLASLEQLYLHFNQIETLDPDSFQHLPKLERLFLHNNRITHLVPGTFNHLESMKRLRLDSNTLHCDCEILWLADLLKTYAESGNAQAAAICEYPRRIQGRSVATITPEELNCERPRITSEPQDADVTSGNTVYFTCRAEGNPKPEIIWLRNNNELSMKTDSRLNLLDDGTLMIQNTQETDQGIYQCMAKNVAGEVKTQEVTLRYFGSPARPTFVIQPQNTEVLVGESVTLECSATGHPPPRISWTRGDRTPLPVDPRVNITPSGGLYIQNVVQGDSGEYACSATNNIDSVHATAFIIVQALPQFTVTPQDRVVIEGQTVDFQCEAKGNPPPVIAWTKGGSQLSVDRRHLVLSSGTLRISGVALHDQGQYECQAVNIIGSQKVVAHLTVQPRVTPVFASIPSDTTVEVGANVQLPCSSQGEPEPAITWNKDGVQVTESGKFHISPEGFLTINDVGPADAGRYECVARNTIGSASVSMVLSVNVPDVSRNGDPFVATSIVEAIATVDRAINSTRTHLFDSRPRSPNDLLALFRYPRDPYTVEQARAGEIFERTLQLIQEHVQHGLMVDLNGTSQCQSLFFLLHGLSNGVEHASVKSHS

SEQ ID NO: 173755 - DNA, 4440 bp, Artificial Sequence
  derived and/or modified sequence
atggcgaagcgatccagagggcctggccgccgatgcctgcttgctctcgttctcttctgtgcgtggggtaccctggcagtggtcgcacagaaaccaggggcgggatgccccagtaggtgtctttgtttccgcaccacagtgagatgcatgcacctcctcctcgaggccgtgcccgcggttgcccctcaaacctcaatcttggatctacgctttaatcgaattagagaaatccagcccggcgccttcagaaggctgagaaatttgaatacactgttactgaataacaaccaaattaagcgtataccttcgggcgctttcgaggatcttgaaaatctgaagtacctgtatctgtacaagaatgaaattcagagcatcgatagacaggcttttaaggggttagcctcacttgaacagctttaccttcacttcaaccagatagagacactagatccagacagtttccaacacctgcctaagctggagcgcctgttcttacataacaaccggatcacacatctggttccaggtactttcaatcacttggagagcatgaagagactgaggctggactctaacacattacactgcgattgtgaaatcctttggctcgctgacctgttgaaaacctatgccgagtcgggtaacgcccaggccgccgccatctgtgaataccctcgcaggatccagggccgtagtgtggcaactatcacccctgaagaactaaattgcgagcgaccacgcatcacctcagagccacaggatgccgatgtcacctccggcaacaccgtctattttacttgtcgagccgaaggtaatcccaaaccagaaataatttggctcaggaacaataacgagctctcaatgaagactgactctaggctgaatctgctggacgacggtactctgatgattcagaacacgcaggagaccgatcaagggatctaccagtgcatggcaaagaatgtggcaggggaggtcaaaacgcaggaagtcactcttcggtacttcggaagtcctgctcgacccacgtttgttatccaaccccaaaataccgaggtccttgtgggtgagtcagtgacgctagaatgtagtgccaccggacacccacccccacgtatcagctggactcggggcgataggaccccactgccagtcgacccccgcgtgaacattaccccatccggagggttgtatatccagaatgtggtacagggagatagcggagagtacgcttgttctgctacaaacaatattgactcagtgcatgccaccgcctttattattgttcaggcactgcctcagttcacggtgaccccacaagatcgggtggtcattgaggggcaaactgtcgactttcagtgtgaagctaaaggaaatccaccaccagtgatcgcctggaccaagggtggttctcagttgtccgttgaccggcgccatctggtgctgtcctccgggacccttcggatcagcggcgtggccttacacgatcaaggccagtacgaatgtcaggccgtaaatattatcgggtcccaaaaagtagtcgcccaccttacagtgcagccccgcgtaacaccagtgttcgcctccatcccatccgataccacagttgaagtgggcgcgaacgtacaacttccatgttcatcccagggcgagccagaacccgccatcacgtggaacaaagatggtgtgcaggtgacagaatccgggaaatttcatatcagtcccgaaggcttccttaccattaatgacgtaggcccagctgatgcaggcagatacgaatgcgtggctagaaatacaattggaagcgcctccgtaagcatggtcctgtccgtcaacgtgcctgatgtgtccagaaacggggacccttttgtggccacctccatcgtggaggctattgccacagtggatcgggcgatcaattctacacgcacacaccttttcgacagccgcccccgcagccctaatgatttactcgccctgtttaggtaccctcgtgacccctatacagttgaacaggcacgagccggagagatcttcgagcggacacttcagctgatccaagagcacgtgcagcatggcttgatggtggacctgaacggcacttcatatcactacaacgatcttgtctccccacagtacctcaacctgattgctaatcttagcgggtgtactgcccatcggcgcgttaacaactgctcagacatgtgctttcaccagaaatatcgaacccatgatggtacctgcaataatctgcaacaccctatgtggggagcctccctgaccgctttcgagcgattgctaaaatcggtatatgagaatggctttaataccccccgcggcatcaatccacaccgcctgtataacggacatgctttgccaatgccacggctggtctcgaccactctgataggcaccgagactgtcacccccgatgagcaattcacccacatgctcatgcaatgggggcagtttttggaccatgaccttgatagcactgtggtggccttatcccaggccaggttctctgacggtcagcactgttccaatgtgtgctccaatgatcctccatgttttagtgtaatgatccccccaaatgattctcgggcccgctcaggagcaagatgtatgttctttgtgagatcaagcccagtttgcggtagcgggatgactagcctgctaatgaatagcgtctacccacgggagcagatcaaccagctgacctcttacattgacgcttccaacgtgtatggctcaaccgagcatgaagcacgctcgatacgcgacctggcctcccaccgcggcctgctgcgacagggaattgtccaacggtcaggcaagccgctattaccttttgccaccggccctcccaccgagtgcatgagggatgaaaacgagtcccccatcccctgttttctggcaggcgaccatcgggcaaacgagcagcttggacttacatctatgcacacactctggttccgggagcacaatcgcattgctaccgaacttctgaaactcaaccctcattgggatggggatactatctattacgaaactcgtaaaatagtaggggcagaaattcagcacatcacttaccagcactggctcccaaaaatccttggggaggtaggcatgcggacactgggggagtatcatggatatgaccctggaattaacgctgggatctttaatgccttcgccacagctgctttcaggtttggacacactctggtcaacccacttttatatagacttgacgaaaatttccagcctatcgcccaagatcaccttccgcttcataaggcatttttttcaccattccgcatagtaaacgaagggggaattgatcccctgcttaggggcctgtttggcgtcgctggaaaaatgcgggtgcccagtcagctgctgaacaccgagctcactgaacggttgttctcgatggcgcatacagtcgcactggatttggccgctattaatatccaacgcgggcgagaccatggaatacccccttaccacgactaccgcgtgtactgcaatctgtcagctgcacacacattcgaggatttgaagaatgaaatcaaaaacccagagatacgcgaaaaactaaagcgcctatacgggtctaccttgaacatcgacctgttcccggcactggtggttgaagatctagtgcccggtagtcgactcggtcctacgctcatgtgcctcctttcaacgcagtttaaaagactgagagacggtgataggctttggtatgaaaaccctggggtattctctcctgcgcagttaacacaaattaagcagacctcattggctaggatcctctgtgacaatgccgacaatataaccagggtgcaatcggacgtgtttcgggtggctgaattccctcatggatatgggtcatgcgacgagattccccgggtcgaccttcgagtttggcaggattgctgcgaggactgccgtacacggggacagtttaacgctttctcatatcattttcgcgggaggaggagcctggagttttcctaccaggaagataagcccacgaaaaagacgcggccaaggaagattcctagcgtagggcgacaaggcgaacacctcagcaatagtacatccgccttcagcacccgctctgacgcctcagggaccaacgattttcgcgagttcgtgctggaaatgcagaagactattaccgatctgcgaactcagataaaaaaactggagagccggctaagcacaacagaatgcgttgatgctggcggggagtctcacgcaaataacaccaagtggaaaaaggatgcctgtacaatttgcgaatgcaaagacggccaggtgacatgctttgtggaagcctgtccgcccgccacttgcgcagttccagtcaatatccccggcgcctgttgccctgtctgtcttcagaaaagagcagaagagaaaccatag

SEQ ID NO: 173756 - DNA, 2172 bp, Artificial Sequence
  derived and/or modified sequence
taaagggggcccgggaggaggtgtctgcttgctcttgtcctgttctgcgcctggggaactctcgcggtcgtggctcaaaagccaggtgccgggtgccccagcagatgcctctgctttaggactacggtgcggtgtatgcacttgttgcttgaggccgtgccagccgtcgctcctcagaccagtatcctcgatcttagattcaatcggattagagagattcagccgggggcatttagaagactgcggaatctgaacacattgttactgaataacaatcagataaagagaattcccagtggcgcatttgaggatcttgaaaatctgaagtacctgtatctgtacaagaacgagatacagagtattgaccgccaagccttcaaaggactggcaagtctggagcagctttacctgcatttcaaccagatagagacgctcgatcccgactcctttcagcacctcccaaaactggaaagactcttcctccacaacaaccgcataacccacttggtgccagggacgtttaatcatttggagtcaatgaaacggttgcgactggactctaacaccctgcattgtgattgtgagattttatggctggcggacttgctgaagacttatgctgagagcggaaatgcacaggccgctgctatctgcgagtatccgaggcggatccagggcaggagcgtggccacaatcacacccgaagagctgaactgtgagcgcccccgcatcacatccgaaccccaagacgcagacgtcaccagcggaaatacagtgtacttcacatgcagggccgaaggcaaccccaagcctgagatcatctggctacgcaataataacgagctttctatgaagaccgatagtcggttaaatctgctagacgatggcaccttgatgatccagaatactcaggagaccgaccagggcatctaccagtgtatggccaagaacgtggctggcgaagtaaaaacgcaagaggttaccctgaggtacttcggctctccagcacgtcctactttcgtcattcagccacagaacactgaagtgctggttggagaatccgtgacattggaatgctcggctactggccacccacctccaagaatatcatggactcggggtgaccgaaccccgcttcctgtcgatcctcgcgttaacataactccatcaggaggtctctacatccagaacgtggttcagggcgactccggtgaatacgcatgctccgctaccaacaatatagatagcgtccatgccactgccttcatcattgtgcaggccctccctcagtttaccgtgacaccccaggatagagtcgtgattgaaggccagacagtcgattttcagtgtgaggcaaagggcaatccaccccctgtaatcgcctggaccaagggtggctcccagctcagcgtcgaccgtcgtcacttggtgctcagcagcggcaccttgcgcatcagtggagtggcactgcacgatcagggacagtatgaatgtcaagcagtgaatatcatcgggagccaaaaagtcgttgcccaccttaccgtccaacctcgggtcaccccagttttcgctagcattccctcggataccacagtcgaggtgggcgccaatgttcagctgccttgtagctcccagggggagcccgagccagcgattacttggaacaaagatggcgtccaggtgacagaaagcggtaagttccacatatcaccggagggcttcctgacaatcaacgatgtgggacctgcagatgcaggtagatatgaatgcgtggcccggaacactataggatccgctagtgtttcgatggtcctcagcgtgaatgtgccggacgtgtctaggaatggtgatccttttgttgcaacctccattgtggaggccatagccactgtggatcgtgctattaacagtactcgaactcacctgttcgacagcaggccacgttcacctaatgatctgttggcacttttccggtatccaagagacccttacactgttgagcaagctcgcgctggcgagatcttcgagagaacattgcagctgatccaggagcacgtccagcacgggcttatggtggatttgaacggcacaagtcagtgccagagcttgttctttctgctgcacggtctcagcaacggtgtcgagcacgcctccgtgaagtcccactcctag

SEQ ID NO: 173757 - DNA, 4440 bp, Artificial Sequence
  derived and/or modified sequence
atggccaagaggagccggggccctggccgccgctgcctgctggccctggtgctcttctgtgcctggggcaccctggccgtggtggcccagaagccaggggccggctgccccagccgctgcctgtgcttccgcaccaccgtgcgctgcatgcacctgctgctggaggccgtgcctgctgtggccccccagaccagcatcctggacctgcgcttcaaccgcatccgggagatccagcccggggccttccggcggctgaggaacctgaacaccctgctgctgaacaacaaccagatcaagaggatccccagcggggcctttgaggacctggagaacctgaagtacctgtacctgtacaagaatgagatccagagcattgaccggcaggccttcaagggcctggccagcctggagcagctgtacctgcacttcaaccagatcgagaccctggaccctgacagcttccagcacctgcccaagctggagcggctcttcctgcacaacaaccgcatcacccacctggtgcccggcaccttcaaccacctggagagcatgaagaggctgcggctggacagcaacaccctgcactgtgactgtgagatcctgtggctggccgacctgctgaagacctatgcagagagcggaaatgcccaggccgccgccatctgtgagtacccccggcgcatccagggccgctctgtggccaccatcaccccagaggagctgaactgtgagcggccccgcatcaccagcgagccccaggatgctgatgtgaccagcggcaacacagtgtacttcacctgcagagctgagggcaaccccaagccagagatcatctggctgaggaacaacaatgagctgtccatgaagacagacagccggctgaacctgctggatgatggcaccctgatgatccagaacacccaggagacagaccagggcatctaccagtgcatggccaagaatgtggccggggaggtgaagacccaggaggtgaccctgcgctacttcggcagccctgcccggcccaccttcgtcatccagccccagaacacagaggtgctggtgggggagagcgtgaccctggagtgcagcgccaccggccaccccccaccccgcatctcctggaccaggggggacaggacccccctgcctgtggacccccgggtgaacatcacccccagcggcggcctgtacatccagaatgtggtgcagggcgacagcggggagtatgcctgcagcgccaccaacaacatcgacagcgtgcacgccacagccttcatcatcgtgcaggccctgccccagttcaccgtgaccccccaggacagagtggtgattgagggccagacagtggacttccagtgtgaggccaagggcaaccccccacctgtgattgcctggaccaagggcggcagccagctgtctgtggacagaagacacctggtgctgagcagcggcaccctgcgcatcagcggcgtggccctgcatgaccagggccagtatgagtgccaggccgtgaacatcatcggcagccagaaggtggtggcccacctgactgtgcagccccgggtgacccctgtgtttgccagcatccccagcgacaccaccgtggaggtgggcgccaacgtgcagctgccctgcagcagccagggcgagcctgagcccgccatcacctggaacaaggatggagtgcaggtgacagagagcggcaagttccacatcagccctgagggcttcctgaccatcaatgatgtgggccctgcagatgctggccgctatgaatgtgtggccaggaacaccatcggcagcgcctctgtgtccatggtgctgtctgtgaatgtgcctgatgtgtccagaaatggagacccctttgtggccaccagcatcgtggaggccatcgccaccgtggaccgggccatcaacagcaccaggacccacctgtttgacagccggcccaggagccccaatgacctgctggccctcttccgctacccccgggacccctacacagtggagcaggcccgggccggggagatctttgagaggaccctgcagctgatccaggagcacgtgcagcacggcctgatggtggacctgaatggcaccagctaccactacaatgacctggtgagcccccagtacctgaacctgattgccaacctgagcggctgcacagcccacagaagagtgaacaactgcagcgacatgtgcttccaccagaagtaccgcacccatgatggcacctgcaacaacctgcagcaccccatgtggggcgccagcctgacagcctttgagcggctgctgaagtctgtgtatgaaaatggcttcaacaccccccggggcatcaacccccaccggctgtacaacggccacgccctgcccatgccccggctggtgtccaccaccctgattggaacagaaacagtgaccccagatgagcagttcacccacatgctgatgcagtggggccagttcctggaccatgacctggacagcacagtggtggccctgagccaggcccgcttcagtgatggccagcactgcagcaatgtgtgcagcaatgaccccccctgcttctctgtgatgatccccccaaatgacagccgggcccggagcggggcccgctgcatgttctttgtgcgcagcagccctgtgtgtggcagcggcatgaccagcctgctgatgaacagcgtgtacccccgggagcagatcaaccagctgaccagctacattgatgccagcaatgtgtatggcagcacagaacatgaggcccggagcatccgggacctggccagccaccggggcctgctgcggcagggcatcgtgcagaggtctgggaagcccctgctgccctttgccactggaccacccacagagtgcatgagagatgaaaatgaaagccccatcccctgcttcctggccggggaccaccgggccaatgagcagctgggcctgacctccatgcacaccctgtggttccgggagcacaaccgcatcgccacagagctgctgaagctgaacccccactgggatggagacaccatctactatgagaccaggaagatcgtgggcgctgagatccagcacatcacctaccagcactggctgcccaagatcctgggggaggtgggcatgaggaccctgggggagtaccacggctatgaccccggcatcaatgccggcatcttcaatgcctttgccacagctgccttccgcttcggccacaccctggtgaaccccctgctgtaccgcctggatgagaacttccagcccatcgcccaggaccacctgcccctgcacaaggccttcttcagccccttccgcatcgtgaatgaaggaggcatcgaccccctgctgcggggcctgtttggagtggccggcaagatgagggtgcccagccagctgctgaacacagagctgacagagcggctcttctccatggcccacacagtggccctggacctggccgccatcaacatccagaggggccgggaccacggcatccccccctaccatgactacagagtgtactgcaacctgtctgctgcccacacctttgaggacctgaagaatgagatcaagaaccctgagatccgggagaagctgaagaggctgtatggcagcaccctgaacatcgacctcttccctgccctggtggtggaggacctggtgcccggcagccggctgggccccaccctgatgtgcctgctgagcacccagttcaagaggctgagagatggagaccggctgtggtatgagaaccctggggtcttctccccagcccagctgacccagatcaagcagaccagcctggcccgcatcctgtgtgacaatgctgacaacatcaccagggtgcagagtgatgtgttccgggtggccgagttcccccacggctacggcagctgtgatgagatcccccgggtggacctgcgggtgtggcaggactgctgtgaggactgcaggacccggggccagttcaatgccttctcctaccacttccggggcagaagaagcctggagttctcctaccaggaggacaagcccaccaagaagacccggcccaggaagatccccagcgtgggccggcagggcgagcacctgagcaacagcaccagcgccttcagcaccaggagtgatgccagcggcaccaatgacttccgggagtttgtgctggagatgcagaagaccatcacagacctgcggacccagatcaagaagctggagagccggctgagcaccacagaatgtgtggatgctggaggagagagccacgccaacaacaccaagtggaagaaggatgcctgcaccatctgtgagtgcaaggatggccaggtgacctgctttgtggaggcctgccccccagccacctgtgctgtgcctgtgaacatccctggggcctgctgccctgtgtgcctgcagaagagagctgaggagaagccctag

SEQ ID NO: 173758 - DNA, 2172 bp, Artificial Sequence
  derived and/or modified sequence
tgaagaggccctggccgccgctgcctgctggccctggtgctcttctgtgcctggggcaccctggccgtggtggcccagaagccaggggccggctgccccagccgctgcctgtgcttccgcaccaccgtgcgctgcatgcacctgctgctggaggccgtgcctgctgtggccccccagaccagcatcctggacctgcgcttcaaccgcatccgggagatccagcccggggccttccggcggctgaggaacctgaacaccctgctgctgaacaacaaccagatcaagaggatccccagcggggcctttgaggacctggagaacctgaagtacctgtacctgtacaagaatgagatccagagcattgaccggcaggccttcaagggcctggccagcctggagcagctgtacctgcacttcaaccagatcgagaccctggaccctgacagcttccagcacctgcccaagctggagcggctcttcctgcacaacaaccgcatcacccacctggtgcccggcaccttcaaccacctggagagcatgaagaggctgcggctggacagcaacaccctgcactgtgactgtgagatcctgtggctggccgacctgctgaagacctatgcagagagcggaaatgcccaggccgccgccatctgtgagtacccccggcgcatccagggccgctctgtggccaccatcaccccagaggagctgaactgtgagcggccccgcatcaccagcgagccccaggatgctgatgtgaccagcggcaacacagtgtacttcacctgcagagctgagggcaaccccaagccagagatcatctggctgaggaacaacaatgagctgtccatgaagacagacagccggctgaacctgctggatgatggcaccctgatgatccagaacacccaggagacagaccagggcatctaccagtgcatggccaagaatgtggccggggaggtgaagacccaggaggtgaccctgcgctacttcggcagccctgcccggcccaccttcgtcatccagccccagaacacagaggtgctggtgggggagagcgtgaccctggagtgcagcgccaccggccaccccccaccccgcatctcctggaccaggggggacaggacccccctgcctgtggacccccgggtgaacatcacccccagcggcggcctgtacatccagaatgtggtgcagggcgacagcggggagtatgcctgcagcgccaccaacaacatcgacagcgtgcacgccacagccttcatcatcgtgcaggccctgccccagttcaccgtgaccccccaggacagagtggtgattgagggccagacagtggacttccagtgtgaggccaagggcaaccccccacctgtgattgcctggaccaagggcggcagccagctgtctgtggacagaagacacctggtgctgagcagcggcaccctgcgcatcagcggcgtggccctgcatgaccagggccagtatgagtgccaggccgtgaacatcatcggcagccagaaggtggtggcccacctgactgtgcagccccgggtgacccctgtgtttgccagcatccccagcgacaccaccgtggaggtgggcgccaacgtgcagctgccctgcagcagccagggcgagcctgagcccgccatcacctggaacaaggatggagtgcaggtgacagagagcggcaagttccacatcagccctgagggcttcctgaccatcaatgatgtgggccctgcagatgctggccgctatgaatgtgtggccaggaacaccatcggcagcgcctctgtgtccatggtgctgtctgtgaatgtgcctgatgtgtccagaaatggagacccctttgtggccaccagcatcgtggaggccatcgccaccgtggaccgggccatcaacagcaccaggacccacctgtttgacagccggcccaggagccccaatgacctgctggccctcttccgctacccccgggacccctacacagtggagcaggcccgggccggggagatctttgagaggaccctgcagctgatccaggagcacgtgcagcacggcctgatggtggacctgaatggcaccagccagtgccagagcctcttcttcctgctgcacggcctgagcaatggagtggagcacgcctctgtgaagagccacagctag

SEQ ID NO: 173759 - DNA, 4440 bp, Artificial Sequence
  derived and/or modified sequence
atggccaagcggagccggggccccggccggcggtgcctgctggccttggtgctcttttgtgcttggggtaccctggcagtcgtggcccagaagcctggtgctggctgcccttctcgctgcctgtgttttaggactaccgtacgatgcatgcacctacttcttgaggcagtccctgccgtcgcgcctcagacctcgattctcgatctgcgctttaacaggatccgggaaatccaaccgggcgccttcaggaggttacggaacctcaatacccttcttctcaataataatcagatcaaaaggattcctagtggcgcgtttgaggatctggagaatctgaagtacctctatctgtataaaaatgaaattcagtctatagaccggcaggccttcaaagggttggccagcctggaacagctgtatctgcactttaatcaaatagagacgttggatcctgattcctttcaacacttaccaaagctcgaaagattgttcttgcacaacaatcggattacccatctggttcctggcacattcaaccatttagaatctatgaagcgactccgcttggactccaatactttacactgcgactgtgagatcttgtggctagcagacctgttaaaaacgtatgccgaatctgggaatgctcaggctgcggctatctgcgaataccctcgccggatacagggccggtccgtggccactatcacacccgaggagctgaactgtgagcgaccccgcattacaagtgagccgcaggacgcggatgtcacttcagggaacacagtgtacttcacctgcagagctgagggtaacccgaaaccagagatcatttggctgagaaacaataatgagctgtctatgaagaccgattctcggctgaatctgctggacgatggaacactaatgattcagaacacgcaagagactgaccagggaatctaccagtgtatggcgaagaatgtggctggcgaagtgaaaacccaggaggtcacgctgagatacttcggctccccagcccgacctacattcgtaattcaaccacaaaataccgaggtactagttggagagtccgtcactttggaatgtagcgccacgggacatcctcctccacggatttcttggacccgaggggatcgcacgcccctgccagtggatccacgggttaatataacaccttctggtggcctctatatccagaatgtcgttcagggggattccggagagtacgcctgcagtgccactaataatatcgattctgtccatgccacggccttcataattgtccaggctttgccacagttcaccgtgactccccaggatcgcgtagttatagaagggcagaccgtcgatttccagtgcgaagctaagggaaacccacctcccgtgatagcatggaccaagggtggctctcagcttagcgtagaccgaagacatttggtgctgtcctctggcacacttagaatctcgggcgtagccctgcacgaccagggacaatacgagtgtcaagctgtgaatattattggtagtcaaaaggtggtcgcccaccttaccgtgcagccccgcgtgacaccagtcttcgcatccattccgagcgacaccacggtagaagtcggcgccaacgtgcaactgccatgctcctcccagggcgagcccgaacccgcaatcacctggaataaggacggggtccaagtgaccgaatctggaaaattccatataagccctgaagggtttctcaccatcaacgacgtggggcctgcagacgctggacggtatgagtgcgtggcacggaatacaataggctctgcctcggtgtccatggtactgtctgtgaacgtgccggatgttagtaggaacggcgacccttttgtagctacgtctatcgtcgaggcgattgccacagtggaccgcgctattaattcgactaggacacacttgttcgatagtcggccccggtcaccgaatgatctgctggcccttttccggtacccgagggatccttatacagtcgaacaggccagagccggcgagattttcgaacgcacccttcagctgattcaggaacacgtgcagcacgggctgatggtggatctgaatggaaccagttaccattataatgatttagtgagcccccagtaccttaacctgattgctaatctatcagggtgcacggcccacaggcgcgttaataactgctcagacatgtgtttccatcagaagtaccgcacacacgatggcacatgtaataacctgcagcacccaatgtggggagcatccttgacagccttcgaacgcctgctcaagtcagtgtatgagaacggttttaataccccccggggtatcaatcctcacaggctttacaacgggcacgccctgcccatgccccgcctggtttctacaaccctaataggtaccgaaactgtgacccctgacgaacaatttacacatatgctgatgcagtggggtcagttcctggatcatgacctggacagtacagtcgtggcactgtctcaggcacgcttctccgatggccaacactgcagcaacgtatgttctaatgatcctccgtgttttagtgtcatgatccctcctaacgactccagagcacggagcggggcccggtgcatgtttttcgttcgaagctcacccgtatgtgggtctggcatgaccagcctcttaatgaattcggtgtatccacgtgaacagattaaccagttgacatcttatattgatgccagcaacgtttacggtagcaccgaacacgaggcacggagtattagggatttggctagtcacagggggctgcttcgccagggaatagtgcagcgatccgggaagccgctgctgccatttgcaaccggacctcctactgagtgtatgagagatgaaaatgagtctccaattccgtgcttcctggccggagatcaccgtgccaacgaacagcttggcttaacttcgatgcataccctgtggttccgagagcataatcgtatcgcgaccgaactactgaagctcaacccgcattgggatggcgacaccatctactacgagacccggaagatagttggagcggagattcagcacatcacctaccaacattggttgcctaaaatcctcggcgaagttggaatgcgaaccttgggggaatatcatggatatgatcctggcatcaacgctggaatcttcaatgctttcgctacagcagcattccggttcggccacaccttggtaaaccccctgctttaccggctcgacgagaatttccagccaatcgctcaagaccaccttcccttgcacaaagcctttttcagccccttcagaattgtgaatgaagggggcattgatccactgctgcgcgggctgtttggcgtagccggtaagatgcgggtcccctctcagcttctcaacacggaactgacggagaggctcttctccatggcccacacagtggcactggacctcgctgctatcaacatacagagaggacgcgatcacgggatccccccctatcacgattacagggtctattgcaacctttcggctgctcatacattcgaagatctgaaaaacgaaattaagaaccccgagatccgcgaaaagttgaaaagactatacgggagtactctgaacatagacctgtttcccgcgttagtggttgaggatctggtgccaggcagcaggctcggacctacactgatgtgtcttcttagcacacagttcaagaggctgcgcgacggagacagactatggtacgagaatccgggtgtattcagccctgcccagctgacccaaatcaagcaaaccagcctagctcgcattctgtgcgataatgcagacaatattaccagggtccagagtgatgtgtttcgagtggccgagtttccgcacgggtacggctcttgtgatgaaattccccgcgtggatctccgcgtctggcaggactgctgtgaagattgcagaacgcggggccagttcaacgccttttcctaccatttccggggccggcggtccctggaattttcttaccaagaggacaaaccaacgaagaaaacacgcccccggaaaattcccagcgtaggtcgtcagggtgagcatctgagtaatagcacctccgcctttagcacgaggtccgacgcatcaggaaccaacgactttcgggagtttgtgctcgagatgcagaaaaccattacagatctgagaacgcagataaagaagctagagagcagactgagcactactgagtgcgtcgacgccggcggcgaaagccatgcaaacaacactaagtggaaaaaagacgcctgcacgatttgcgagtgcaaagatgggcaggttacttgctttgttgaggcctgtcctcctgctacttgcgcagtccccgtgaatattcccggcgcgtgttgcccagtttgcttgcagaaacgggccgaggagaagccctag

SEQ ID NO: 173760 - DNA, 2172 bp, Artificial Sequence
  derived and/or modified sequence
tgacggggccccggccggcggtgcctgctggccctggtgctgttctgtgcgtggggaaccctagcggtggtggcccaaaaacctggagctggttgcccgagtcgttgtctttgctttagaacgactgtgaggtgcatgcatctactgctagaggctgttccagcagtcgcccctcagacctccattctcgacttaaggttcaatagaatacgagagatacagcctggcgccttccgtcgtctgcggaatttgaatactctgctgctgaataataaccagattaaaaggattccgagcggggccttcgaagatctggagaacctgaaatatctgtatctctataaaaacgagatccagagtattgaccgccaggcattcaagggtctcgcgtcacttgaacagctgtatcttcactttaatcagatcgagacactggatccggacagttttcagcatcttcctaagctggaacgcctcttcctacacaataacagaattacacacctcgttcccggaacattcaatcacttagaaagcatgaaacgcctgcgactcgacagtaacacattgcactgtgattgcgagatcctgtggttagccgatctgctgaagacatatgcggagtctggaaacgctcaggcagcagctatctgtgagtaccccagacggattcagggacgatctgtcgcaacaattacgcctgaggagttaaactgtgagaggcctcggattaccagcgagccccaggatgcggacgtgacatcagggaacactgtgtacttcacctgtagggccgaaggtaaccccaaaccagaaataatttggttacggaacaataatgagctgtccatgaagaccgattcccggctcaacctgctggatgacggtacactgatgatacagaatacacaggagaccgatcagggtatctatcagtgcatggccaaaaatgtggctggagaggtcaaaactcaagaagttacattacggtactttggcagcccagcacgccctactttcgtcattcaaccgcaaaacaccgaagtgctggttggcgagagtgtaacactggagtgctcagccacagggcatccgcctccaaggatcagttggaccagaggggatcgcacacctctaccagttgaccccagggtgaacatcaccccttccggaggtttgtacattcagaatgtggttcagggcgacagcggagaatatgcatgtagcgcaaccaataacattgacagcgtccacgctaccgcattcattatcgttcaggcattgccgcagttcacggtgaccccacaggaccgggttgtcatagaagggcagaccgttgactttcagtgcgaggctaaagggaatccgccgccagtcatagcctggactaaaggcggctcccagctgagtgtggataggagacacctggtgctcagcagcggtacattgcgcatcagcggcgtcgctttgcatgaccagggccagtacgaatgtcaggcagtgaacatcattggaagtcagaaggtagtggcccatctgactgtgcagccccgcgtgactcctgtcttcgcctccataccatccgacactactgtggaggttggcgctaatgtgcaactgccgtgtagctctcagggtgagcctgagccggccatcacttggaataaggatggtgtccaggtcaccgagtctgggaagttccacatctcccctgaagggttcctgacaataaacgatgtggggcccgcagacgccgggcgttacgagtgcgtggctcgtaacaccatcggctccgcctctgtgagtatggttctgagtgtgaatgtcccagatgtgtcacgaaatggagacccttttgttgctacaagcatagttgaagccatcgcaaccgtagatcgggcgatcaactcaacacgtacacacctattcgactctcgcccccgctcgcccaacgaccttttagctctcttccggtatccaagggacccgtacaccgtcgagcaagctcgcgccggtgaaatcttcgaaaggaccttgcagcttattcaagagcatgtgcaacacggcttgatggttgatctcaatggtacctcacagtgccagagtctgtttttcctcttacacggcctttcaaacggggtggagcacgcctcagtcaaatctcactcatag

SEQ ID NO: 173761 - DNA, 6808 bp, Artificial Sequence
  derived and/or modified sequence
agccggccgtggtggctccgtgcgtccgagcgtccgtccgcgccgtcggccatggccaagcgctccaggggccccgggcgccgctgcctgttggcgctcgtgctgttctgcgcctgggggacgctggccgtggtggcccagaagccgggcgcagggtgtccgagccgctgcctgtgcttccgcaccaccgtgcgctgcatgcatctgctgctggaggccgtgcccgccgtggcgccgcagacctccatcctagatcttcgctttaacagaatcagagagatccaacctggggcattcaggcggctgaggaacttgaacacattgcttctcaataataatcagatcaagaggatacctagtggagcatttgaagacttggaaaatttaaaatatctctatctgtacaagaatgagatccagtcaattgacaggcaagcatttaagggacttgcctctctagagcaactatacctgcactttaatcagatagaaactttggacccagattcgttccagcatctcccgaagctcgagaggctatttttgcataacaaccggattacacatttagttccagggacatttaatcacttggaatctatgaagagattgcgactggactcaaacacacttcactgcgactgtgaaatcctgtggttggcggatttgctgaaaacctacgcggagtcggggaacgcgcaggcagcggccatctgtgaatatcccagacgcatccagggacgctcagtggcaaccatcaccccggaagagctgaactgtgaaaggccccggatcacctccgagccccaggacgcagatgtgacctcggggaacaccgtgtacttcacctgcagagccgaaggcaaccccaagcctgagatcatctggctgcgaaacaataatgagctgagcatgaagacagattcccgcctaaacttgctggacgatgggaccctgatgatccagaacacacaggagacagaccagggtatctaccagtgcatggcaaagaacgtggccggagaggtgaagacgcaagaggtgaccctcaggtacttcgggtctccagctcgacccacttttgtaatccagccacagaatacagaggtgctggttggggagagcgtcacgctggagtgcagcgccacaggccaccccccgccgcggatctcctggacgagaggtgaccgcacacccttgccagttgacccgcgggtgaacatcacgccttctggcgggctttacatacagaacgtcgtacagggggacagcggagagtatgcgtgctctgcgaccaacaacattgacagcgtccatgccaccgctttcatcatcgtccaggctcttcctcagttcactgtgacgcctcaggacagagtcgttattgagggccagaccgtggatttccagtgtgaagccaagggcaacccgccgcccgtcatcgcctggaccaagggagggagccagctctccgtggaccggcggcacctggtcctgtcatcgggaacacttagaatctctggtgttgccctccacgaccagggccagtacgaatgccaggctgtcaacatcatcggctcccagaaggtcgtggcccacctgactgtgcagcccagagtcaccccagtgtttgccagcattcccagcgacacaacagtggaggtgggcgccaatgtgcagctcccgtgcagctcccagggcgagcccgagccagccatcacctggaacaaggatggggttcaggtgacagaaagtggaaaatttcacatcagccctgaaggattcttgaccatcaatgacgttggccctgcagacgcaggtcgctatgagtgtgtggcccggaacaccattgggtcggcctcggtgagcatggtgctcagtgtgaatgttcctgacgtcagtcgaaatggagatccgtttgtagctacctccatcgtggaagcgattgcgactgttgacagagctataaactcaacccgaacacatttgtttgacagccgtcctcgttctccaaatgatttgctggccttgttccggtatccgagggatccttacacagttgaacaggcacgggcgggagaaatctttgaacggacattgcagctcattcaggagcatgtacagcatggcttgatggtcgacctcaacggaacaagttaccactacaacgacctggtgtctccacagtacctgaacctcatcgcaaacctgtcgggctgtaccgcccaccggcgcgtgaacaactgctcggacatgtgcttccaccagaagtaccggacgcacgacggcacctgtaacaacctgcagcaccccatgtggggcgcctcgctgaccgccttcgagcgcctgctgaaatccgtgtacgagaatggcttcaacacccctcggggcatcaacccccaccgactgtacaacgggcacgcccttcccatgccgcgcctggtgtccaccaccctgatcgggacggagaccgtcacacccgacgagcagttcacccacatgctgatgcagtggggccagttcctggaccacgacctcgactccacggtggtggccctgagccaggcacgcttctccgacggacagcactgcagcaacgtgtgcagcaacgaccccccctgcttctctgtcatgatcccccccaatgactcccgggccaggagcggggcccgctgcatgttcttcgtgcgctccagccctgtgtgcggcagcggcatgacttcgctgctcatgaactccgtgtacccgcgggagcagatcaaccagctcacctcctacatagacgcatccaacgtgtacgggagcacggagcatgaggcccgcagcatccgcgacctggccagccaccgcggcctgctgcggcagggcatcgtgcagcggtccgggaagccgctgctccccttcgccaccgggccgcccacggagtgcatgcgggacgagaacgagagccccatcccctgcttcctggccggggaccaccgcgccaacgagcagctgggcctgaccagcatgcacacgctgtggttccgcgagcacaaccgcattgccacggagctgctcaagctgaacccgcactgggacggcgacaccatctactatgagaccaggaagatcgtgggtgcggagatccagcacatcacctaccagcactggctcccgaagatcctgggggaggtgggcatgaggacgctgggagagtaccacggctacgaccccggcatcaatgctggcatcttcaacgccttcgccaccgcggccttcaggtttggccacacgcttgtcaacccactgctttaccggctggacgagaacttccagcccattgcacaagatcacctcccccttcacaaagctttcttctctcccttccggattgtgaatgagggcggcatcgatccgcttctcagggggctgttcggggtggcggggaaaatgcgtgtgccctcgcagctgctgaacacggagctcacggagcggctgttctccatggcacacacggtggctctggacctggcggccatcaacatccagcggggccgggaccacgggatcccaccctaccacgactacagggtctactgcaatctatcggcggcacacacgttcgaggacctgaaaaatgagattaaaaaccctgagatccgggagaaactgaaaaggttgtatggctcgacactcaacatcgacctgtttccggcgctcgtggtggaggacctggtgcctggcagccggctgggccccaccctgatgtgtcttctcagcacacagttcaagcgcctgcgagatggggacaggttgtggtatgagaaccctggggtgttctccccggcccagctgactcagatcaagcagacgtcgctggccaggatcctatgcgacaacgcggacaacatcacccgggtgcagagcgacgtgttcagggtggcggagttccctcacggctacggcagctgtgacgagatccccagggtagacctccgggtgtggcaggactgctgtgaagactgtaggaccagggggcagttcaatgccttttcctatcatttccgaggcagacggtctcttgagttcagctaccaggaggacaagccgaccaagaaaacaagaccacggaaaatacccagtgttgggagacagggggaacatctcagcaacagcacctcagccttcagcacacgctcagatgcatctgggacaaatgacttcagagagtttgttctggaaatgcagaagaccatcacagacctcagaacacagataaagaaacttgaatcacggctcagtaccacagagtgcgtggatgccgggggcgaatctcacgccaacaacaccaagtggaaaaaagatgcatgcaccatttgtgaatgcaaagacgggcaggtcacctgcttcgtggaagcttgcccccctgccacctgtgctgtccccgtgaacatcccaggggcctgctgtccagtctgcttacagaagagggcggaggaaaagccctaggctcctgggaggctcctcagagtttgtctgctgtgccatcgtgagatcgggtggccgatggcagggagctgcggactgcagaccaggaaacacccagaactcgtgacatttcatgacaacgtccagctggtgctgttacagaaggcagtgcaggaggcttccaaccagagcatctgcggagaaggaggcacagcaggtgcctgaagggaagcaggcaggagtcctagcttcacgttagacttctcaggtttttatttaattcttttaaaatgaaaaattggtgctactattaaattgcacagttgaatcatttaggcgcctaaattgattttgcctcccaacaccatttctttttaaataaagcaggatacctctatatgtcagccttgccttgttcagatgccaggagccggcagacctgtcacccgcaggtggggtgagtcttggagctgccagaggggctcaccgaaatcggggttccatcacaagctatgtttaaaaagaaaattggtgtttggcaaacggaacagaacctttgatgagagcgttcacagggacactgtctgggggtgcagtgcaagcccccggcctcttccctgggaacctctgaactcctccttcctctgggctctctgtaacatttcaccacacgtcagcatctaatcccaagacaaacattcccgctgctcgaagcagctgtatagcctgtgactctccgtgtgtcagctccttccacacctgattagaacattcataagccacatttagaaacaggtttgctttcagctgtcacttgcacacatactgcctagttgtgaaccaaatgtgaaaaaacctccttcatcccattgtgtatctgatacctgccgagggccaagggtgtgtgttgacaacgccgctcccagccggccctggttgcgtccacgtcctgaacaagagccgcttccggatggctcttcccaagggaggaggagctcaagtgtcgggaactgtctaacttcaggttgtgtgagtgcgttaaaaaaaaaaaaaaaaaagaatccctatacctcatttgtatttttaaaatgcgtgatgttttatgaaattgtgtccattttttaggtattagatatggcagaaaaaccatttccactatgcaaagttcttttagacgtcagtgaaaatcaactctcatacctcatggtctctctttaattgaccaaaaccttccatttttctctaaatacaaagcgatctgtgttctgagcaacctttccccgaacacacagcttcagtgcagcacgctgacctgagtatccaccatgtgccaggcacagtgctgggcacacgaggcaccaaggtccgggccacctgcccgcagcaaggcccagctgaggtggtggagggagcccctgaggtcaggggccgtttcggttcagggtggcaggtgtccagcactggggtatggcgtcgaggcttccatggggtgggggaggccagcttccttctgacaggatgggcgcatacagtgcctggtgtgatttgtgcacaacccgtgttccaggtgcacatcctcccaaggagacacccagacccttccagcacgggccggccaagttgctgcggcggaggcagcatttcagctgtgaggaaggtcattggattcatgtgttttatctgtaaaaatggttgtcttaacttcttaacctcatattggtaagtgattgataaaaattggttggtgtttcatgacatgtggacttcttttgaaatagcaagtcaaatgtagtgaccaaattgtggaagagatttctgtcaaataggaaatgtgtaagttcgtctaaaagctgatggttatgtaagttgctcaggcactcagatgacagcagattctgggttctgggagtgttctgtgcctcttacatgccctggaggcctcatggtctcagtgctgaggcggcacacctgtagcacacctgcgtaatgtgcggtctgggccagtcacaaggaattgtgttgtctaagccaaagggggaagctgactgtgatttaccaaaaaaaattctgtaattcaaaccaaaatgtctgcggaatcaccagtttgatactctctgtaatcagaacagtgggcagtgcctgggtgaacgtgtctagcagccactgtgcgggatcgctgtaacaggagtggaatgtacatatttatttacttttctaactgctccaacagccaaatgccttttttatgaccattgtattcagttcattaccaaagaaatgtttgcactttgtaatgatgcctttcagttcaaataaatgggtcacattttcaaatgga

SEQ ID NO: 173762 - DNA, 2643 bp, Artificial Sequence
  derived and/or modified sequence
ccaggggccccgggcgccgctgcctgttggcgctcgtgctgttctgcgcctgggggacgctggccgtggtggcccagaagccgggcgcagggtgtccgagccgctgcctgtgcttccgcaccaccgtgcgctgcatgcatctgctgctggaggccgtgcccgccgtggcgccgcagacctccatcctagatcttcgctttaacagaatcagagagatccaacctggggcattcaggcggctgaggaacttgaacacattgcttctcaataataatcagatcaagaggatacctagtggagcatttgaagacttggaaaatttaaaatatctctatctgtacaagaatgagatccagtcaattgacaggcaagcatttaagggacttgcctctctagagcaactatacctgcactttaatcagatagaaactttggacccagattcgttccagcatctcccgaagctcgagaggctatttttgcataacaaccggattacacatttagttccagggacatttaatcacttggaatctatgaagagattgcgactggactcaaacacacttcactgcgactgtgaaatcctgtggttggcggatttgctgaaaacctacgcggagtcggggaacgcgcaggcagcggccatctgtgaatatcccagacgcatccagggacgctcagtggcaaccatcaccccggaagagctgaactgtgaaaggccccggatcacctccgagccccaggacgcagatgtgacctcggggaacaccgtgtacttcacctgcagagccgaaggcaaccccaagcctgagatcatctggctgcgaaacaataatgagctgagcatgaagacagattcccgcctaaacttgctggacgatgggaccctgatgatccagaacacacaggagacagaccagggtatctaccagtgcatggcaaagaacgtggccggagaggtgaagacgcaagaggtgaccctcaggtacttcgggtctccagctcgacccacttttgtaatccagccacagaatacagaggtgctggttggggagagcgtcacgctggagtgcagcgccacaggccaccccccgccgcggatctcctggacgagaggtgaccgcacacccttgccagttgacccgcgggtgaacatcacgccttctggcgggctttacatacagaacgtcgtacagggggacagcggagagtatgcgtgctctgcgaccaacaacattgacagcgtccatgccaccgctttcatcatcgtccaggctcttcctcagttcactgtgacgcctcaggacagagtcgttattgagggccagaccgtggatttccagtgtgaagccaagggcaacccgccgcccgtcatcgcctggaccaagggagggagccagctctccgtggaccggcggcacctggtcctgtcatcgggaacacttagaatctctggtgttgccctccacgaccagggccagtacgaatgccaggctgtcaacatcatcggctcccagaaggtcgtggcccacctgactgtgcagcccagagtcaccccagtgtttgccagcattcccagcgacacaacagtggaggtgggcgccaatgtgcagctcccgtgcagctcccagggcgagcccgagccagccatcacctggaacaaggatggggttcaggtgacagaaagtggaaaatttcacatcagccctgaaggattcttgaccatcaatgacgttggccctgcagacgcaggtcgctatgagtgtgtggcccggaacaccattgggtcggcctcggtgagcatggtgctcagtgtgaatgttcctgacgtcagtcgaaatggagatccgtttgtagctacctccatcgtggaagcgattgcgactgttgacagagctataaactcaacccgaacacatttgtttgacagccgtcctcgttctccaaatgatttgctggccttgttccggtatccgagggatccttacacagttgaacaggcacgggcgggagaaatctttgaacggacattgcagctcattcaggagcatgtacagcatggcttgatggtcgacctcaacggaacaagtcagtgccaaagccttttcttcctcctccatggcctgagtaacggggttgaacacgcctcagttaagtcacattcctagggaagagttccagcattttctttcccactgtgcttatgaactgtgaaattatttccttaaactgtgattcctcttgagccctacagccctgtcgctctcactttggtttaataggaatctctgggggacgtgaagtcccttggagtgctgatcaggctacagcaggtccacctgccctgagtgggttatgccatcctggccagggtgggttatgcaagcccagtccctctgcaacaaatgagccataagggaggacttggcagcgtgcttgctccctgagtgacgttgtgtcctgggaatgcggtgccacgcgtattaggagggttgttttggaagagtcccgggtctgtgaaaccagctgatgagatcacctcgggctggtgtggagatgctgttgggggaggtatgtcccccactcactctgctctggcactttgccgttgcccagtaaataacagatgcctttacatgt

SEQ ID NO: 173763 - DNA, 4440 bp, Artificial Sequence
  derived and/or modified sequence
atggctaagcggtctaggggacctggtcgtagatgtctgcttgctctcgtccttttttgcgcttggggcactctcgcggtggtggcccagaaacctggcgctgggtgtccctcaaggtgtctgtgctttcgcaccactgtccggtgtatgcacctcctgctggaagcagttcccgctgtagcccctcagacatccatcctcgatctcagattcaaccgtatacgcgagattcagcctggcgcttttcgaaggcttcgtaacttgaatactctcctcctgaacaacaatcagattaaacggattccaagcggcgcttttgaagatctggagaatttgaagtatctctatttgtacaagaatgagattcaaagcatcgaccgacaggccttcaagggcctcgctagcctcgagcagctctatcttcatttcaaccagatcgagaccctcgaccctgattcgttccaacacctgcctaaactcgagagactgttcctccacaacaatagaataacacaccttgttcctgggaccttcaatcacttggagagtatgaagcggctaaggctggatagtaacaccctgcattgtgactgcgagatcttgtggctagcggatctgctcaagacctacgccgaatcaggaaacgcacaggctgccgctatctgcgagtatccacgcagaattcagggcaggtcagttgcgacgatcacccccgaggagctaaactgcgaaagaccaaggattacatctgagcctcaagatgcagacgttacatccggcaacacggtgtacttcacctgcagagcagaaggcaaccccaagccggagattatatggctgagaaacaacaacgaactctccatgaaaacagactcaagactgaacctacttgatgatggcactcttatgatccagaatacccaagagactgaccagggcatctatcagtgcatggcaaaaaacgtcgcaggtgaggtgaagactcaagaggtcactttacgctattttggcagtcctgccagacctacatttgtgatacaacctcaaaacaccgaggtgctggtgggagagtccgttaccctggagtgtagcgcaactggacaccctccccctcggatcagctggacgagaggtgaccgcactccacttcccgtggaccccagagtcaatattacaccgtcaggaggcctgtatatccagaatgtggttcagggcgattctggagaatatgcttgctctgctactaataatattgatagcgtgcatgcaaccgctttcattatcgttcaggctttaccacagtttacagtcaccccacaagatagggttgtcatagaaggccagacagttgacttccagtgcgaggcgaaaggtaatccaccccctgtcatagcgtggactaagggtggctctcagctgtccgtggaccgtcgtcacctggtcttgtcgtcagggacactgcgcatatcaggggtggcccttcatgaccagggtcagtacgagtgtcaggcagtgaatataattggcagtcagaaggtggttgctcatctcactgttcaaccaagggtgactcccgtgtttgcctccattcccagcgataccaccgtcgaggtaggagcgaacgtccagttgccatgctccagtcagggcgaaccagagcctgcaattacttggaataaagatggggttcaggtcactgagagcggtaaatttcacatttcaccagagggattcctgacgattaacgatgtgggtcccgctgatgctggtaggtacgagtgcgtggcgagaaataccattgggtcggcgtctgtgtccatggtgctatcagtgaacgtgccagatgtatcccgaaacggagatccattcgtcgcgacctccattgtcgaggccatagctacagtggatagagccattaactcgacgcgaacacatctgttcgactctcgcccaagatcccctaacgacctactggctctgtttcgctatccacgtgatccctacacagtcgaacaagccagggcaggggaaattttcgagcggactctgcagctgatccaagaacacgttcagcacggactaatggtggacctgaacggaacctcctaccattataacgacctcgtcagtccacagtaccttaatttgattgcaaatctgagtggttgtacagcccacaggcgagttaacaattgtagcgacatgtgcttccaccaaaagtataggacccatgacggcacatgcaacaatctgcaacatccaatgtggggggcatcattaactgcattcgagagactcctgaagtcagtctatgaaaacggattcaatactcctcggggtataaacccacacagattgtataacggacatgccttgccaatgccccgtctcgtcagcacaaccctgatcggcactgagacagtgacacccgatgaacagtttacccacatgctgatgcagtgggggcaatttttagaccatgatctcgatagcactgtagttgctctgtcacaggcccgattctcagacggtcagcactgcagcaacgtgtgttctaacgaccctccatgttttagtgtgatgatcccccctaacgactccagggcgagaagcggagctagatgcatgtttttcgttagaagctcccctgtctgcggatctggaatgacgtcccttctgatgaatagtgtgtacccgagagagcagatcaaccagctgacctcatacattgacgctagtaatgtgtacgggtccactgagcacgaagccaggagcattcgcgacctggcaagtcatcggggattgctccgccagggaattgtgcagagatccgggaagcccctgctgcccttcgctaccggaccacctacagagtgcatgagagacgagaacgagagtccgatcccatgtttcctcgctggagaccatcgagcgaacgagcagctcgggctgacaagtatgcacaccctttggtttagagaacacaacagaatcgccactgagttgttaaagctgaatccccattgggatggcgataccatctattacgagacacgtaagatagtgggagccgagatccagcacatcacgtatcaacattggctcccgaaaatcctgggggaagtaggcatgcgaactctcggagagtatcacgggtatgaccctggaattaatgccggtatatttaacgcttttgccacagcagccttccgcttcggtcatacactggttaacccactgctgtacagattggatgagaattttcagccaatcgcgcaagaccaccttcctctgcacaaggcctttttctccccttttaggatcgtgaacgagggtggcatcgatcctctgttgagggggctctttggcgtagccggtaagatgagagttcccagccaactccttaatacagagctaacagaaagattgtttagcatggcacacacggttgcgctggatttggcagcgatcaacattcagagaggaagggaccacggcatcccaccctaccatgattaccgggtgtactgcaacctttccgctgcacacacgttcgaggacctcaagaatgagattaaaaatccagaaattcgagagaagcttaagcggctctacggaagtacgctgaatattgatttgtttccagctctcgtggtggaggatttggtccccggatcaaggctgggacctacccttatgtgcctgctgtccactcagttcaaacgactccgcgatggggatcgactgtggtacgaaaatcctggtgtgttctccccagcccaactgactcagattaaacagacctccttggcccgtatcttatgtgacaatgcggataacataacaagggtccagagtgacgtcttcagggtcgcggagtttccccacggatacgggagctgtgatgagattcccagagtggatctacgggtttggcaagattgctgcgaggactgcagaactagaggacagttcaatgccttttcgtaccatttccgaggtcggaggagcttggaattttcataccaagaggacaagcccactaaaaagacccggccacgcaaaattccctccgtgggcaggcagggcgaacatctatcaaacagtacatcggccttctccacacgcagcgacgctagcgggactaatgacttccgtgaattcgtgctggaaatgcagaagacaatcaccgacctgaggacgcagattaaaaagctcgaaagccgtcttagtaccaccgaatgcgtggatgcagggggagagagtcatgcaaacaatacaaaatggaagaaagatgcttgcactatttgcgagtgcaaagatggacaggttacctgtttcgtggaagcttgccctcctgcaacatgcgccgtgcctgtcaacatccctggggcatgctgccccgtatgtttgcagaagcgcgctgaggaaaaaccctag

SEQ ID NO: 173764 - DNA, 2172 bp, Artificial Sequence
  derived and/or modified sequence
tgacgaggtcccggaaggcgctgcctcttggctctcgttctcttttgcgcctggggaacactggcagtggtggcccagaagccaggagctggttgtccctcacgctgcttgtgtttcaggacaacagtgcgctgcatgcaccttctactggaggcggttcccgctgtggcccctcagacctcaatcctggacctgcgcttcaaccggattagggaaattcaacccggagccttcagacggctcaggaacctgaacaccctgttactcaataataatcagataaaaaggatcccaagcggagcctttgaggatctagaaaacctgaagtacctctacctgtacaagaacgaaattcagagtatcgaccggcaggcattcaaaggtctggcgtccttagaacaactgtatcttcatttcaaccagatcgagacactcgatcctgacagcttccagcacttgcctaagctggagcgtctctttctgcacaataaccgcataacacatctagttccagggacctttaaccacttagaatctatgaagcggcttcgtctcgattccaacactttacattgtgactgtgaaattctgtggttagctgacctcttaaagacctacgctgaaagtggcaatgcccaagctgccgctatctgtgagtacccacggcgaatccaagggaggtcagtcgcaactattacccctgaggagttaaattgcgagcgaccacgcattacctctgagcctcaggatgcagacgtcacttctggaaataccgtatacttcacctgtagggctgagggcaatcccaaaccggagatcatctggctgcgcaataataatgagctgagtatgaagaccgattcccgcctgaaccttttggacgacgggacacttatgatccagaacactcaggagaccgatcagggaatctaccaatgtatggcaaagaacgtggccggagaagttaaaacacaggaggtgacactgcggtacttcggatcacccgctcgcccaacttttgtcatacagccccagaacacagaggttctggttggtgaatctgtgactctggaatgctccgccactggacatccgccaccaaggattagttggacacggggagacagaacgccactgcccgtggatccacgtgtgaatataacaccctctgggggtctgtatatccagaatgtcgtgcagggtgacagtggcgagtatgcctgctccgccacaaacaacatcgatagcgtgcacgcaaccgcattcatcatcgtacaggctctgccacagtttactgtcactccgcaggacagggtagtgatcgaggggcagaccgtggatttccagtgtgaagcaaagggaaacccgcctcctgtgatagcatggacaaaagggggaagtcagcttagcgtagaccgcagacacttagtcctctcaagtggcacattgaggattagtggcgtagccctacacgatcagggccagtacgaatgccaagctgtaaacataatcggctcacagaaggtggttgcgcacctcacggtgcagccacgggttacgccagttttcgcttccattcctagcgatactaccgtagaggtaggagcgaacgtacagctgccctgctcaagccagggcgagcccgagcctgcgattacttggaataaagacggggtccaggtgacggagtctggaaaattccatatttctcctgaaggatttcttaccatcaatgacgttgggcctgcagacgcaggacgatacgaatgcgtcgcccgaaacaccattggctccgcctcagtgtcaatggtcctcagtgttaatgttccagacgtttctagaaacggcgatccattcgtcgctacttccattgttgaagccatcgctactgtcgatcgcgcaatcaatagcacccgcacccacctttttgattctcgcccacggtcacccaacgacctgctggccctgttcagataccctcgggacccctataccgtcgaacaggcgagggctggagagattttcgaacggacactgcaacttatccaggagcacgttcagcatggtctgatggtggacctaaatggaacttcccaatgccaatccctgttcttcctgctccatggcctttccaatggggtcgagcatgcctctgtcaaaagccactcctag

SEQ ID NO: 173765 - DNA, 4440 bp, Artificial Sequence
  derived and/or modified sequence
atggccaagagaagcagaggccccggcagaagatgcctgctggccctggtgctgttctgcgcctggggcaccctggccgtggtggcccagaagcccggcgccggctgccccagcagatgcctgtgcttcagaaccaccgtgagatgcatgcacctgctgctggaggccgtgcccgccgtggccccccagaccagcatcctggacctgagattcaacagaatcagagagatccagcccggcgccttcagaagactgagaaacctgaacaccctgctgctgaacaacaaccagatcaagagaatccccagcggcgccttcgaggacctggagaacctgaagtacctgtacctgtacaagaacgagatccagagcatcgacagacaggccttcaagggcctggccagcctggagcagctgtacctgcacttcaaccagatcgagaccctggaccccgacagcttccagcacctgcccaagctggagagactgttcctgcacaacaacagaatcacccacctggtgcccggcaccttcaaccacctggagagcatgaagagactgagactggacagcaacaccctgcactgcgactgcgagatcctgtggctggccgacctgctgaagacctacgccgagagcggcaacgcccaggccgccgccatctgcgagtaccccagaagaatccagggcagaagcgtggccaccatcacccccgaggagctgaactgcgagagacccagaatcaccagcgagccccaggacgccgacgtgaccagcggcaacaccgtgtacttcacctgcagagccgagggcaaccccaagcccgagatcatctggctgagaaacaacaacgagctgagcatgaagaccgacagcagactgaacctgctggacgacggcaccctgatgatccagaacacccaggagaccgaccagggcatctaccagtgcatggccaagaacgtggccggcgaggtgaagacccaggaggtgaccctgagatacttcggcagccccgccagacccaccttcgtgatccagccccagaacaccgaggtgctggtgggcgagagcgtgaccctggagtgcagcgccaccggccaccccccccccagaatcagctggaccagaggcgacagaacccccctgcccgtggaccccagagtgaacatcacccccagcggcggcctgtacatccagaacgtggtgcagggcgacagcggcgagtacgcctgcagcgccaccaacaacatcgacagcgtgcacgccaccgccttcatcatcgtgcaggccctgccccagttcaccgtgaccccccaggacagagtggtgatcgagggccagaccgtggacttccagtgcgaggccaagggcaaccccccccccgtgatcgcctggaccaagggcggcagccagctgagcgtggacagaagacacctggtgctgagcagcggcaccctgagaatcagcggcgtggccctgcacgaccagggccagtacgagtgccaggccgtgaacatcatcggcagccagaaggtggtggcccacctgaccgtgcagcccagagtgacccccgtgttcgccagcatccccagcgacaccaccgtggaggtgggcgccaacgtgcagctgccctgcagcagccagggcgagcccgagcccgccatcacctggaacaaggacggcgtgcaggtgaccgagagcggcaagttccacatcagccccgagggcttcctgaccatcaacgacgtgggccccgccgacgccggcagatacgagtgcgtggccagaaacaccatcggcagcgccagcgtgagcatggtgctgagcgtgaacgtgcccgacgtgagcagaaacggcgaccccttcgtggccaccagcatcgtggaggccatcgccaccgtggacagagccatcaacagcaccagaacccacctgttcgacagcagacccagaagccccaacgacctgctggccctgttcagataccccagagacccctacaccgtggagcaggccagagccggcgagatcttcgagagaaccctgcagctgatccaggagcacgtgcagcacggcctgatggtggacctgaacggcaccagctaccactacaacgacctggtgagcccccagtacctgaacctgatcgccaacctgagcggctgcaccgcccacagaagagtgaacaactgcagcgacatgtgcttccaccagaagtacagaacccacgacggcacctgcaacaacctgcagcaccccatgtggggcgccagcctgaccgccttcgagagactgctgaagagcgtgtacgagaacggcttcaacacccccagaggcatcaacccccacagactgtacaacggccacgccctgcccatgcccagactggtgagcaccaccctgatcggcaccgagaccgtgacccccgacgagcagttcacccacatgctgatgcagtggggccagttcctggaccacgacctggacagcaccgtggtggccctgagccaggccagattcagcgacggccagcactgcagcaacgtgtgcagcaacgaccccccctgcttcagcgtgatgatcccccccaacgacagcagagccagaagcggcgccagatgcatgttcttcgtgagaagcagccccgtgtgcggcagcggcatgaccagcctgctgatgaacagcgtgtaccccagagagcagatcaaccagctgaccagctacatcgacgccagcaacgtgtacggcagcaccgagcacgaggccagaagcatcagagacctggccagccacagaggcctgctgagacagggcatcgtgcagagaagcggcaagcccctgctgcccttcgccaccggcccccccaccgagtgcatgagagacgagaacgagagccccatcccctgcttcctggccggcgaccacagagccaacgagcagctgggcctgaccagcatgcacaccctgtggttcagagagcacaacagaatcgccaccgagctgctgaagctgaacccccactgggacggcgacaccatctactacgagaccagaaagatcgtgggcgccgagatccagcacatcacctaccagcactggctgcccaagatcctgggcgaggtgggcatgagaaccctgggcgagtaccacggctacgaccccggcatcaacgccggcatcttcaacgccttcgccaccgccgccttcagattcggccacaccctggtgaaccccctgctgtacagactggacgagaacttccagcccatcgcccaggaccacctgcccctgcacaaggccttcttcagccccttcagaatcgtgaacgagggcggcatcgaccccctgctgagaggcctgttcggcgtggccggcaagatgagagtgcccagccagctgctgaacaccgagctgaccgagagactgttcagcatggcccacaccgtggccctggacctggccgccatcaacatccagagaggcagagaccacggcatccccccctaccacgactacagagtgtactgcaacctgagcgccgcccacaccttcgaggacctgaagaacgagatcaagaaccccgagatcagagagaagctgaagagactgtacggcagcaccctgaacatcgacctgttccccgccctggtggtggaggacctggtgcccggcagcagactgggccccaccctgatgtgcctgctgagcacccagttcaagagactgagagacggcgacagactgtggtacgagaaccccggcgtgttcagccccgcccagctgacccagatcaagcagaccagcctggccagaatcctgtgcgacaacgccgacaacatcaccagagtgcagagcgacgtgttcagagtggccgagttcccccacggctacggcagctgcgacgagatccccagagtggacctgagagtgtggcaggactgctgcgaggactgcagaaccagaggccagttcaacgccttcagctaccacttcagaggcagaagaagcctggagttcagctaccaggaggacaagcccaccaagaagaccagacccagaaagatccccagcgtgggcagacagggcgagcacctgagcaacagcaccagcgccttcagcaccagaagcgacgccagcggcaccaacgacttcagagagttcgtgctggagatgcagaagaccatcaccgacctgagaacccagatcaagaagctggagagcagactgagcaccaccgagtgcgtggacgccggcggcgagagccacgccaacaacaccaagtggaagaaggacgcctgcaccatctgcgagtgcaaggacggccaggtgacctgcttcgtggaggcctgcccccccgccacctgcgccgtgcccgtgaacatccccggcgcctgctgccccgtgtgcctgcagaagagagccgaggagaagccctag

SEQ ID NO: 173766 - DNA, 2172 bp, Artificial Sequence
  derived and/or modified sequence
tgaagaggccccggcagaagatgcctgctggccctggtgctgttctgcgcctggggcaccctggccgtggtggcccagaagcccggcgccggctgccccagcagatgcctgtgcttcagaaccaccgtgagatgcatgcacctgctgctggaggccgtgcccgccgtggccccccagaccagcatcctggacctgagattcaacagaatcagagagatccagcccggcgccttcagaagactgagaaacctgaacaccctgctgctgaacaacaaccagatcaagagaatccccagcggcgccttcgaggacctggagaacctgaagtacctgtacctgtacaagaacgagatccagagcatcgacagacaggccttcaagggcctggccagcctggagcagctgtacctgcacttcaaccagatcgagaccctggaccccgacagcttccagcacctgcccaagctggagagactgttcctgcacaacaacagaatcacccacctggtgcccggcaccttcaaccacctggagagcatgaagagactgagactggacagcaacaccctgcactgcgactgcgagatcctgtggctggccgacctgctgaagacctacgccgagagcggcaacgcccaggccgccgccatctgcgagtaccccagaagaatccagggcagaagcgtggccaccatcacccccgaggagctgaactgcgagagacccagaatcaccagcgagccccaggacgccgacgtgaccagcggcaacaccgtgtacttcacctgcagagccgagggcaaccccaagcccgagatcatctggctgagaaacaacaacgagctgagcatgaagaccgacagcagactgaacctgctggacgacggcaccctgatgatccagaacacccaggagaccgaccagggcatctaccagtgcatggccaagaacgtggccggcgaggtgaagacccaggaggtgaccctgagatacttcggcagccccgccagacccaccttcgtgatccagccccagaacaccgaggtgctggtgggcgagagcgtgaccctggagtgcagcgccaccggccaccccccccccagaatcagctggaccagaggcgacagaacccccctgcccgtggaccccagagtgaacatcacccccagcggcggcctgtacatccagaacgtggtgcagggcgacagcggcgagtacgcctgcagcgccaccaacaacatcgacagcgtgcacgccaccgccttcatcatcgtgcaggccctgccccagttcaccgtgaccccccaggacagagtggtgatcgagggccagaccgtggacttccagtgcgaggccaagggcaaccccccccccgtgatcgcctggaccaagggcggcagccagctgagcgtggacagaagacacctggtgctgagcagcggcaccctgagaatcagcggcgtggccctgcacgaccagggccagtacgagtgccaggccgtgaacatcatcggcagccagaaggtggtggcccacctgaccgtgcagcccagagtgacccccgtgttcgccagcatccccagcgacaccaccgtggaggtgggcgccaacgtgcagctgccctgcagcagccagggcgagcccgagcccgccatcacctggaacaaggacggcgtgcaggtgaccgagagcggcaagttccacatcagccccgagggcttcctgaccatcaacgacgtgggccccgccgacgccggcagatacgagtgcgtggccagaaacaccatcggcagcgccagcgtgagcatggtgctgagcgtgaacgtgcccgacgtgagcagaaacggcgaccccttcgtggccaccagcatcgtggaggccatcgccaccgtggacagagccatcaacagcaccagaacccacctgttcgacagcagacccagaagccccaacgacctgctggccctgttcagataccccagagacccctacaccgtggagcaggccagagccggcgagatcttcgagagaaccctgcagctgatccaggagcacgtgcagcacggcctgatggtggacctgaacggcaccagccagtgccagagcctgttcttcctgctgcacggcctgagcaacggcgtggagcacgccagcgtgaagagccacagctag

SEQ ID NO: 173767 - protein, 444 aa, Artificial Sequence
  derived and/or modified sequence
MGSSRLRVFDPHLERKDSAAALSDRELPLPTFDVPYFKYIDEEDEDDEWSSRSQSSTEDDSVDSLLSDRYVVVSGTPEKILEHLLNDLHLEEVQDKETETLLDDFLLTYTVFMTTDDLCQALLRIYSAKKYQGKEENSDVPRRKRKVLHLVSQWIALYKDWLPEDEHSKMFLKTIYRNVLDDVYEYPILEKELKEFQKILGMHRRHTVDEYSPQKKNKALFHQFSLKENWLQHRGTVTETEEIFCHVYITEHSYVSVKAKVSSIAQEILLCSQLGKRVQLVKKFIKIAAHCKAQRNLNSFFAIVMGLNTASVSRLSQTWEKIPGKFKKLFSELESLTDPSLNHKAYRDAFKKMKPPKIPFMPLLLKDVTFIHEGNKTFLDNLVNFEKLHMIADTVRTLRHCRTNQFGDLSPKEHQELKSYVNHLYVIDSQQALFELSHRIEPRV

SEQ ID NO: 173768 - protein, 582 aa, Artificial Sequence
  derived and/or modified sequence
MGSSRLRVFDPHLERKDSAAALSDRELPLPTFDVPYFKYIDEEDEDDEWSSRSQSSTEDDSVDSLLSDRYVVVSGTPEKILEHLLNDLHLEEVQDKETETLLDDFLLTYTVFMTTDDLCQALLRIYSAKKYQGKEENSDVPRRKRKVLHLVSQWIALYKDWLPEDEHSKMFLKTIYRNVLDDVYEYPILEKELKEFQKILGMHRRHTVDEYSPQKKNKALFHQFSLKENWLQHRGTVTETEEIFCHVYITEHSYVSVKAKVSSIAQEILKVVAEKIQYAEEDLALVAITFSGDKEKHELQPNDLVISKSLEASGRIYVYRKDLADTLNPFAENEESQQRSMRILGMNTWDLALELMNFDWSLFNSIHEQELIYFTFSRQGSGEHTANLSLLLQRCNEVQLWVATEILLCSQLGKRVQLVKKFIKIAAHCKAQRNLNSFFAIVMGLNTASVSRLSQTWEKIPGKFKKLFSELESLTDPSLNHKAYRDAFKKMKPPKIPFMPLLLKDVTFIHEGNKTFLDNLVNFEKLHMIADTVRTLRHCRTNQFGDLSPKEHQELKSYVNHLYVIDSQQALFELSHRIEPRV

SEQ ID NO: 173769 - DNA, 2193 bp, Artificial Sequence
  derived and/or modified sequence
atggccataggggtgtggcagctgctgctagatatgggcataatgctgagcgttgaccaacacttatatttccaggatacttacgtcttttatcaattttcttccgatgagtgctcatatctatattgcgaatttgagagagaggaggagtggcagaacggggtaaagttgttacttcagctggtgccacttatcccagctagaggaggcatctgcgaactgagccaccagaagattgaggactccgaggagagttcagatgagatcttggttagactcaccagcgccgtacagcgggaactggctgctgtcatcgcccttaaggcacgtaagtctgctatagaacaagatgaagaaaataacgacaagcacgtcgccgtgaccgaggctgaatcagtccccgactcacaggctggggtcatgtgtaagctccaggaacgcgatgagatcggcagaatagagctggtgcaaaagctggccaaagaaaactaccagtttctgcagacagacaagaaggagcaggagaagtcagaacaccaggacgatgaggtcactaccgtccaggtgaaggagcaggatcaatctgtgctggtattaaagaaagtccaatgctgtggccccgcccctacggccggcagcgcagagagccattggagatacgtggtggtcagcggaactccggagaagattctggaacacctgttgaacgacctccacctcgaggaagtgcaggataaagagacagaaacactcctggatgattttctgctcacctacactgtgtttatgactaccgacgacctatgtcaggccttgcttaggcactactcagcaaagaagtatcagggcaaagaggaaaatagcgacgtcccaaggcggaagaggaaagtgctccatctggtcagtcagtggatcgccctgtacaaggactggctgcccgaggatgagcactcaaagatgtttctgaagaccatctacaggaacgtgctggacgatgtgtatgaatacccaatcttagagaaggaactgaaggagtttcagaagatacttggaatgcacaggcgccatacagtggacgagtattccccccagaagaaaaacaaggccttattccaccagttttccctcaaggagaattggttacagcatcggggcactgtaaccgagacggaggaaattttctgccatgtctacatcaccgaacattcttatgtgtccgtgaaagcaaaggtctctagcatagcccaggaaatcctgaaagtagtcgccgagaaaatccaatacgctgaagaagacctcgctttggtcgctattactttcagtggagaaaagcacgagttgcagccgaatgacctcgtaatcagcaagtccttggaggcgagcggcaggatttacgtgtatcggaaggatctggcagataccctcaatccatttgcagagaacgaagaaagtcagcagcgtagtatgcgcatcctgggcatgaatacctgggatctggcccttgagttgatgaacttcgattggtcactgtttaattccatccatgaacaggaactaatctattttacctttagccgccaggggtccggcgagcacaccgccaacctctctctactactgcagcgttgcaatgaagtgcaactgtgggtggctacggagattctcttatgcagtcagctcgggaagagagtgcaactcgttaaaaagttcatcaagattgctgctcactgtaaggcccagcggaaccttaattccttctttgccatcgttatgggactgaacaccgcctcagtgtctcgcttgtcacaaacttgggaaaagatccctggaaaatttaagaagctcttttccgagctagaatcccttacggatccctcactgaaccacaaagcctaccgagatgcgtttaaaaaaatgaaaccaccgaaaattcctttcatgcccctgctgttgaaggacgtgacattcatacatgagggcaataagacattcctggataatctcgtaaatttcgaaaaactgcatatgattgccgacacggtgcggactctgaggcattgccgcaccaaccagttcggtgacctgtcccccaaggagcatcaggaactgaagtcctacgtgaatcatttatacgtgattgacagccaacaggccttatttgagctttcacatcgaattgagccgcgggtttag

SEQ ID NO: 173770 - DNA, 1743 bp, Artificial Sequence
  derived and/or modified sequence
atgggatcttctagactacgtgttttcgacccacatttggagcggaaggacagcgctgcagcactgagtgatcgggagctgcccctgcctacctttgatgttccctattttaaatatatcgatgaggaagacgaggacgatgagtggagtagtaggtcacagtcttcaaccgaagacgattccgtggactctctcctgagcgaccgctatgtggtggtctctggcacccccgaaaaaatcctagagcacctccttaatgatctacatctggaagaagtgcaggacaaagagactgagacactgctcgacgatttcctcctgacctatacagtgtttatgacgaccgatgacctgtgtcaggctctgttgagacactatagcgctaagaagtaccaggggaaagaagagaatagcgatgtgcccagacgaaaacgcaaagtgctgcaccttgtgtcccagtggatcgccttgtataaggattggctccccgaagatgaacactccaaaatgtttttgaagaccatctaccggaatgtgttagacgacgtgtacgagtatccgatactggagaaggaactcaaggagtttcagaaaatattgggtatgcacagacgacatacagttgatgaatacagcccacaaaagaaaaacaaagctctgtttcaccagttttcactaaaagagaattggctccagcaccggggaactgtgaccgagacagaggaaatcttttgccacgtttacatcaccgagcattcatatgtctctgtaaaagccaaggtgagcagtattgcacaggagatactgaaagttgttgccgagaagatccagtacgcagaagaagacttggctctggtcgctatcacattcagcggagagaaacacgaactgcagcctaatgacctagttatctccaagtctctcgaagcatctggccgcatctatgtctatagaaaagaccttgcggataccttaaacccattcgccgagaatgaggagagtcagcagcgatcaatgcgtatcttagggatgaatacttgggatttggcgctcgagctgatgaatttcgattggtccctgttcaattctatccacgagcaggagctcatttacttcacgttttcacgtcagggctccggcgaacacacagctaatctgagcttgctactccaaaggtgtaatgaggttcagctttgggttgccactgagatcctgctctgttctcaactcggaaaaagagttcagctggttaaaaaattcataaagattgcggcacattgcaaggctcagcgcaacttaaattcgttcttcgccatcgtgatgggtctcaatacagctagcgtgtcacggttgtcgcagacttgggaaaagattccggggaaatttaagaaactattttctgagctggagtcactgaccgacccctctctgaatcacaaagcttacagagatgctttcaaaaaaatgaagccaccaaagatccccttcatgcctcttctgcttaaggacgtgacgtttatccacgagggcaacaaaacctttttggacaacctggtgaacttcgagaagctacacatgatcgctgacacagtacgcactcttcgccactgtcggacgaatcaatttggagacctctcccccaaggagcaccaggaactcaagtcctatgttaatcacctgtatgtgatcgattctcagcaggctctgttcgagctgagccaccgaatcgaacctagagtttag

SEQ ID NO: 173771 - DNA, 1749 bp, Artificial Sequence
  derived and/or modified sequence
atggggagctcacggctcagggtattcgacccccatctcgaaagaaaggactctgcagctgctttgagcgatcgtgagctccccctccccactttcgatgtgccttactttaaatacattgatgaggaagacgaggacgacgagtggtcttcaagatctcagtccagtacagaagacgactccgtcgatagtttgctgagtgaccgatacgtggtagtgtcaggcactccagagaagattctggagcatctgctcaacgacctccatctggaggaagtgcaagacaaggaaaccgagactctgttagatgatttcctactgacttatactgtgttcatgaccacagatgacctgtgccaggctctcttgagaatttacagtgcgaagaaatatcaggggaaagaagagaatagtgacgttccccggcgcaaaagaaaggtgctgcatctggttagccagtggatcgccctctacaaggactggcttccagaggatgagcacagtaagatgttcttgaagactatataccgcaatgtgctggatgacgtgtatgagtaccctatcctggagaaggagctcaaagagttccagaagatcctgggaatgcaccggaggcatacagttgacgaatactcaccacaaaagaagaataaggccctgttccaccagttttcgctgaaggaaaactggctgcagcatcggggtactgtgaccgagacagaagagatcttctgccatgtctacatcaccgagcactcctacgtgtcagtgaaggcaaaggtgtcctccatcgcccaggaaatcctgaaggtcgtcgctgaaaagatacagtacgctgaagaagatctggctctcgtggcaatcacattttcgggcgacaaggaaaagcacgagttacagcccaacgacctcgtaattagtaaatcactcgaggcttcgggacgcatttacgtctacagaaaagacctggcagacacactcaacccttttgctgagaacgaagaaagccagcaaaggagcatgaggattcttggcatgaatacatgggaccttgccctggaactgatgaatttcgactggtcactattcaatagcatccacgagcaggagctgatatatttcaccttctcaaggcaaggcagcggggaacatacagccaatctgtccctcctgctccagaggtgcaatgaagttcaactctgggtggcaactgagatcctactgtgctcccagctgggcaaacgcgtgcagctcgtgaagaagttcataaagatagctgcacactgcaaggctcagagaaatcttaattcatttttcgcgattgtgatgggactgaacaccgcctcagtctcccgcttatctcagacgtgggagaagatacctgggaaatttaaaaagttgtttagtgagcttgagtcactgactgatccttctcttaaccataaagcctaccgcgatgctttcaagaaaatgaagccaccaaagatcccctttatgcctctgctactcaaggacgttactttcatccacgagggaaataagaccttcctggataatctcgttaactttgagaagctgcacatgattgctgacacggtgcgcacgctgcgacactgtagaaccaatcagttcggtgacttaagccccaaagagcaccaggaacttaaatcctatgtgaatcatctgtacgtgatcgatagccagcaagccctcttcgaattatcacatcgaattgagcccagagtgtag

SEQ ID NO: 173772 - DNA, 2193 bp, Artificial Sequence
  derived and/or modified sequence
atggccatcggcgtgtggcagctgctgctggacatgggcatcatgctgtctgtggaccagcacctgtacttccaggacacctacgtgttctaccagttcagcagtgatgaatgttcctacctgtactgtgaatttgagcgggaggaggagtggcagaatggagtgaagctgctgctgcagctggtgcccctcatcccagcccggggcggcatctgtgagctgagccaccagaagattgaggacagcgaggagagcagtgatgagatcctggtgcggctgaccagcgctgtgcagcgggagctggccgctgtgattgccctgaaggccaggaagagcgccatcgagcaggatgaagaaaataatgacaagcacgtggccgtgacagaggccgagagcgtgcctgacagccaggccggcgtgatgtgcaagctgcaggagagagatgagatcggcagaattgagctggtgcagaagctggccaaggagaactaccagttcctgcagacagacaagaaggagcaggagaagtctgagcaccaggatgatgaggtgaccaccgtgcaggtgaaggagcaggaccagagcgtgctggtgctgaagaaggtgcagtgctgcggccctgcccccacagctggcagcgctgagagccactggaggtatgtggtggtgtctggcaccccagagaagatcctggagcacctgctgaatgacctgcacctggaggaggtgcaggacaaggagacagagaccctgctggatgacttcctgctgacctacaccgtcttcatgaccacagatgacctgtgccaggccctgctgcggcactacagcgccaagaagtaccagggcaaggaggagaacagtgatgtgcccaggaggaagaggaaggtgctgcacctggtgtcccagtggatcgccctgtacaaggactggctgcctgaagatgagcacagcaagatgttcctgaagaccatctacagaaatgtgctggatgatgtgtatgagtaccccatcctggagaaggagctgaaggagttccagaagatcctgggcatgcaccggcggcacacagtggatgagtacagcccccagaagaagaacaaggccctcttccaccagttcagcctgaaggagaactggctgcagcaccggggcaccgtgacagaaacagaggagatcttctgccacgtgtacatcacagagcacagctatgtgtctgtgaaggccaaggtgagcagcatcgcccaggagatcctgaaggtggtggccgagaagatccagtatgcagaggaggacctggccctggtggccatcaccttctctggagagaagcatgagctgcagcccaatgacctggtgatcagcaagagcctggaggccagcggccgcatctacgtgtacaggaaggacctggccgacaccctgaacccctttgctgaaaatgaggagagccagcagaggtccatgaggatcctgggcatgaacacctgggacctggccctggagctgatgaactttgactggagcctcttcaacagcatccacgagcaggagctgatctacttcaccttcagccggcagggcagcggggagcacacagccaacctgagcctgctgctgcagcgctgcaatgaggtgcagctgtgggtggccacagagatcctgctgtgcagccagctgggcaagagggtgcagctggtgaagaagttcatcaagattgctgcccactgcaaggcccagaggaacctgaacagcttctttgccatcgtgatgggcctgaacacagcctctgtgtcccggctgagccagacctgggagaagatccctgggaagttcaagaagctgttcagcgagctggagagcctgacagaccccagcctgaaccacaaggcctacagagatgccttcaagaagatgaagccacccaagatccccttcatgcccctgctgctgaaggatgtgaccttcatccacgagggcaacaagaccttcctggacaacctggtgaactttgagaagctgcacatgattgctgacacagtgaggaccctgcggcactgcaggaccaaccagtttggagacctgagccccaaggagcaccaggagctgaagagctatgtgaaccacctgtatgtgattgacagccagcaggccctgtttgagctgagccaccgcatcgagccccgggtgtag

SEQ ID NO: 173773 - DNA, 1743 bp, Artificial Sequence
  derived and/or modified sequence
atgggcagcagccggctgcgggtgtttgacccccacctggagaggaaggacagcgctgctgccctgagtgaccgggagctgcccctgcccacctttgatgtgccctacttcaagtacattgatgaagaagatgaagatgatgagtggagcagccgcagccagagcagcacagaagatgattctgtggacagcctgctgagtgaccgctacgtggtggtgtctggcaccccagagaagatcctggagcacctgctgaatgacctgcacctggaggaggtgcaggacaaggagacagagaccctgctggatgacttcctgctgacctacaccgtcttcatgaccacagatgacctgtgccaggccctgctgcggcactacagcgccaagaagtaccagggcaaggaggagaacagtgatgtgcccaggaggaagaggaaggtgctgcacctggtgtcccagtggatcgccctgtacaaggactggctgcctgaagatgagcacagcaagatgttcctgaagaccatctacagaaatgtgctggatgatgtgtatgagtaccccatcctggagaaggagctgaaggagttccagaagatcctgggcatgcaccggcggcacacagtggatgagtacagcccccagaagaagaacaaggccctcttccaccagttcagcctgaaggagaactggctgcagcaccggggcaccgtgacagaaacagaggagatcttctgccacgtgtacatcacagagcacagctatgtgtctgtgaaggccaaggtgagcagcatcgcccaggagatcctgaaggtggtggccgagaagatccagtatgcagaggaggacctggccctggtggccatcaccttctctggagagaagcatgagctgcagcccaatgacctggtgatcagcaagagcctggaggccagcggccgcatctacgtgtacaggaaggacctggccgacaccctgaacccctttgctgaaaatgaggagagccagcagaggtccatgaggatcctgggcatgaacacctgggacctggccctggagctgatgaactttgactggagcctcttcaacagcatccacgagcaggagctgatctacttcaccttcagccggcagggcagcggggagcacacagccaacctgagcctgctgctgcagcgctgcaatgaggtgcagctgtgggtggccacagagatcctgctgtgcagccagctgggcaagagggtgcagctggtgaagaagttcatcaagattgctgcccactgcaaggcccagaggaacctgaacagcttctttgccatcgtgatgggcctgaacacagcctctgtgtcccggctgagccagacctgggagaagatccctgggaagttcaagaagctgttcagcgagctggagagcctgacagaccccagcctgaaccacaaggcctacagagatgccttcaagaagatgaagccacccaagatccccttcatgcccctgctgctgaaggatgtgaccttcatccacgagggcaacaagaccttcctggacaacctggtgaactttgagaagctgcacatgattgctgacacagtgaggaccctgcggcactgcaggaccaaccagtttggagacctgagccccaaggagcaccaggagctgaagagctatgtgaaccacctgtatgtgattgacagccagcaggccctgtttgagctgagccaccgcatcgagccccgggtgtag

SEQ ID NO: 173774 - DNA, 1749 bp, Artificial Sequence
  derived and/or modified sequence
atgggcagcagccggctgcgggtgtttgacccccacctggagaggaaggacagcgctgctgccctgagtgaccgggagctgcccctgcccacctttgatgtgccctacttcaagtacattgatgaagaagatgaagatgatgagtggagcagccgcagccagagcagcacagaagatgattctgtggacagcctgctgagtgaccgctacgtggtggtgtctggcaccccagagaagatcctggagcacctgctgaatgacctgcacctggaggaggtgcaggacaaggagacagagaccctgctggatgacttcctgctgacctacaccgtcttcatgaccacagatgacctgtgccaggccctgctgcgcatctacagcgccaagaagtaccagggcaaggaggagaacagtgatgtgcccaggaggaagaggaaggtgctgcacctggtgtcccagtggatcgccctgtacaaggactggctgcctgaagatgagcacagcaagatgttcctgaagaccatctacagaaatgtgctggatgatgtgtatgagtaccccatcctggagaaggagctgaaggagttccagaagatcctgggcatgcaccggcggcacacagtggatgagtacagcccccagaagaagaacaaggccctcttccaccagttcagcctgaaggagaactggctgcagcaccggggcaccgtgacagaaacagaggagatcttctgccacgtgtacatcacagagcacagctatgtgtctgtgaaggccaaggtgagcagcatcgcccaggagatcctgaaggtggtggccgagaagatccagtatgcagaggaggacctggccctggtggccatcaccttcagcggggacaaggagaagcatgagctgcagcccaatgacctggtgatcagcaagagcctggaggccagcggccgcatctacgtgtacaggaaggacctggccgacaccctgaacccctttgctgaaaatgaggagagccagcagaggtccatgaggatcctgggcatgaacacctgggacctggccctggagctgatgaactttgactggagcctcttcaacagcatccacgagcaggagctgatctacttcaccttcagccggcagggcagcggggagcacacagccaacctgagcctgctgctgcagcgctgcaatgaggtgcagctgtgggtggccacagagatcctgctgtgcagccagctgggcaagagggtgcagctggtgaagaagttcatcaagattgctgcccactgcaaggcccagaggaacctgaacagcttctttgccatcgtgatgggcctgaacacagcctctgtgtcccggctgagccagacctgggagaagatccctgggaagttcaagaagctgttcagcgagctggagagcctgacagaccccagcctgaaccacaaggcctacagagatgccttcaagaagatgaagccacccaagatccccttcatgcccctgctgctgaaggatgtgaccttcatccacgagggcaacaagaccttcctggacaacctggtgaactttgagaagctgcacatgattgctgacacagtgaggaccctgcggcactgcaggaccaaccagtttggagacctgagccccaaggagcaccaggagctgaagagctatgtgaaccacctgtatgtgattgacagccagcaggccctgtttgagctgagccaccgcatcgagccccgggtgtag

SEQ ID NO: 173775 - DNA, 2193 bp, Artificial Sequence
  derived and/or modified sequence
atggccatcggcgtgtggcagctgctgctggacatgggcatcatgcttagtgtagatcaacatctctactttcaagatacctatgttttttatcagttttcctccgatgaatgtagctacctgtactgtgagtttgagcgggaagaggaatggcaaaatggggtgaagctcctgctgcagctggtgcctctgattcccgcccgtgggggcatctgtgaattgagtcaccagaagatcgaggattcggaagagagtagcgacgagatcctggtgagactgacaagcgccgtacagcgggaactcgcagcagtcatcgctcttaaagcccgtaaaagcgctattgagcaagacgaagaaaataacgataaacatgtggccgtgacagaagccgagtcagtaccagattcccaagccggggttatgtgtaagctgcaagagagagacgagattggacgtattgagctcgtgcaaaagttggccaaggagaactatcagttcctccagacagataagaaggaacaggagaagtccgaacaccaagatgatgaggtgactactgtccaggtgaaggagcaagatcaatctgtcctcgtcctcaagaaggtgcagtgctgcggcccagcccccacggccggtagcgcagagtcccactggcgttacgtcgtcgtctccggcacaccagaaaagattctggagcacttacttaacgacctgcacttggaggaggttcaggataaggaaacggagacccttctggacgatttcctattgacctacaccgtgttcatgacgaccgacgatctctgtcaagccctgctgcggcattatagcgctaagaaatatcaaggcaaagaggaaaactccgacgtgccaaggcgtaagcgtaaggtcctacacttagtgtctcaatggatagcactgtacaaagattggctgcctgaagacgaacattccaaaatgttcctcaaaaccatttatcggaacgtacttgacgacgtctacgagtaccctatcttggaaaaggaactgaaagagttccaaaaaattctcggaatgcaccggcggcatactgtcgatgaatactctccccaaaagaaaaataaagctctgttccatcagttcagcctcaaagagaactggctccaacacagggggaccgtaacagagaccgaggaaatcttttgtcatgtgtacattactgagcactcttacgtcagcgtgaaagccaaggtgagttctatcgcacaggagatcttaaaagtagtagccgaaaagatacagtacgcggaagaagatcttgctctcgttgcaattactttttctggggagaaacacgagctgcagcctaacgatctggttattagtaagagtctggaagcaagcggacgtatctacgtctaccggaaggacttagcagacacgttgaacccatttgctgagaatgaggagagccaacagagatccatgaggattctcggcatgaatacgtgggacctggcactggagctgatgaactttgactggtccttgtttaatagtatccacgaacaagagctcatttatttcactttctccagacaggggagcggcgagcacacagcaaatctgtcactgttgctgcagcggtgtaatgaggtccagctgtgggtggcaacggagattctgctctgctcgcaactcggaaagagggtgcagctagtgaagaaattcatcaaaatcgctgcgcactgcaaggcccagcgaaacctcaatagcttcttcgcaattgtcatgggattgaataccgcgtcagtcagcaggttgtctcagacatgggaaaaaatcccagggaaatttaagaagttgttctctgaactcgagagtttaactgacccctctctcaatcataaggcatatagagacgccttcaagaaaatgaagccccccaagattccctttatgcccctgttgctgaaggatgtcactttcattcacgaaggcaataaaacattcctggacaatttggtaaatttcgaaaagctgcacatgatcgcagatacagttcgcactctgagacactgtcgtaccaatcagttcggcgaccttagcccgaaggagcaccaggaactaaaatcctatgtgaatcatctctacgtaattgatagtcagcaagcgcttttcgagctcagccaccggattgagccaagagtctag

SEQ ID NO: 173776 - DNA, 1743 bp, Artificial Sequence
  derived and/or modified sequence
atgggcagcagccggctgcgggtgttcgacccccacctggagcggaaagactcagctgcagccctttccgacagggaactgcctctgccaacatttgacgttccgtacttcaaatatatcgacgaagaagacgaagatgatgaatggagttcaaggtctcaaagcagcacggaagacgactcagtagactcattgttatccgatcgctacgtggtggtgtctggaacccccgagaaaattctggaacatctcctgaatgatttgcatctagaggaagtccaagacaaggagacagagacccttttagatgacttcctactgacttacacagtgttcatgaccacagatgacctctgtcaggctttgctgcggcattattctgccaaaaagtaccaggggaaggaggagaatagtgatgtgcctaggcgtaaaaggaaagtattgcatctggtcagccagtggattgcattgtataaggattggctgccagaggatgagcactctaaaatgtttcttaagaccatatacagaaatgttctggatgacgtttatgagtatcctatactggaaaaggagctgaaagaatttcagaaaattctgggcatgcaccgacggcatacagtggatgagtacagtccacaaaagaagaataaggccctgtttcaccagtttagcttgaaggagaactggctgcagcatcggggcacagtgactgagaccgaggagatcttctgccacgtatacatcaccgaacactcttacgtgtctgtgaaagctaaagtgtcatcaatcgctcaggagatcctgaaagtggtggcggaaaagatccagtatgctgaggaagatttagccttggttgctataacattctctggagaaaagcatgagctgcagccaaatgatctagtaattagtaagtcattggaagctagcgggaggatatatgtataccgaaaggacctcgcggatactcttaatcccttcgccgaaaacgaggagtcccagcagcgatcaatgagaattctgggcatgaatacctgggacctggctctggaattgatgaatttcgactggagcctgttcaactcgattcacgagcaggagctgatctattttacattcagtcgtcagggctctggtgaacacacagctaacctgtcactcctgctgcagcgttgtaatgaggttcagctgtgggtggctaccgaaattctcctatgctcccagctcggaaagcgggtacagctggttaagaaatttatcaaaattgcagcccactgtaaggcacagaggaacttgaatagttttttcgccatcgttatgggcctgaatactgccagcgttagccgactgagccaaacttgggagaaaattccgggcaagttcaaaaagctcttttcagagctggaaagccttaccgacccgagcctgaatcacaaggcatatagggatgcttttaaaaaaatgaaacccccgaaaatcccatttatgccgctgctcctcaaggatgttactttcatccatgagggtaataagaccttcctggataacctcgtcaattttgagaagttacacatgatagccgatacagtgcgaaccctccggcattgcagaaccaatcagttcggcgaccttagccctaaagagcaccaagaactcaagagctacgtgaaccatctctacgtgatcgattcacagcaagcactcttcgaactcagtcaccgtattgaacccagagtgtag

SEQ ID NO: 173777 - DNA, 1749 bp, Artificial Sequence
  derived and/or modified sequence
atgggcagcagccggctgcgggtgttcgacccccacctggagcggaaggactccgctgccgcgctgagtgaccgagaactccctctgcccacatttgatgttccttacttcaagtatatcgatgaagaggatgaagacgacgagtggtcctcacggagccaaagttctacagaagacgatagcgtggacagcttgttgtccgacagatacgtggtggtctccggcacaccggaaaaaattctggagcacctgctcaatgatctgcacctggaggaagtgcaggataaagagaccgagacattacttgacgatttcctgcttacatacacagtctttatgacgaccgatgatctgtgccaggctctactgaggatctatagcgccaagaagtaccagggcaaagaagaaaattcggacgtccccagaaggaagagaaaagtcctccacctggtgtctcagtggatagccctctacaaggattggcttcccgaggatgaacattccaaaatgttcttgaagactatttacagaaacgtcttggatgatgtgtatgagtacccaatcctcgagaaggaactgaaagagtttcagaaaatcctggggatgcaccggaggcacacggttgacgagtattccccccagaaaaaaaacaaagcactgttccaccagttttcccttaaggaaaactggctccagcacaggggcaccgtgaccgagacagaggaaatcttttgtcatgtctacattaccgagcactcctacgtgtccgtaaaagccaaggtttcttcaatcgctcaggagatactcaaggtggttgccgagaagatacaatacgcagaggaggatctggctctggttgcaatcacgttcagcggggacaaggagaaacatgaactgcagcccaacgatctggttatcagtaaaagcctggaagcttctggacggatatacgtctatcgtaaagatcttgcggacacccttaaccccttcgccgaaaacgaggagagccagcaacggtctatgagaatactgggtatgaatacctgggatctggcgctggagctgatgaattttgattggagcttgtttaacagcattcatgagcaagaacttatctattttaccttcagtcggcagggctcaggggaacataccgccaacctcagcctacttctgcagcggtgtaacgaagtccagctttgggtggccactgagattctgctgtgttctcaactgggcaagcgcgttcagcttgtgaagaagtttatcaaaatcgcggcacactgtaaggcgcagaggaacctcaattctttcttcgcaattgtcatggggctgaataccgccagcgtgtcacggctctcccagacatgggaaaagattcccggtaaattcaagaaacttttttctgagcttgaatcactaaccgatccatccctgaaccacaaggcgtacagggatgcttttaaaaaaatgaagccacctaagattcccttcatgcccctcttgctcaaggatgtcacctttatccatgaaggcaataagacctttctcgataacttggttaacttcgagaaactccatatgatcgctgacactgtgagaaccctgcgccattgccgcaccaaccagtttggcgacctaagcccaaaagagcaccaggagctgaagtcatacgtgaaccacttgtacgtgattgattcgcagcaagccctttttgaactctcacacagaattgagccaagagtgtag

SEQ ID NO: 173778 - DNA, 2193 bp, Artificial Sequence
  derived and/or modified sequence
atggccataggggtctggcagctgttattagatatgggaataatgctcagcgtagaccagcatctatactttcaggacacatatgttttctatcagttctcctctgatgagtgcagctatttatactgtgagttcgagcgcgaagaagaatggcagaacggggtgaaactgctgctgcagctcgtgcccttaatacctgcccgaggcggaatctgcgagctgtcccaccagaaaatcgaggactctgaagagagcagcgatgagatcctggtgcggctaactagcgcggtccagcgcgaattagccgcagtcatcgctctcaaggccagaaaatctgccatcgaacaggatgaggagaacaatgacaaacacgtggctgtcactgaagctgaatccgttcctgattctcaggccggagtcatgtgtaaattgcaagagagagacgaaattggacgcattgagctcgtgcagaagttggccaaggagaactatcagtttctgcaaactgacaaaaaggaacaggagaaatcggagcaccaagatgacgaagtcactactgtccaggtcaaggagcaggatcagtccgtcctggtcctgaaaaaagtgcagtgttgtgggccagccccaactgctggcagcgcggagagccattggagatatgtggtagtgtctggcactcctgaaaagattttggaacatctactgaacgatctgcacctagaggaggtccaggataaagagacagaaacactgctagacgacttcttgctgacatacactgtgttcatgacaaccgatgacctgtgccaggctctcctacggcattatagcgccaagaagtaccagggcaaggaggagaacagcgacgtgcctcgcagaaagcgtaaagttctgcatcttgtgtcacagtggattgctctctacaaggactggttgcccgaagacgagcactccaaaatgtttctgaaaacaatttaccggaacgtgctggacgatgtgtatgagtatccaatactggagaaggagctaaaggaattccagaagattctgggcatgcaccgcaggcataccgtggacgaatacagcccccaaaaaaagaacaaggctctatttcaccagtttagccttaaagagaattggctccaacaccggggtacagtgactgagactgaagaaattttctgccatgtgtatatcacagagcacagttacgtctcagtcaaggccaaggtcagctctatcgcccaagagatacttaaagtcgtagccgaaaaaatccagtatgccgaagaagacctggctctggtcgccattaccttcagcggcgaaaagcacgagctacaacccaatgacctggtgatctccaagtccctggaggccagcggtcgcatttatgtgtaccgcaaggacttagctgacaccctgaatccttttgcggagaacgaggagtcccagcagcgtagcatgcggatattggggatgaacacatgggacttggctctggaactgatgaatttcgattggtcgttgttcaatagcatccacgaacaggaattgatttatttcactttctcaaggcaggggtccggcgaacacaccgccaacctgagccttctcctacagaggtgcaatgaggtacagctatgggtggctaccgagattctactatgcagccagctgggcaaaagggtacagctggtaaagaaattcataaagattgctgcccactgtaaggctcagaggaacctgaactctttctttgccatagtcatgggactcaataccgcgtcggtgagtcggctttcccagacttgggagaagattcctggcaaattcaagaagttgttcagcgagttagagtcacttaccgatccctcgttgaatcataaagcctatagggacgcctttaaaaagatgaagcctccaaaaataccttttatgcctttgttgctcaaagacgtgacttttatccatgagggtaataagacatttctggacaacctagtaaacttcgagaaactgcacatgattgcagacaccgtccggaccctccggcactgtcgaacgaatcagtttggcgacctaagtcctaaagagcaccaggagctgaaatcttatgtgaaccacctgtacgtcattgatagccagcaagcattgttcgagctgagccataggattgaacctagggtgtag

SEQ ID NO: 173779 - DNA, 1743 bp, Artificial Sequence
  derived and/or modified sequence
atgggctcttcccggctgcgcgtgtttgacccccatctggaacgcaaggatagtgctgctgcactttccgatcgcgaactacccctgcccacattcgatgttccatactttaagtacatcgatgaagaggatgaggatgacgaatggtcaagtcggagccagagttctacggaagatgactcagtggacagcctgctgtctgaccgttacgtcgtggtgagtggcactcccgagaagattctcgaacaccttctgaacgacttgcacctcgaggaagtgcaggataaggaaaccgagacgctgctggatgattttctcctcacgtataccgtgttcatgactacagatgacctatgccaggccctcctgagacactacagcgccaaaaagtaccaaggcaaagaggaaaacagtgatgttccgaggcgcaaaaggaaggttttgcatctcgtgagccagtggatagcactgtacaaggattggctgccagaggatgaacactcgaaaatgtttctgaaaactatctaccggaatgttctagacgacgtgtatgagtaccctatcctcgagaaggagctgaaggaattccaaaagattttgggcatgcacagacgccacacagtggatgagtatagtccgcaaaagaagaacaaggccctatttcatcagtttagcctgaaagagaactggctgcagcaccggggaacagtgactgaaactgaagagatattttgccacgtgtatataaccgagcacagttacgtgtcagttaaggctaaagtgtcctctatcgcgcaggagatcctgaaggtggttgctgaaaaaatccagtatgccgaggaggatctggcactggtggccatcaccttttctggtgaaaagcacgaactccagcccaacgaccttgtcataagcaagtccctggaagctagcgggagaatctacgtatatagaaaagacttagctgacactctgaatccatttgcagaaaatgaagaatcccagcagaggagcatgcgcatattgggaatgaacacgtgggatctggccctggagctgatgaacttcgactggagtttgtttaacagcattcatgaacaggagctcatctacttcactttcagcagacagggcagtggggagcataccgctaatttgtcactacttttacagcgctgcaatgaagtacagttgtgggtcgcaaccgagatcctcctgtgcagccagctaggaaaaagggtgcagctcgttaagaaattcattaagatagcagcccattgcaaagcccagagaaacctgaactccttttttgcaatcgtgatgggattaaataccgcatccgtcagcagactgtcccagacctgggaaaagataccaggtaaatttaagaagctgttttccgagctcgaatctttaacagatccctccctgaaccataaggcataccgggatgctttcaagaagatgaagcctcctaaaatccccttcatgcccctcctgcttaaggacgttacattcattcacgagggtaataagaccttcctagataaccttgtgaatttcgaaaagctgcatatgattgccgatacagtaagaaccctgaggcactgccgtacaaaccagttcggcgacctttcgcctaaggagcatcaggaactgaagtcatatgtgaaccacctgtacgtgatcgacagtcagcaggcactgtttgaactctctcacaggatcgagcccagggtgtag

SEQ ID NO: 173780 - DNA, 1749 bp, Artificial Sequence
  derived and/or modified sequence
atgggttcttctcgcctgagagttttcgacccccatttagagagaaaggacagtgcagccgctctgtctgaccgcgagcttcctctgcccacctttgacgtgccatactttaaatacatcgatgaagaagatgaagatgacgaatggtcgagcagaagccagagctctacagaagacgactcagtggactctctcctttccgatcgttacgtggtggtctccggcacccctgaaaagattttagaacatctgttaaacgatttacatctggaggaagtccaagataaggagacagagacactgcttgatgatttcttgctcacatatacagtctttatgactacagacgatctttgccaagcactgttaaggatttattctgctaagaaatatcaaggaaaagaggaaaactccgatgtgcctcgccgaaaaagaaaggtgctccatcttgtcagtcaatggatcgccctgtataaagactggctgccagaagacgaacactccaagatgttcttgaaaaccatatacaggaacgtgctggacgatgtttacgagtatccgatcctggagaaagaattgaaagagttccaaaagatactggggatgcaccggagacacactgtggatgaatatagcccacagaaaaaaaacaaggcactcttccaccagttttctttaaaagagaattggttacagcatcggggaactgtaacagagacagaagaaatcttttgccatgtgtacattaccgagcactcttatgtgtctgtcaaggcaaaagtgtcttctattgctcaggaaatcctgaaagtggtcgccgagaagatccagtacgccgaggaagatctggcgttagtggccataaccttctctggagacaaagaaaaacacgagctgcagcccaacgacctcgtgatttcaaagagcttggaagcttcaggcagaatatacgtgtatcggaaagacctcgccgacacactcaatcccttcgccgaaaacgaagagtcgcagcagaggtcgatgcggatattggggatgaatacctgggatctcgcgttggagctgatgaacttcgactggagtcttttcaacagcatccatgaacaggaattgatctatttcacattctctagacaaggctctggagaacataccgctaacctgagcttattattgcaacggtgcaatgaagtgcagctgtgggtagcaacagagatcctgctgtgttctcaactgggcaaacgggtccagttggttaagaagtttataaaaatcgcggctcactgcaaagcgcagagaaatctcaactcgttctttgcaatagtcatgggactcaacaccgcaagtgtgagcaggctctctcaaacatgggagaagattcctggtaagtttaaaaaactgtttagcgagcttgagtcactgacagacccatcactgaatcacaaggcataccgcgacgccttcaagaagatgaaaccaccaaaaattccattcatgccgcttttgctcaaagacgtaacattcatccatgagggcaataaaacattcctggacaatctcgtgaattttgagaagctacatatgattgcggacacagtaagaacactgcgccattgtcgcacaaatcaatttggagacctttctcctaaagagcaccaggagttaaagtcttacgtcaatcacttgtatgtaattgattcacagcaggcgctgtttgagttgtcacacagaatcgaacccagagtctag

SEQ ID NO: 173781 - DNA, 2193 bp, Artificial Sequence
  derived and/or modified sequence
atggccatcggcgtgtggcagctgctgctggacatgggcatcatgctgagcgtggaccagcacctgtacttccaggacacctacgtgttctaccagttcagcagcgacgagtgcagctacctgtactgcgagttcgagagagaggaggagtggcagaacggcgtgaagctgctgctgcagctggtgcccctgatccccgccagaggcggcatctgcgagctgagccaccagaagatcgaggacagcgaggagagcagcgacgagatcctggtgagactgaccagcgccgtgcagagagagctggccgccgtgatcgccctgaaggccagaaagagcgccatcgagcaggacgaggagaacaacgacaagcacgtggccgtgaccgaggccgagagcgtgcccgacagccaggccggcgtgatgtgcaagctgcaggagagagacgagatcggcagaatcgagctggtgcagaagctggccaaggagaactaccagttcctgcagaccgacaagaaggagcaggagaagagcgagcaccaggacgacgaggtgaccaccgtgcaggtgaaggagcaggaccagagcgtgctggtgctgaagaaggtgcagtgctgcggccccgcccccaccgccggcagcgccgagagccactggagatacgtggtggtgagcggcacccccgagaagatcctggagcacctgctgaacgacctgcacctggaggaggtgcaggacaaggagaccgagaccctgctggacgacttcctgctgacctacaccgtgttcatgaccaccgacgacctgtgccaggccctgctgagacactacagcgccaagaagtaccagggcaaggaggagaacagcgacgtgcccagaagaaagagaaaggtgctgcacctggtgagccagtggatcgccctgtacaaggactggctgcccgaggacgagcacagcaagatgttcctgaagaccatctacagaaacgtgctggacgacgtgtacgagtaccccatcctggagaaggagctgaaggagttccagaagatcctgggcatgcacagaagacacaccgtggacgagtacagcccccagaagaagaacaaggccctgttccaccagttcagcctgaaggagaactggctgcagcacagaggcaccgtgaccgagaccgaggagatcttctgccacgtgtacatcaccgagcacagctacgtgagcgtgaaggccaaggtgagcagcatcgcccaggagatcctgaaggtggtggccgagaagatccagtacgccgaggaggacctggccctggtggccatcaccttcagcggcgagaagcacgagctgcagcccaacgacctggtgatcagcaagagcctggaggccagcggcagaatctacgtgtacagaaaggacctggccgacaccctgaaccccttcgccgagaacgaggagagccagcagagaagcatgagaatcctgggcatgaacacctgggacctggccctggagctgatgaacttcgactggagcctgttcaacagcatccacgagcaggagctgatctacttcaccttcagcagacagggcagcggcgagcacaccgccaacctgagcctgctgctgcagagatgcaacgaggtgcagctgtgggtggccaccgagatcctgctgtgcagccagctgggcaagagagtgcagctggtgaagaagttcatcaagatcgccgcccactgcaaggcccagagaaacctgaacagcttcttcgccatcgtgatgggcctgaacaccgccagcgtgagcagactgagccagacctgggagaagatccccggcaagttcaagaagctgttcagcgagctggagagcctgaccgaccccagcctgaaccacaaggcctacagagacgccttcaagaagatgaagccccccaagatccccttcatgcccctgctgctgaaggacgtgaccttcatccacgagggcaacaagaccttcctggacaacctggtgaacttcgagaagctgcacatgatcgccgacaccgtgagaaccctgagacactgcagaaccaaccagttcggcgacctgagccccaaggagcaccaggagctgaagagctacgtgaaccacctgtacgtgatcgacagccagcaggccctgttcgagctgagccacagaatcgagcccagagtgtag

SEQ ID NO: 173782 - DNA, 1743 bp, Artificial Sequence
  derived and/or modified sequence
atgggcagcagcagactgagagtgttcgacccccacctggagagaaaggacagcgccgccgccctgagcgacagagagctgcccctgcccaccttcgacgtgccctacttcaagtacatcgacgaggaggacgaggacgacgagtggagcagcagaagccagagcagcaccgaggacgacagcgtggacagcctgctgagcgacagatacgtggtggtgagcggcacccccgagaagatcctggagcacctgctgaacgacctgcacctggaggaggtgcaggacaaggagaccgagaccctgctggacgacttcctgctgacctacaccgtgttcatgaccaccgacgacctgtgccaggccctgctgagacactacagcgccaagaagtaccagggcaaggaggagaacagcgacgtgcccagaagaaagagaaaggtgctgcacctggtgagccagtggatcgccctgtacaaggactggctgcccgaggacgagcacagcaagatgttcctgaagaccatctacagaaacgtgctggacgacgtgtacgagtaccccatcctggagaaggagctgaaggagttccagaagatcctgggcatgcacagaagacacaccgtggacgagtacagcccccagaagaagaacaaggccctgttccaccagttcagcctgaaggagaactggctgcagcacagaggcaccgtgaccgagaccgaggagatcttctgccacgtgtacatcaccgagcacagctacgtgagcgtgaaggccaaggtgagcagcatcgcccaggagatcctgaaggtggtggccgagaagatccagtacgccgaggaggacctggccctggtggccatcaccttcagcggcgagaagcacgagctgcagcccaacgacctggtgatcagcaagagcctggaggccagcggcagaatctacgtgtacagaaaggacctggccgacaccctgaaccccttcgccgagaacgaggagagccagcagagaagcatgagaatcctgggcatgaacacctgggacctggccctggagctgatgaacttcgactggagcctgttcaacagcatccacgagcaggagctgatctacttcaccttcagcagacagggcagcggcgagcacaccgccaacctgagcctgctgctgcagagatgcaacgaggtgcagctgtgggtggccaccgagatcctgctgtgcagccagctgggcaagagagtgcagctggtgaagaagttcatcaagatcgccgcccactgcaaggcccagagaaacctgaacagcttcttcgccatcgtgatgggcctgaacaccgccagcgtgagcagactgagccagacctgggagaagatccccggcaagttcaagaagctgttcagcgagctggagagcctgaccgaccccagcctgaaccacaaggcctacagagacgccttcaagaagatgaagccccccaagatccccttcatgcccctgctgctgaaggacgtgaccttcatccacgagggcaacaagaccttcctggacaacctggtgaacttcgagaagctgcacatgatcgccgacaccgtgagaaccctgagacactgcagaaccaaccagttcggcgacctgagccccaaggagcaccaggagctgaagagctacgtgaaccacctgtacgtgatcgacagccagcaggccctgttcgagctgagccacagaatcgagcccagagtgtag

SEQ ID NO: 173783 - DNA, 1749 bp, Artificial Sequence
  derived and/or modified sequence
atgggcagcagcagactgagagtgttcgacccccacctggagagaaaggacagcgccgccgccctgagcgacagagagctgcccctgcccaccttcgacgtgccctacttcaagtacatcgacgaggaggacgaggacgacgagtggagcagcagaagccagagcagcaccgaggacgacagcgtggacagcctgctgagcgacagatacgtggtggtgagcggcacccccgagaagatcctggagcacctgctgaacgacctgcacctggaggaggtgcaggacaaggagaccgagaccctgctggacgacttcctgctgacctacaccgtgttcatgaccaccgacgacctgtgccaggccctgctgagaatctacagcgccaagaagtaccagggcaaggaggagaacagcgacgtgcccagaagaaagagaaaggtgctgcacctggtgagccagtggatcgccctgtacaaggactggctgcccgaggacgagcacagcaagatgttcctgaagaccatctacagaaacgtgctggacgacgtgtacgagtaccccatcctggagaaggagctgaaggagttccagaagatcctgggcatgcacagaagacacaccgtggacgagtacagcccccagaagaagaacaaggccctgttccaccagttcagcctgaaggagaactggctgcagcacagaggcaccgtgaccgagaccgaggagatcttctgccacgtgtacatcaccgagcacagctacgtgagcgtgaaggccaaggtgagcagcatcgcccaggagatcctgaaggtggtggccgagaagatccagtacgccgaggaggacctggccctggtggccatcaccttcagcggcgacaaggagaagcacgagctgcagcccaacgacctggtgatcagcaagagcctggaggccagcggcagaatctacgtgtacagaaaggacctggccgacaccctgaaccccttcgccgagaacgaggagagccagcagagaagcatgagaatcctgggcatgaacacctgggacctggccctggagctgatgaacttcgactggagcctgttcaacagcatccacgagcaggagctgatctacttcaccttcagcagacagggcagcggcgagcacaccgccaacctgagcctgctgctgcagagatgcaacgaggtgcagctgtgggtggccaccgagatcctgctgtgcagccagctgggcaagagagtgcagctggtgaagaagttcatcaagatcgccgcccactgcaaggcccagagaaacctgaacagcttcttcgccatcgtgatgggcctgaacaccgccagcgtgagcagactgagccagacctgggagaagatccccggcaagttcaagaagctgttcagcgagctggagagcctgaccgaccccagcctgaaccacaaggcctacagagacgccttcaagaagatgaagccccccaagatccccttcatgcccctgctgctgaaggacgtgaccttcatccacgagggcaacaagaccttcctggacaacctggtgaacttcgagaagctgcacatgatcgccgacaccgtgagaaccctgagacactgcagaaccaaccagttcggcgacctgagccccaaggagcaccaggagctgaagagctacgtgaaccacctgtacgtgatcgacagccagcaggccctgttcgagctgagccacagaatcgagcccagagtgtag

SEQ ID NO: 173784 - protein, 2220 aa, Artificial Sequence
  derived and/or modified sequence
MIRIAALNASSTIEDDHEGSFKSHKTQTKEAQEAEAFALYHKALDLQKHDRFEESAKAYHELLEASLLREAVSSGDEKEGLKHPGLILKYSTYKNLAQLAAQREDLETAMEFYLEAVMLDSTDVNLWYKIGHVALRLIRIPLARHAFEEGLRCNPDHWPCLDNLITVLYTLSDYTTCLYFICKALEKDCRYSKGLVLKEKIFEEQPCLRKDSLRMFLKCDMSIHDVSVSAAETQAIVDEALGLRKKRQALIVREKEPDLKLVQPIPFFTWKCLGESLLAMYNHLTTCEPPRPSLGKRIDLSDYQDPSQPLESSMVVTPVNVIQPSTVSTNPAVAVAEPVVSYTSVATTSFPLHSPGLLETGAPVGDISGGDKSKKGVKRKKISEESGETAKRRSARVRNTKCKKEEKVDFQELLMKFLPSRLRKLDPEEEDDSFNNYEVQSEAKLESFPSIGPQRLSFDSATFMESEKQDVHEFLLENLTNGGILELMMRYLKAMGHKFLVRWPPGLAEVVLSVYHSWRRHSTSLPNPLLRDCSNKHIKDMMLMSLSCMELQLDQWLLTKGRSSAVSPRNCPAGMVNGRFGPDFPGTHCLGDLLQLSFASSQRDLFEDGWLEFVVRVYWLKARFLALQGDMEQALENYDICTEMLQSSTAIQVEAGAERRDIVIRLPNLHNDSVVSLEEIDKNLKSLERCQSLEEIQRLYEAGDYKAVVHLLRPTLCTSGFDRAKHLEFMTSIPERPAQLLLLQDSLLRLKDYRQCFECSDVALNEAVQQMVNSGEAAAKEEWVATVTQLLMGIEQALSADSSGSILKVSSSTTGLVRLTNNLIQVIDCSMAVQEEAKEPHVSSVLPWIILHRIIWQEEDTFHSLCHQQQLQNPAEEGMSETPMLPSSLMLLNTAHEYLGRRSWCCNSDGALLRFYVRVLQKELAASTSEDTHPYKEELETALEQCFYCLYSFPSKKSKARYLEEHSAQQVDLIWEDALFMFEYFKPKTLPEFDSYKTSTVSADLANLLKRIATIVPRTERPALSLDKVSAYIEGTSTEVPCLPEGADPSPPVVNELYYLLADYHFKNKEQSKAIKFYMHDICICPNRFDSWAGMALARASRIQDKLNSNELKSDGPIWKHATPVLNCFRRALEIDSSNLSLWIEYGTMSYALHSFASRQLKQWRGELPPELVQQMEGRRDSMLETAKHCFTSAARCEGDGDEEEWLIHYMLGKVAEKQQQPPTVYLLHYRQAGHYLHEEAARYPKKIHYHNPPELAMEALEVYFRLHASILKLLGKPDSGVGAEVLVNFMKEAAEGPFARGEEKNTPKASEKEKACLVDEDSHSSAGTLPGPGASLPSSSGPGLTSPPYTATPIDHDYVKCKKPHQQATPDDRSQDSTAVALSDSSSTQDFFNEPTSLLEGSRKSYTEKRLPILSSQAGATGKDLQGATEERGKNEESLESTEGFRAAEQGVQKPAAETPASACIPGKPSASTPTLWDGKKRGDLPGEPVAFPQGLPAGAEEQRQFLTEQCIASFRLCLSRFPQHYKSLYRLAFLYTYSKTHRNLQWARDVLLGSSIPWQQLQHMPAQGLFCERNKTNFFNGIWRIPVDEIDRPGSFAWHMNRSIVLLLKVLAQLRDHSTLLKVSSMLQRTPDQGKKYLRDADRQVLAQRAFILTVKVLEDTLSELAEGSERPGPKVCGLPGARMTTDVSHKASPEDGQEGLPQPKKPPLADGSGPGPEPGGKVGLLNHRPVAMDAGDSADQSGERKDKESPRAGPTEPMDTSEATVCHSDLERTPPLLPGRPARDRGPESRPTELSLEELSISARQQPTPLTPAQPAPAPAPATTTGTRAGGHPEEPLSRLSRKRKLLEDTESGKTLLLDAYRVWQQGQKGVAYDLGRVERIMSETYMLIKQVDEEAALEQAVKFCQVHLGAAAQRQASGDTPTTPKHPKDSRENFFPVTVVPTAPDPVPADSVQRPSDAHTKPRPALAAATTIITCPPSASASTLDQSKDPGPPRPHRPEATPSMASLGPEGEELARVAEGTSFPPQEPRHSPQVKMAPTSSPAEPHCWPAEAALGTGAEPTCSQEGKLRPEPRRDGEAQEAASETQPLSSPPTAASSKAPSSGSAQPPEGHPGKPEPSRAKSRPLPNMPKLVIPSAATKFPPEITVTPPTPTLLSPKGSISEETKQKLKSAILSAQSAANVRKESLCQPALEVLETSSQESSLESETDEDDDYMDI

SEQ ID NO: 173785 - DNA, 6663 bp, Artificial Sequence
  derived and/or modified sequence
atgattcgcatcgccgcactaaacgcttctagcacaatcgaggacgaccatgaagggtcctttaagagtcacaaaacacagacaaaagaggctcaggaagcagaagcttttgcactctaccacaaagccctcgacctccagaaacacgaccgatttgaggagagcgccaaggcttaccacgaactcctggaagccagcctgttgagggaggcagtcagttctggtgacgaaaaggaaggcctcaagcaccccggtctcatccttaagtattcgacatataaaaacctcgcccagctggccgctcagcgggaagatctggaaaccgctatggaattttacctcgaggcagtgatgctcgactctacagatgtgaatctgtggtataagatcggacacgtggccctccggctgatccgcatcccactcgcgcgccatgctttcgaggaagggctgcggtgtaatcccgaccattggccctgtctggacaacctgatcaccgttctgtataccctgtccgattacactacttgtctgtacttcatttgcaaagccttggaaaaagattgcaggtactcgaagggactggttttaaaagaaaaaatcttcgaggaacaaccctgcctgagaaaggattctttgcgtatgttcctgaagtgcgatatgtccattcatgacgtctctgtgagcgccgctgagacacaggctatcgttgacgaagctctgggccttcggaaaaagcgacaggctctaattgtgagggagaaggagcccgatctcaaactcgttcagcccatccctttctttacatggaaatgtttgggcgaatctctactggcgatgtacaatcacctgaccacatgcgaaccccctcgcccttcgctgggcaagcgaatagacctctcggactatcaagacccctcacagccgttggaatctagcatggttgtgaccccagttaatgtaatccagcctagcaccgtttccaccaatccagcagtggccgttgccgaacccgttgtgtcctacacatccgttgccaccacctctttccctcttcactccccaggtctgctggagacaggagctcctgtgggtgatattagcggcggcgataaaagcaagaaaggggtaaaacgtaagaagatttctgaagagagtggtgaaactgctaaaaggcgaagtgcccgtgtgcgaaacactaaatgtaagaaggaggagaaagtcgatttccaggagctcctcatgaagtttctgccatctaggctgcgaaagctggaccctgaggaggaggatgacagcttcaacaattatgaggtccagtccgaagccaagctggagtcattcccgagtatagggccacagcggctgagtttcgattcagcgacttttatggaatcagaaaaacaagacgtgcacgaatttctccttgagaatctgaccaacggagggatacttgaactcatgatgaggtacctgaaagccatgggccacaagttcctggtgcgctggcctcccggtctagccgaagtagttcttagtgtgtatcactcctggcgcagacacagtacaagcctgcccaatccactactgagagactgctccaacaagcacattaaagacatgatgttaatgtctctttcttgtatggaacttcaactcgatcaatggttgttaacaaaaggcaggtctagcgccgtaagcccccgcaactgtccagccggaatggtgaacgggaggttcggtccagactttcccggaacccattgtttaggcgatctgttgcagctgagcttcgcgtctagccaaagggacttattcgaagacggctggctggagtttgtggtccgagtttactggctcaaggccagattcctggcccttcagggtgatatggaacaggcactggaaaactatgatatttgtacagaaatgctgcaaagttcaacagccattcaagtggaagcgggggcagaacggagggatatcgttatccggctgcctaacctacacaacgacagcgtggttagtctcgaggaaattgataagaacctgaagagcctcgagaggtgccagagcctagaggaaattcagcggctgtacgaggccggggactacaaggccgtcgtgcaccttttgcggccaaccctctgcacttccgggtttgacagggccaaacacctggagttcatgacaagcatcccagagagacccgcacaattactcctcctccaggatagcctactaagactaaaagattatagacagtgtttcgagtgtagcgatgtcgctctaaacgaggctgtccaacagatggtgaactcaggagaggctgccgctaaggaggagtgggtggccacggttactcagctcctgatgggcatcgagcaggcactgtcagccgactcttcaggctccatcctgaaagtctccagttccacaacaggtctggtccgcctcaccaataacctaatacaagtcatcgactgctctatggcagtccaagaggaagcgaaagaaccgcacgtttcctccgtgctgccttggataatcctccatcgcataatttggcaggaagaagacacgtttcactcgctgtgccaccagcagcagctgcagaacccggccgaagagggaatgtccgagactccaatgcttccaagcagccttatgctgttgaacacggcacacgagtaccttggtagaaggagctggtgctgcaactccgacggagccttgttgcggttttatgtgcgggtgctgcagaaggagctcgctgctagcacgtctgaagatacacatccttataaggaggaactggaaacggccttggaacagtgtttttactgcctgtacagtttcccttctaagaagagcaaagctcggtatctggaggaacattctgctcagcaggtggatctgatttgggaggacgctttatttatgtttgaatacttcaaacccaagacccttccggagtttgacagctacaagacctctaccgtgagcgccgacctagccaatctgcttaagaggatcgccactattgtgccaagaacggaacgccctgccttgagcctcgacaaagtgagcgcttatatcgaggggacttccacggaggtaccatgccttcctgaaggtgctgacccatctcctcctgtggtgaacgagctttattatttactggccgactatcatttcaagaataaggaacagtccaaggccatcaaattctacatgcacgatatatgtatatgccccaatcggtttgacagttgggctggcatggccttggctagagcgtcccggattcaagataagctgaacagtaatgaactgaaatccgacgggccgatatggaaacacgcaactcccgttttgaattgtttccggcgagccctggagatagattcctccaacctcagtctttggatcgagtacggtaccatgagctatgctttgcacagtttcgcttcacggcagctgaagcagtggagaggagaactgccacctgagctggtacagcagatggaggggcggagggactcaatgctggagacagccaagcactgctttacctccgccgcccggtgcgaaggcgacggggacgaggaggagtggctgattcactatatgctgggaaaggtcgcagagaagcagcagcagccgccaacagtgtatctcctgcattataggcaggctggccactatctgcacgaggaggccgcccgatatcctaaaaaaattcattaccacaacccgcccgaactcgccatggaggccctggaggtttacttccggcttcacgcatcaatcctgaaactgcttggaaagccagattcaggggttggggccgaggtcctggtgaatttcatgaaggaggcggcagaagggcccttcgcgcgtggtgaggaaaaaaacacacctaaagccagtgaaaaagagaaggcctgcttagtggatgaagactcacacagctccgcgggtacactgcctgggcctggcgctagtctgccttcctcttccggaccaggactgacctcccctccatataccgccactcccatagatcacgactacgtcaaatgcaaaaaaccccatcaacaggcgaccccagatgacagaagtcaggactctactgcagtggcactgagtgactccagctctacccaggactttttcaacgagcccacctcgctgctggaaggcagccgaaaatcttacacggagaaacgcctccctatcctgagtagccaagccggtgccacaggaaaggatctccagggcgcaacagaggaacgcggcaagaacgaagagtcacttgagtcaaccgaaggtttccgcgcagcagaacagggggttcaaaagcccgcggccgagaccccagcaagtgcgtgtattccaggcaaaccctcagccagcactcctaccctttgggatgggaagaaaagaggggacttgcccggggaaccggtcgcgttcccgcaggggctcccagccggagccgaggagcagagacagtttcttacggaacaatgtatcgctagttttcgactttgcctgagccgctttccccagcactataaatcactttatcgcctggcctttctctacacatactccaaaacccacaggaaccttcagtgggccagagacgtgctgctggggagctcaatcccgtggcaacagctgcaacacatgcccgctcagggccttttttgcgaacgaaacaagacgaacttcttcaacggaatttggcgcattccggttgatgagattgaccgcccagggagtttcgcctggcacatgaatagaagcatcgtgctgctgttgaaagtcctcgcacagctgcgcgaccacagcacccttctcaaggtgagctctatgctgcagagaaccccagatcaggggaagaagtatctcagggacgcggaccggcaggtgcttgcacagagagcctttatcctgacagtcaaagttctggaggacaccttgtcagagctggccgagggcagcgagagacccgggcccaaagtctgcgggctgcctggggctcgcatgaccacagacgtctcccataaagcctccccagaggatggccaggagggactcccacagccaaagaaaccgccgctcgcagacggtagcggccctggacccgaacccggcggcaaagtcggcctcctaaaccacagaccggtggcgatggatgccggcgattccgctgaccagtcaggcgagagaaaagacaaggagtcaccgagagctggacctactgaacccatggacaccagcgaagctaccgtctgccactctgacctggagaggaccccgcctctgttacccggacggccagcccgggacagggggcccgaaagccgtccgacggagctaagccttgaggagctcagcattagtgcccgtcagcagccaacaccactgacccctgcccaaccggccccagcgccagccccagccactaccacaggtacaagggccggcggtcaccctgaagagcccttatccagactgtctcggaagaggaagctgctcgaggacactgagtctggcaaaaccctgctgctcgacgcgtatagagtttggcagcaaggccagaaaggcgtagcatatgacctgggaagggtggagaggataatgtcggagacctatatgctcatcaagcaggtggatgaagaggctgccctagagcaagcggtcaagttttgtcaggtacacctgggagccgcagcccagcggcaggcatccggcgatacacccacaactcctaagcatccaaaggattctcgcgaaaacttctttccggtgactgtggtgcctaccgcccccgatccagtgccagctgactctgtccagcggccctctgacgctcacaccaagcctaggcccgccctcgcagccgcaacgactattattacatgccccccgtccgcctcggcatctacgctggaccagtccaaggaccccggccctccgcgcccacatcggcctgaggctaccccgtctatggcaagcctggggcctgagggcgaggagctcgctcgggtggcagaagggactagttttccccctcaggagcccagacattccccgcaggtcaagatggctccaaccagctctccagctgaaccccattgctggcctgcggaagcagctcttggcacgggcgcagagcctacatgttctcaagagggcaaactgagacccgaaccgagaagagatggggaagcgcaggaggctgcctcagagactcagcccctttcctctcctccaacagcagcatcttccaaagccccaagttcaggctcagcacagccccccgagggccaccccggcaagcccgaaccctccagggcaaagagtagacctcttcctaacatgcctaagctcgtcattcctagcgcagctaccaagtttcctccagagattaccgttacccctcctacgcccaccctcctgagtcccaaggggagcatctccgaggagacgaagcagaagctcaaaagcgcaatcctctcagcccagagtgcagcgaatgtgcggaaggagagcctgtgtcagccagccctggaggtcctggagacaagcagtcaggagtcctctctggaaagcgaaactgacgaagacgacgattatatggatatatag

SEQ ID NO: 173786 - DNA, 6663 bp, Artificial Sequence
  derived and/or modified sequence
atgattagaatcgctgctctgaatgcgagctcaaccatcgaggacgatcatgaggggtcttttaagtcacacaaaactcagactaaggaagcccaggaagctgaagctttcgctctgtaccataaggctctggacctgcaaaaacacgataggtttgaggagagcgcgaaggcctaccacgaattgctggaagcctctctgttgcgcgaggcagtatcttctggagacgagaaggagggcttaaaacatcctgggcttattttgaagtacagcacctacaagaaccttgcccagctagctgctcagcgggaagacctcgagacagctatggaattctatctggaagcggtgatgctggatagtaccgacgttaatctttggtataaaatcggacacgttgcgctgagactgatcaggatacctctggctcgccacgcctttgaggaaggcctgcggtgtaacccggaccactggccatgtctcgataacttaataacagtgttatacactctttccgattataccacctgcctgtactttatctgcaaagcgttggaaaaagactgtcgctacagtaaaggactggtcctcaaagagaaaatcttcgaagagcagccttgtctgagaaaggactcgcttcggatgttccttaagtgcgacatgagcattcacgacgtttctgtttctgccgctgaaactcaggccatcgtcgatgaggccctgggactgagaaaaaaacgacaagctctgattgtgcgggagaaagagcccgatttgaaacttgtgcaaccaatcccattcttcacttggaagtgtcttggagagagcctcctcgcaatgtacaatcaccttacaacatgtgagcctccccgaccctccctgggcaagaggatcgatctgagcgactatcaagacccctcccagccacttgagagctcaatggtggttacgccagtgaatgtgatccagccttccacagtgtccacgaacccagctgtcgccgtggccgaacctgtggtaagttatacatcggtggcgacaacttcattccctctgcatagccctggcctgctggaaactggcgcgccagttggcgacattagtggaggcgataaaagtaagaagggcgtgaaacgcaaaaagattagtgaagaaagtggggagacagcaaaaaggcggtcggcgagggtgcggaatactaagtgcaagaaggaggagaaagttgacttccaggagctgcttatgaaatttctgccctctcgcttgaggaagctcgaccctgaagaggaggacgacagctttaataactatgaggtccagtctgaagccaagttggagtcgttcccctccattgggccccaaagactgagcttcgactccgccacatttatggagagcgagaaacaggatgtccatgagtttctcctcgagaatctcacaaatgggggcattctcgaactgatgatgcgctacctcaaggccatggggcataagttcctggtgcggtggccccctggtctcgcagaggtcgtactgtcagtataccattcgtggagacgccatagcactagccttcctaaccccctgctacgtgactgttccaataagcatatcaaagatatgatgttgatgtcgcttagctgcatggaactccagttagatcagtggttattgacaaaggggcggagtagcgctgtgagccctcgaaactgccccgcaggaatggttaacggaaggttcggccccgattttcctggaacacattgtcttggtgacctgttgcagctctcttttgcatcaagccagcgggacctctttgaggacggctggctcgagttcgtggttcgtgtgtattggctgaaagcacgattcctcgcccttcaaggggatatggaacaagccctcgaaaactacgacatatgcactgagatgctgcagtcctccactgcaatacaggtggaggccggcgctgagcgccgggacatcgtcatacgactgcccaacctgcataacgacagtgttgtgtccctggaggaaatagataagaatttgaagagtctggagcggtgccagagcctggaggaaattcagcgattgtatgaagcgggggattataaagccgtcgttcatctcttgcggcccacactgtgtaccagtggcttcgacagggcaaaacaccttgagttcatgaccagcatccctgaacggcctgcccagctattactgctacaggactccctcctcagacttaaggattaccgtcagtgtttcgagtgctctgatgtggccttaaatgaggctgtgcagcagatggtgaactccggtgaggccgccgcgaaggaagagtgggttgccactgtcacgcaacttctgatgggaattgagcaggctctgtccgccgactcttcgggaagcatcttgaaggtgtcttccagcactaccggtttggtacgactgaccaataatctcatccaagtgatcgactgctcgatggccgtccaggaggaggccaaagaaccgcatgtcagctcagtgctgccgtggataatccttcaccggattatttggcaagaggaagatacatttcattcattgtgccatcagcagcagctccagaatccagctgaggagggcatgagcgagactcccatgcttcctagcagcttgatgctgcttaacaccgcccacgagtatctggggcggaggtcttggtgttgtaatagtgacggggccttgctgagattctatgtacgcgtgctccaaaaagaattggccgcatctacttctgaagatacccacccatataaggaggaactggagacggccctggagcagtgcttctactgcttgtactcttttccctctaagaagtccaaagctaggtatctcgaggagcactccgctcagcaggtagacctgatctgggaagacgctcttttcatgttcgagtatttcaagcctaagacgttgcccgagtttgattcttataagacgagcacagtgtccgcagatctcgccaatcttcttaaacggattgctaccattgtacccaggacagagaggcccgcgctgtccttggataaggtgagcgcatacattgagggcacttctactgaagtaccatgtctgcccgagggggccgatccatctccacctgtggttaatgaactctactacctgcttgccgactaccatttcaaaaacaaagagcagtccaaagccattaagttctacatgcacgatatctgcatttgccccaatcggtttgatagctgggcaggcatggcactcgcccgcgcctctaggatacaagataaactgaactccaacgaactcaagtccgatggacccatttggaaacacgccacgcccgtgctcaattgctttaggcgggcactggagattgactcttctaatctcagtttgtggatcgaatacggtactatgtcatatgcactgcactcattcgcatccagacagttgaagcagtggcgcggggagcttcctcccgaattggttcaacagatggaaggccgccgagattccatgcttgaaacagcgaagcactgctttaccagtgcggctcgctgcgaaggggacggagacgaagaggagtggctgatacattatatgctggggaaagtggcagaaaaacagcagcagcctcctacagtctatctgctgcactatcggcaggctggacactatttgcacgaggaggctgccagatacccaaaaaagatacactatcacaaccctcctgaactagccatggaggctctcgaagtctacttccgcctacacgctagtatcctgaagctgttgggaaaaccagactctggcgtaggtgccgaggttctggtcaattttatgaaggaggctgccgaagggccctttgctagaggtgaagagaagaatactcctaaggcaagtgaaaaagagaaagcatgcttggtcgacgaggactcccactcttctgcgggtaccttgccaggcccaggagcttcactccccagtagtagcggcccaggcctcacctcccccccatacaccgcgacaccaatagatcacgactacgttaaatgtaaaaaaccacaccaacaagcaacacccgatgatcgttctcaggactcaaccgctgtggctctaagcgactccagttctacccaggatttctttaatgaaccaacctcccttttagaaggctctcggaagagttacacggagaagcgcctgcctattctgagctcccaagcaggcgcaaccggcaaagatctgcagggcgcgaccgaggaacggggtaagaacgaagaatctttggaaagcacggagggattccgcgcggctgagcaaggcgtgcagaaacctgccgccgaaactccagcgagcgcttgcatcccaggaaagcctagcgcctccacacctaccctgtgggatggtaaaaagaggggcgaccttcctggcgaacctgtggcttttcctcagggtctcccagccggagctgaagaacagcgacagtttctcactgagcagtgtatcgcatcctttagactttgcctctcacgcttcccgcagcactacaagagcctgtacaggctcgcattcctgtacacctattcgaaaacccatcggaatctccagtgggcacgagatgtgttgctcgggtcatccattccctggcagcagttgcagcacatgccagctcagggactgttttgcgaaaggaataagacaaatttttttaacggtatttggcgtattcccgttgatgaaatcgaccgcccgggaagtttcgcatggcatatgaaccgatcaatcgtgttactgctgaaggtgctcgcacaactgcgggatcacagtacactcctcaaagtaagcagtatgctccagagaacacccgaccagggaaagaaatacctccgcgatgctgaccggcaagtgctcgctcagagagcttttattctgactgtgaaagtgctagaggacacattgtccgagctggccgagggctcagaacgcccgggacctaaagtgtgtggactcccaggggcccgaatgacaactgatgtgtcccataaggcttcacctgaggatggccaggagggactgccccagcccaaaaagccaccgctggccgatgggagcggacctggtcccgagcccggagggaaagtgggattattgaaccaccggccagttgcaatggatgctggagatagcgcagaccagagcggtgagcggaaggataaagagagccctagggccgggcccacggaaccaatggacacttccgaggcaacagtgtgccattccgatcttgagcgcactccacctcttctgcccggacgacctgcacgcgacagagggcctgaatccagaccaacggagctatcacttgaggagctgtcaatctctgcccgccagcaacccactcccctaacacctgcccagccagcgcccgcgcccgctcccgccacaaccacgggaactagggctggcggacaccctgaggagcccttgtcaagactgagtcgaaagcgaaagttgctcgaggatactgaatcaggaaaaacgctccttctcgatgcttacagagtgtggcagcagggacagaaaggagtcgcgtatgatctggggagagtcgagaggattatgtcagagacatacatgttgataaagcaggtcgatgaggaggcggccctcgaacaggccgtgaagttctgtcaggtccacctcggtgctgcagctcagcggcaggcttcaggcgacaccccgacaacccccaagcaccccaaggatagtcgcgaaaatttcttccctgtgactgtggtccccactgcccccgatccagtccctgccgactccgtccaaaggcctagcgatgctcacaccaaaccccgaccagctctcgcagccgccacaaccattatcacctgccctcccagcgcctctgcaagcactctagaccagtctaaggaccccggcccccctcgcccccatcgcccggaggctacgccgagcatggcctccttaggcccagagggtgaggagttggcgagagtcgccgagggaacctctttccctccacaggagccacggcactcaccccaggtaaaaatggccccgacttctagcccagcagagcctcactgttggcccgccgaggcagccctcgggacgggagcggaaccgacatgttctcaggaggggaagctccgcccggagcccaggcgggacggtgaggcccaggaggctgccagcgagacgcaaccactaagctccccacctactgctgcgagtagcaaagcgccatcctccggctccgcgcagcctccagaggggcaccccggcaaaccagagccctccagagctaagagcaggcctctgccaaacatgcccaagttggtcatccccagcgccgccaccaagttcccacctgagatcaccgtgaccccgccaacacctacactgctctcacccaagggtagcatcagcgaagaaactaaacagaagttgaagtcggctatcctgagcgcccagtcagccgctaacgttagaaaggaatccctgtgtcaaccagccctcgaagtcctcgaaacctcgtcccaggagtcgagcctcgaatctgagacagatgaggacgacgattatatggatatttag

SEQ ID NO: 173787 - DNA, 6663 bp, Artificial Sequence
  derived and/or modified sequence
atgatcagaattgctgccctgaatgccagcagcaccattgaagatgaccacgagggcagcttcaagagccacaagacccagaccaaggaggcccaggaggccgaggcctttgccctgtaccacaaggccctggacctgcagaagcatgacagatttgaggagagcgccaaggcctaccacgagctgctggaggccagcctgctgcgggaggccgtgtcctctggagatgagaaggagggcctgaagcaccctggcctcatcctgaagtacagcacctacaagaacctggcccagctggccgcccagcgggaggacctggagacagccatggagttctacctggaggccgtgatgctggacagcacagatgtgaacctgtggtacaagattggccacgtggccctgcggctcatccgcatccccctggcccggcatgcctttgaggagggcctgcgctgcaacccagaccactggccctgcctggacaacctgatcaccgtgctgtacaccctgagtgactacaccacctgcctgtacttcatctgcaaggccctggagaaggactgccgctacagcaagggcctggtgctgaaggagaagatctttgaggagcagccctgcctgaggaaggacagcctgaggatgttcctgaagtgtgacatgagcatccatgatgtgtctgtgtctgctgctgagacccaggccatcgtggatgaggccctgggcctgaggaagaagaggcaggccctgattgtgcgggagaaggagccagacctgaagctggtgcagcccatccccttcttcacctggaagtgcctgggggagagcctgctggccatgtacaaccacctgaccacctgtgagcccccccggcccagcctgggcaagagaattgacctgagtgactaccaggaccccagccagcccctggagagctccatggtggtgacccctgtgaatgtcatccagcccagcacagtgtccaccaacccagctgtggccgtggccgagcctgtggtgtcctacacctctgtggccaccaccagcttccccctgcacagccctggcctgctggagaccggggcccctgtgggggacatcagcggcggggacaagagcaagaagggcgtgaagaggaagaagatcagcgaggagagcggggagacagccaagagaagaagtgcccgggtgaggaacaccaagtgcaagaaggaggagaaggtggacttccaggagctgctgatgaagttcctgcccagccggctgaggaagctggaccctgaggaggaggatgacagcttcaacaactatgaggtgcagagcgaggccaagctggagagcttccccagcatcggcccccagaggctgagctttgacagcgccaccttcatggagagcgagaagcaggatgtgcatgagttcctgctggagaacctgaccaatggaggcatcctggagctgatgatgagatacctgaaggccatgggccacaagttcctggtgcgctggcccccaggcctggccgaggtggtgctgtctgtgtaccacagctggaggaggcacagcaccagcctgcccaaccccctgctgcgggactgcagcaacaagcacatcaaggacatgatgctgatgagcctgagctgcatggagctgcagctggaccagtggctgctgaccaagggccgcagcagcgctgtgagccccaggaactgcccagctggcatggtgaatggccgcttcggccctgacttccctggcacccactgcctgggggacctgctgcagctgagctttgccagcagccagagggacctgtttgaagatggctggctggagtttgtggtgcgggtgtactggctgaaggcccgcttcctggccctgcagggcgacatggagcaggccctggagaactatgacatctgcacagagatgctgcagagcagcacagccatccaggtggaggccggggctgagcggcgggacatcgtcatccggctgcccaacctgcacaatgattctgtggtgtccctggaggagattgacaagaacctgaagagcctggagcgctgccagagcctggaggagatccagaggctgtatgaggccggggactacaaggctgtggtgcacctgctgcggcccaccctgtgcaccagcggctttgaccgggccaagcacctggagttcatgaccagcatccctgagaggcctgcccagctgctgctgctgcaggacagcctgctgcggctgaaggactaccggcagtgctttgagtgcagtgatgtggccctgaatgaagctgtgcagcagatggtgaacagcggggaggccgccgccaaggaggagtgggtggccaccgtgacccagctgctgatgggcatcgagcaggccctgtctgctgacagcagcggcagcatcctgaaggtgagcagcagcaccaccggcctggtgcggctgaccaacaacctgatccaggtgattgactgcagcatggctgtgcaggaggaggccaaggagccccacgtgtcctctgtgctgccctggatcatcctgcaccgcatcatctggcaggaggaggacaccttccacagcctgtgccaccagcagcagctgcagaacccagctgaggagggcatgtctgagacccccatgctgcccagcagcctgatgctgctgaacacagcccacgagtacctgggcagaagatcctggtgctgcaacagtgatggagccctgctgcgcttctacgtgcgggtgctgcagaaggagctggccgccagcaccagcgaggacacccacccctacaaggaggagctggagacagccctggagcagtgcttctactgcctgtacagcttccccagcaagaagagcaaggcccgctacctggaggagcacagcgcccagcaggtggacctgatctgggaggatgccctcttcatgtttgagtacttcaagcccaagaccctgcctgagtttgacagctacaagaccagcacagtgtctgctgacctggccaacctgctgaagagaattgccaccatcgtgcccaggacagagaggcctgccctgagcctggacaaggtgtctgcctacatcgagggcaccagcacagaggtgccctgcctgcctgagggcgctgaccccagcccccctgtggtgaatgagctgtactacctgctggccgactaccacttcaagaacaaggagcagagcaaggccatcaagttctacatgcatgacatctgcatctgccccaacagatttgacagctgggccggcatggccctggcccgggccagccgcatccaggacaagctgaacagcaatgagctgaagagtgatggccccatctggaagcacgccacccctgtgctgaactgcttccggcgggccctggagattgacagcagcaacctgagcctgtggattgaatatggcaccatgtcctatgccctgcacagctttgccagccggcagctgaagcagtggagaggagagctgcccccagagctggtgcagcagatggagggcagaagagacagcatgctggagacagccaagcactgcttcaccagcgctgcccgctgtgaaggagatggagatgaggaggagtggctgatccactacatgctgggcaaggtggccgagaagcagcagcagccccccaccgtgtacctgctgcactaccggcaggccggccactacctgcacgaggaggccgcccgctaccccaagaagatccactaccacaaccccccagagctggccatggaggccctggaggtgtacttccggctgcacgccagcatcctgaagctgctgggcaagccagacagcggcgtgggcgctgaggtgctggtgaacttcatgaaggaggccgctgagggcccctttgcccggggggaggagaagaacacccccaaggccagcgagaaggagaaggcctgcctggtggatgaggacagccacagcagcgctggcaccctgcccggccctggggccagcctgcccagcagcagcggccctggcctgaccagccccccctacacagccacccccatcgaccatgactatgtgaagtgcaagaagccccaccagcaggccaccccagatgacaggagccaggacagcacagctgtggccctgagtgacagcagcagcacccaggacttcttcaatgagcccaccagcctgctggagggcagcaggaagagctacacagagaagaggctgcccatcctgagcagccaggccggggccaccgggaaggacctgcagggcgccacagaggagcggggcaagaatgaggagagcctggagagcacagagggcttccgggctgctgagcagggcgtgcagaagccagctgctgagaccccagccagcgcctgcatccctgggaagcccagcgccagcacccccaccctgtgggatggcaagaagagaggagacctgcctggagagcctgtggccttcccccagggcctgcctgctggagctgaggagcagaggcagttcctgacagagcagtgcatcgccagcttccggctgtgcctgagccgcttcccccagcactacaagagcctgtaccgcctggccttcctgtacacctacagcaagacccacaggaacctgcagtgggccagagatgtgctgctgggcagcagcatcccctggcagcagctgcagcacatgcctgcccagggcctcttctgtgaaagaaacaagaccaacttcttcaacggcatctggagaattcctgtggatgaaattgacaggcctggcagctttgcctggcacatgaacagaagcatcgtgctgctgctgaaggtgctggcccagctgcgggaccacagcaccctgctgaaggtgtcctccatgctgcagaggaccccagaccagggcaagaagtacctgagagatgctgaccggcaggtgctggcccagagggccttcatcctgactgtgaaggtgctggaggacaccctgtctgagctggccgagggcagcgagcggcccggccccaaggtgtgtggcctgcccggggccaggatgaccacagatgtgagccacaaggccagcccagaagatggccaggagggcctgccccagcccaagaagccacccctggctgatggcagcggccctggccctgagcccggcggcaaggtgggcctgctgaaccacaggcctgtggccatggatgctggggacagcgctgaccagagcggggagaggaaggacaaggagagccccagggctggccccacagagcccatggacaccagcgaggccaccgtgtgccacagcgacctggagaggaccccacccctgctgcccggccggcctgcccgggaccggggccctgagagccggcccacagagctgagcctggaggagctgagcatcagcgcccggcagcagcccacccccctgaccccagcccagcctgccccagccccagccccagccaccaccaccggcacccgggccggcggccaccctgaggagcccctgagccggctgagcaggaagaggaagctgctggaggacacagaaagtggcaagaccctgctgctggatgcctacagagtgtggcagcagggccagaagggcgtggcctatgacctgggccgggtggagcgcatcatgtctgagacctacatgctgatcaagcaggtggatgaggaggccgccctggagcaggccgtgaagttctgccaggtgcacctgggcgctgctgcccagaggcaggccagcggggacacccccaccacccccaagcaccccaaggacagccgggagaacttcttccctgtgacagtggtgcccacagccccagaccctgtgcctgctgacagcgtgcagaggcccagtgatgcccacaccaagcccaggcctgccctggccgccgccaccaccatcatcacctgcccccccagcgccagcgccagcaccctggaccagagcaaggaccccggccccccccggccccacaggcctgaggccacccccagcatggccagcctgggccctgagggggaggagctggcccgggtggccgagggcaccagcttccccccccaggagcccaggcacagcccccaggtgaagatggcccccaccagcagccctgctgagccccactgctggccagctgaggccgccctgggcaccggggctgagcccacctgcagccaggagggcaagctgcggcctgagcccaggagagatggagaggcccaggaggccgccagcgagacccagcccctgagcagccccccaacagctgccagcagcaaggcccccagcagcggcagcgcccagcccccagagggccaccctgggaagccagagcccagccgggccaagagccggcccctgcccaacatgcccaagctggtgatccccagcgctgccaccaagtttcctcctgagatcaccgtgaccccacccacccccaccctgctgagccccaagggcagcatcagcgaggagaccaagcagaagctgaagagcgccatcctgagcgcccagagcgctgccaacgtgaggaaggagagcctgtgccagcctgccctggaggtgctggagaccagcagccaggagagcagcctggagagcgagacagatgaagatgatgactacatggacatctag

SEQ ID NO: 173788 - DNA, 6663 bp, Artificial Sequence
  derived and/or modified sequence
atgatccggatcgccgccctgaacgccagcagcaccatcgaggacgaccacgaagggtcattcaaatcacacaaaacccagacaaaggaagctcaggaggctgaagcattcgctctctatcataaggccctggacttgcaaaaacacgaccgcttcgaagaaagtgccaaagcctatcatgagctccttgaagcctccctgctgcgggaggccgtctctagcggagacgagaaagagggcttgaaacatcccggactgatcctcaaatactctacttacaagaatctggcccagttagcagcgcagagagaagacttggagacagcaatggaattttacctggaagccgttatgctggacagcactgacgtcaacttatggtacaaaataggccacgtggccctgcgcctcatcaggatccctctggcgcgccacgcttttgaagagggccttcgttgtaacccggatcactggccctgtctagacaacctgatcactgtgctgtatacgctctctgactacaccacctgtctgtacttcatttgtaaagcacttgagaaggactgccgctattccaaaggccttgtccttaaagaaaagattttcgaagagcagccatgtcttcgaaaagactctctgcgtatgtttctgaagtgtgatatgtctattcatgacgtgagtgtgtcagccgctgagacacaggccattgtggacgaggccctgggcttgcgtaagaagcgccaggccttaatcgtgagagagaaagagcctgacttgaagcttgtgcagcctattccgttctttacgtggaagtgcctgggggagtctcttttggctatgtacaaccaccttacaacctgcgaacctcctcgccccagcctggggaaaaggatcgacctgagcgactaccaggacccatcacagcccctcgagagcagtatggtggtcacacctgtgaatgttatccagccgtctaccgttagcaccaatccggccgtcgctgtcgcggaacctgttgtcagttatacatccgtcgccacaacctcctttccactccacagtcccgggttgctggagaccggcgctcctgtcggggacatctccggtggggacaagtccaagaaaggggttaagcgcaaaaagatcagcgaagaaagtggcgaaaccgccaagcgcaggtcggcacgggtccggaacacaaaatgtaagaaagaagaaaaggtcgatttccaagaattactgatgaagtttctacctagccgactgaggaagctggaccctgaagaagaggacgactcattcaataactacgaggtacaaagcgaagctaagctggagagcttcccttccattggccctcagcgactctcttttgattccgctacgtttatggaatcggagaaacaggatgtgcatgagtttctcctagagaacttgaccaacggcgggatactggaactgatgatgaggtatctcaaggcaatgggacataaattcctcgttaggtggcccccaggcctggcggaggttgtcctgtcagtctaccatagttggcgaaggcatagcacgagtctgcctaatcccctgctccgagactgcagtaataaacatattaaggatatgatgttgatgagcttgagttgcatggaactgcagcttgaccagtggctccttacgaaaggacgctcctcggccgttagtccgcgaaattgccctgcaggcatggttaatggcaggtttggcccggacttcccaggcactcattgtctgggagacttgcttcagttatcatttgccagtagccaaagagacctgttcgaggacggctggctggaattcgttgttcgcgtttactggttgaaagcccgattcctggccttacagggggatatggagcaggccttagaaaactatgacatttgcacagagatgttgcaatcttcaaccgcaattcaagttgaggctggtgctgaacgaagggatattgtcatacgacttcctaatctgcacaacgattccgtagttagcctggaagagatcgataagaacctgaaaagtctggaacggtgccagtctctggaagagatccagcggctctacgaggccggcgattataaggccgtagtacacctcctgcgccctactttgtgtactagtgggttcgatagagccaaacatctcgaattcatgactagcatccctgagaggcccgcccagctgctcctgctgcaagatagcctcctgaggttgaaggattatcggcagtgttttgagtgcagcgacgtggccctgaacgaagcagtgcagcagatggtgaattcaggcgaggcagcagcaaaagaagagtgggtagccactgtgacccagctgttaatggggatagaacaagccctttctgctgatagctcaggttcaatcctcaaggtgtcttccagtacaactgggctggtgcgcttaaccaacaatctcatacaggtgatcgactgctccatggctgtgcaagaagaggcaaaagaaccccacgtaagctccgtgctgccttggataatcttacaccggatcatttggcaggaggaggatacctttcactctctgtgccaccagcagcaacttcagaaccccgccgaagagggaatgagcgagactccgatgctacccagttcgctgatgctcctcaacacagctcacgaatatttagggaggcgttcttggtgctgcaactcagacggtgctcttctgcggttttacgtgagggttcttcaaaaggagctggccgcttccacaagtgaggacacgcacccttacaaggaggaactagagactgcgttggaacagtgcttttactgtctctatagcttcccttcgaaaaagagcaaagcgaggtatctggaggagcacagtgcacaacaggtggaccttatttgggaggatgctctgtttatgttcgagtatttcaaaccaaaaacacttccagagtttgatagctacaagacctctacagtgagcgccgatctggctaacctcttgaagaggatagccacaattgtccctcggaccgagcggccagcactgagtctggacaaggtttcagcatacattgagggaaccagcacagaggtcccgtgcctcccagagggagcggacccatcgccacctgtggtgaatgagttgtactatctgcttgcagactaccattttaaaaataaagagcagagcaaggccattaagttctacatgcatgatatttgcatctgccctaacaggttcgattcctgggcaggcatggcactcgctagggcatcccgcattcaagacaaactgaactcgaacgagctcaaaagcgacggacccatttggaaacacgccacccccgtcctgaactgctttcgaagagccctggagatagatagctccaatctttcactgtggattgaatacggaacaatgagttatgccctccactctttcgcctctcgccaactgaagcagtggcgtggcgagctgccccccgaactggtacaacaaatggagggccgaagagactccatgttggaaaccgccaaacactgcttcacttcagcggcccggtgtgagggtgatggcgatgaagaagagtggttgatccactacatgctgggtaaggtggccgagaagcagcagcagccgcccacagtctacctgcttcactatcggcaggcaggccactatctccacgaagaagctgctcggtatcccaagaaaattcattatcacaatccccccgaactggccatggaggcactggaggtgtattttagactccacgcaagtatcttaaaactcttggggaaacctgacagcggggttggcgcagaagtgctggtaaacttcatgaaggaagccgctgagggcccttttgctcgcggagaggaaaagaacaccccaaaagcctccgagaaagaaaaggcgtgtcttgtggacgaggactctcattcgagcgcggggactctgccgggcccaggcgcctcactgcccagctcctccggtcccggccttacttcgcctccttatacggccacacctattgaccacgattatgttaaatgtaaaaagccccatcagcaggctacacctgacgataggagtcaggactcaaccgcggtggccctttcggatagttctagcactcaggatttctttaatgagcctacctcccttttggaagggagcagaaagtcctataccgaaaagaggctccctatcttatcttctcaagctggggctacagggaaagacttgcagggtgccacggaggagcgaggtaagaatgaagagtctctggagtctactgagggtttcagagccgcagagcaaggggtccagaaaccagcagctgaaactcccgccagtgcttgtatccctggcaagcctagtgcaagtacccctacactgtgggatggcaaaaagaggggcgacctcccaggtgagccggtggcttttccccagggcctgcctgcaggcgctgaggaacagaggcagtttcttacggaacaatgcattgcgtcattcaggctttgcctgtctagattcccacagcactacaagagtctctatagactagcctttctatacacttattctaaaacccatcgaaatttgcagtgggcaagagacgtgcttctggggtcatcaatcccttggcagcagctgcagcatatgcctgcacagggccttttctgcgagcgaaataagacaaattttttcaatggtatttggagaatccctgtcgacgaaatagataggccaggatcatttgcttggcacatgaatcggtccatcgtgcttctattgaaagtgttggcccaactgagagaccactcaaccctgctgaaggtcagctccatgttgcaacgaaccccagaccagggcaagaaatacctcagggacgccgaccgacaagtactcgcacagagagctttcatattgacggtgaaagtgttggaggatacgctgagtgaactcgcagaagggtccgaacgccctgggccaaaagtatgcggactgcccggggcaaggatgaccactgacgtttctcataaagcctcacctgaagatggacaggaagggctgccgcagcccaaaaagcctcctttggctgacggaagcgggcccggtccagagcctggcgggaaagtggggttgcttaaccacagacccgtagctatggacgcaggagacagcgccgatcagtctggcgaacggaaagacaaggaaagtccacgggctggcccaactgagcctatggatacaagcgaggctacagtgtgccattccgatctcgaacggacgcctccactcctgcctgggcgtcccgcaagggatcgaggacctgagtccaggccaaccgagctatcactggaggagctgagtataagtgccaggcagcagcccactccactgacccctgcacagccagcacctgcgccagcaccagcaactacaacggggaccagagccggcgggcatcctgaggagccactttccagattgtcacgcaaacgcaagctgctcgaagataccgagtcgggcaagacccttctcctggacgcgtatagagtgtggcagcagggccagaagggggtggcatacgatctggggcgggtcgagagaatcatgtcggaaacatacatgctgatcaaacaagtcgatgaggaggccgcattagagcaggccgtgaaattctgtcaggtgcatttaggtgctgcagcccagcggcaagcctctggcgatactcctactacacctaagcaccccaaggactcaagagaaaacttttttcctgttactgttgtgcccacggctcccgatcccgtccctgccgacagcgtgcagagaccgtcagatgcccacactaagcccagacctgcattggccgcagccaccacaatcatcacctgtcctccaagtgcaagcgcatctaccttggaccaaagcaaggatcccggcccaccgagaccccaccgccctgaggctaccccctctatggcatcgctcgggccagagggcgaggagctggctagagtcgcagaaggtacttctttcccaccccaggaacccaggcactcacctcaggttaaaatggccccaacatctagtcctgcggagccgcattgctggccagccgaggcagctctcgggaccggagctgaaccgacctgttcccaggagggcaagctgcgccccgaaccccgacgggatggggaggcccaggaagcagcttccgaaactcagcctctgtcgtcacctcccacagcagcctcctctaaggcaccttccagtggaagcgctcagccacctgaaggtcacccaggcaagccagagccctcccgggccaagagccgtcctctccccaatatgcctaagttggtgatcccctcagccgccaccaaattccctcctgagattactgttacgccacctaccccgactctcctgagtccgaaaggcagcatcagcgaagaaactaaacagaagctgaagagcgccatcctgtccgcacagagcgccgccaacgtccggaaggaatccctctgtcaaccagctctggaggtcctcgagacttccagccaggagtcctccctggaatcggaaactgacgaggacgacgattatatggacatctag

SEQ ID NO: 173789 - DNA, 6663 bp, Artificial Sequence
  derived and/or modified sequence
atgatccggatcgccgccctgaacgccagcagcaccatcgaggacgaccatgagggtagttttaagagtcataagacacagacaaaggaagcccaggaggcagaagcgttcgctctgtatcacaaagcccttgatctgcagaaacatgacagattcgaagagtctgctaaggcgtatcatgagctcttagaggcatcacttctgcgagaagctgtgtcatcaggtgatgaaaaagagggactgaaacacccaggacttatcttgaagtactccacctataagaaccttgcccaactcgccgcgcaacgtgaggacctggagaccgcaatggaattttatctggaagctgtgatgctagatagtacagacgtcaacctgtggtacaaaatcggtcacgttgcgttacgcctgattagaatccctctcgcaagacatgcgttcgaggagggcctaaggtgtaacccggatcattggccatgtcttgacaacctcattaccgtcctctatacactttcggattacactacttgcctctatttcatatgtaaggccttggagaaagactgccgttactccaaggggcttgttttaaaggagaagatatttgaggagcagccatgcctgcgcaaagattccctgaggatgttcttaaaatgtgacatgtccattcatgacgtgagtgtctccgctgcagagactcaggcaattgtggacgaggctcttgggcttagaaaaaagcggcaagccctgatagtcagggaaaaagagcccgacctgaaactggtacaaccaatccccttctttacctggaagtgcttgggggaatccctgctggccatgtataatcacctcactacctgtgaacctccgcggccttccctggggaaacgtatcgaccttagcgactatcaggatccaagtcaacccttagaaagctccatggtggtgacgccagttaatgtgatacagccaagcacagtgtctactaaccccgcggtcgcagtcgccgagcccgtggtaagttatacatctgtggccaccacttccttccccttgcactctccgggcctgcttgagactggagcaccggtgggcgacatttccgggggagataagagtaagaaaggagtgaaaagaaagaagatcagcgaagaatctggagaaacagccaagcgcaggtccgcaagagtgcggaacacgaaatgcaaaaaagaagagaaagtggattttcaggaactactgatgaaatttttgccatctaggctccgaaagctggatcctgaagaggaggatgattcattcaacaactacgaggtgcaatctgaggcgaagcttgagtcattcccaagtattggacctcaacggttaagttttgactcagcaacatttatggagagcgaaaagcaggatgtgcatgagttcctgctggaaaatctgactaacggggggatcctggaacttatgatgcggtatctgaaggccatgggacacaagttcttggtacggtggccccccggccttgccgaagttgtactgtccgtgtaccactcttggcggaggcactctaccagcctacctaatccattgcttcgtgactgctcaaataagcatataaaggatatgatgctcatgtctctctcttgcatggaactacagttagaccagtggctgctaacgaagggacggtcatctgcggtaagtccaagaaactgccctgccggtatggtgaatggtaggtttggcccagattttcccggaactcattgtttgggcgacctcctgcagctgtcgtttgcctcctctcaacgcgatctttttgaagacggatggctggagtttgttgtgcgtgtatattggctgaaagcccgattcctagcgctccaaggggacatggagcaggccctcgagaattacgacatttgtaccgaaatgctacagtccagcacggccatacaggtcgaagcgggagcagaacgccgggatatagtcatccggctgcccaacttgcacaacgattcagtggtgtctctggaggaaatcgacaagaacctaaaatccctggaacgatgccaatctctggaggaaatccaacgtctctatgaggcaggagactataaagccgtcgtacacctgttgaggcccaccctgtgcacctccggattcgacagagctaagcacctagagttcatgaccagcataccagaaagaccagcccagctgctgcttctacaggattcattgctacgcctgaaggactaccgacagtgttttgaatgttcagacgttgcccttaatgaagccgtgcagcagatggtgaattccggtgaggcggccgcaaaagaggaatgggtggcaaccgttacccagttgttgatgggcattgagcaggctctgtctgccgattccagtggttccatcttaaaggtcagcagctcgacaaccgggctggtgaggctcaccaataacctgattcaggttatcgattgtagtatggccgtacaagaagaggctaaagagccccacgtctctagtgtgctaccctggattatactgcacagaatcatctggcaggaagaagacactttccacagcctttgccaccaacagcagctgcagaaccctgccgaggagggaatgtctgagacaccgatgctgccaagtagtttgatgttactgaataccgcgcacgagtatcttggccgccgtagctggtgttgtaatagtgacggggccttgcttaggttctatgtgcgcgtgctgcaaaaagaacttgctgcgtctaccagcgaggacacccatccctataaagaagaactggaaacagccctggagcagtgtttctattgcctgtatagttttccttctaagaaatctaaagcgcgatacctagaggagcattcagctcagcaagttgacttgatctgggaagacgccctgtttatgttcgagtacttcaaacccaaaactctgccggagtttgatagttataagacctctaccgtcagcgccgatttggctaacctgttaaagagaatagccacaattgttcctcgaacggagcgccccgcactgtctttggacaaggtgtctgcgtacatcgagggtacatctaccgaggtaccgtgcctgcccgagggcgccgatccatccccgcccgtggtgaacgagctgtactatctactcgccgattaccattttaaaaataaggaacagtcaaaagctatcaagttttacatgcacgatatctgcatctgtccgaaccgtttcgacagctgggccggaatggcactggcccgagcctctagaattcaggataagctgaactccaacgaattgaaaagcgatggccccatctggaagcatgccacaccagtcctaaattgctttcgcagagcgctggagatcgactcaagtaacttaagtttatggatcgagtacggaaccatgagctatgctttgcattcctttgcctcccgccagctgaaacagtggcggggtgaacttcctccagagttggtgcagcagatggaggggcgccgggattctatgctggagaccgcaaagcactgctttacatccgcagcccggtgcgagggtgacggcgatgaagaggaatggctgatccactacatgctaggtaaggttgcagagaagcagcaacagcccccaacagtctaccttctgcactacagacaagctggacattatctccacgaggaagccgcacgttaccccaagaagatccattatcacaacccccccgagctggccatggaagctttagaggtctacttccgtttgcacgcaagcatacttaagctcttgggcaagccagattccggggtgggtgccgaggtgctggtgaactttatgaaggaagccgccgagggcccttttgcacgtggcgaggaaaaaaatacgccaaaggctagcgaaaaggaaaaggcctgcctggtggatgaagactctcactcctctgcagggacgctgcccggcccaggcgccagcctcccttcttcttctggtcccgggttaaccagccctccatacactgctacgcccatcgatcacgactacgttaagtgtaagaagccacaccagcaggcaacccctgatgaccggagccaagattccactgcggtggccctgtcggattccagctctactcaagacttcttcaatgagcccacatccctgctggaggggtccagaaagtcatacaccgagaaaagattacccatcctgagtagtcaggcgggggctactggcaaggatttgcagggagctacagaggagaggggcaagaatgaggaaagcctcgagtctaccgaagggtttcgggccgcggagcagggggtccagaaacctgccgccgaaacgccagcatcagcctgtattcccgggaagccatcagcttctacacctaccctctgggacgggaaaaagcgaggcgatttgcccggtgaacctgtggccttccctcagggcctgcctgcaggagcagaggagcagaggcagtttttaactgaacagtgtatagcctcatttaggttgtgcctctcgcggttcccgcagcattacaagagcctttatcgccttgctttcctgtacacatattctaagacccaccgaaatttgcagtgggcccgggatgtgcttctgggcagctccattccttggcaacagctgcagcacatgccagctcaagggctattctgcgaaagaaacaaaaccaatttctttaacggcatctggagaattcccgtggacgaaatcgatcgcccgggttcttttgcgtggcatatgaatcgaagcattgttctacttttgaaagtcctggcacagctgagggatcactccaccctgctgaaagtctcaagcatgctgcagcggacccctgatcaaggcaagaaatacctgcgggacgctgacaggcaagtgctggcacaacgggcatttatactgacagtgaaagtcctagaggatactctgtctgagctcgccgaggggtccgagaggcctgggcctaaggtgtgcggactgcccggcgctcgcatgactactgatgtgagtcacaaggcctctccagaggatggacaggagggactccctcagccaaagaagcctcctctcgccgatggctcaggcccaggaccagagccaggggggaaggtgggccttctgaatcaccgtcccgtggctatggacgcaggcgatagcgctgaccaatccggagaacgtaaggataaggaatcaccacgcgcaggccccactgagcccatggacacgagtgaagcgactgtatgccactctgatctagagcgtacccctcccctgttgcctggccgcccagctagggatcgcggtccagagtcaaggccaacagaactgtccctggaagagctttccatcagcgccaggcagcagcccaccccactgacccccgctcaaccggccccagcgcccgcaccagccactaccacggggacacgggcagggggtcatccggaagaacctttatctagactgtcccggaagagaaagctcctcgaggacactgagtccggcaagactctactactggatgcctatagggtgtggcagcaagggcagaaaggtgtggcctatgacttgggacgcgtggagaggatcatgtccgagacctatatgctgattaaacaggtggacgaggaagctgcgctggagcaggctgtcaagttttgccaagtccacctgggtgccgctgcacagcgacaggcgtccggcgacacgccaacgacccctaaacatccgaaagactcaagagagaacttctttcccgtgactgttgtcccaaccgctccggaccccgtgcccgctgactccgtgcagcggccttccgatgcccatacaaagcctagacccgcactcgccgctgcgacaaccatcatcacctgcccccctagcgcgagcgcctccacattggatcaatcaaaagacccaggtcccccccggccacaccgtccagaggcaactccaagcatggcttctctcggacctgaaggagaagaactagcgcgggttgcagagggtacgtcttttcctcctcaggagccacgccattcaccacaggtgaaaatggcacccactagttctcctgccgaaccccactgctggccggccgaagctgctctggggaccggcgctgaaccaacctgcagtcaggaagggaaactgcggcctgagccaagacgagacggggaagcacaagaagctgctagcgagacacagcctctgagttcacctccaactgccgcctcatctaaggctccttcaagcggttctgcccaacctcccgaaggccacccgggtaaacctgagccatcaagggccaagtcacgcccccttcctaacatgcctaaactcgtaatcccgtcagctgcaacgaagttccctccggagatcactgtaactccaccaacccccactctcctgtccccaaagggttctatcagcgaagagacaaagcagaagctgaagtctgccatcctgtctgcacagtccgccgcaaacgttcgaaaggagtctttgtgtcagcccgccttagaagttctggagacatcatcacaggaaagttcccttgagtctgaaaccgatgaagacgatgactatatggacatatag

SEQ ID NO: 173790 - DNA, 6663 bp, Artificial Sequence
  derived and/or modified sequence
atgattcggattgctgccctgaatgcaagtagcaccatcgaagacgatcatgagggtagctttaaatcccacaaaacccagacaaaggaggcccaagaagccgaggcattcgccctgtaccacaaagcccttgatcttcagaaacatgatcgattcgaggaaagcgcaaaggcttatcatgaattactggaggcctctttgttgcgggaggcagtcagttccggcgacgagaaggaaggcctgaagcacccgggactgatccttaaatatagcacgtataaaaatctcgctcagctggcagctcagagggaggacttagagacagcgatggaattctacctagaggccgtgatgctggatagtaccgatgtgaatctgtggtataagattggacacgttgcactcaggttgatcagaattcccttggctaggcacgccttcgaggaaggtctccggtgcaaccccgaccactggccctgtttggacaatctgatcaccgtgctgtacacactttctgattatacaacatgcctctatttcatttgcaaagccctggagaaggattgtcggtattccaagggactggtcttgaaagagaagatcttcgaagaacagccatgtctccggaaggattctcttcggatgtttctcaaatgtgacatgtcaattcatgacgtgagtgtcagcgccgctgagacgcaggcaatagtagacgaagcattagggctgagaaagaagaggcaagctctgatcgtaagagagaaggaacctgaccttaaacttgtccagcccattccgttttttacgtggaaatgtctcggcgagtccttgttggctatgtataatcatctaacgacatgcgagccccctaggccctctctcggtaagcgtatagacctgtctgattaccaggacccatcgcagcccttggagtctagtatggtggtaacccctgtgaatgtcatccagccctctactgtgagcacaaaccctgcggtagcggtcgctgagcccgtggtgtcatacacgtccgtggccacgacgtcattcccactgcattctcctggcctcttagagaccggcgctcctgtgggagacatcagcggcggagataaatccaaaaagggtgttaaacggaagaaaatctcagaggagagtggtgagactgcaaaacgaaggtcagccagggtccgcaacacaaagtgcaaaaaagaagaaaaggtggactttcaggagttgctcatgaagtttctaccgtcccgactcaggaagttagacccagaggaagaggatgatagcttcaacaattacgaagtacagtctgaggcaaaactcgagtccttcccatccatagggcctcagcggttatctttcgactctgcgacattcatggagtccgaaaagcaggatgtgcacgaatttctgctggaaaacctgaccaacgggggtatcctagagctgatgatgcggtacctgaaggctatgggtcacaagtttctggtccgatggccgccaggtctggccgaagtcgtcctctccgtgtatcattcttggcggcgacactccacctcactgccgaatcctcttttgcgggactgtagcaacaagcatatcaaggatatgatgctgatgagcttgtcctgtatggagttgcaactggatcagtggttactgaccaaaggacgtagttccgcagtctcgccccgaaattgtccggcaggaatggtgaatggcaggttcggtcctgattttcctggtacgcactgcctcggggacctcctgcagctgtctttcgcctcatctcagcgggacctgttcgaagacgggtggctagaattcgttgttcgggtttattggttaaaagccagatttctggcgctgcagggcgatatggaacaagccctagagaattacgatatctgcacagaaatgctgcaatcgtcaacagcgatacaagttgaggccggagccgaaaggagagacatcgttattcggttgcctaacctgcacaacgatagcgtggtttcccttgaggaaatcgataagaatcttaagtccctcgaacggtgtcagtccctcgaggagattcaacgcctgtatgaggcgggtgattacaaggcggtcgtacacctgctgcggcctactctgtgtactagcggcttcgaccgggctaagcacctcgagttcatgacaagcataccagagagaccggctcaactcctactgctgcaggattctctcctcagattaaaggattatcgccaatgtttcgagtgctccgacgtggctctaaatgaagcggtccaacaaatggtgaacagcggtgaagctgcagctaaagaagagtgggttgccacggtaactcagctgttgatgggcatcgagcaggctttgagtgccgactcaagcggatctattcttaaggtgtcctcatctactacagggctagtgcggttgaccaacaacctcattcaggtgatcgactgtagcatggccgttcaagaggaagcaaaggaacctcacgtttcctcagtactcccttggattatcctgcatcgcatcatatggcaagaggaagacaccttccacagtctgtgccaccaacaacagctgcagaatcctgccgaagaaggcatgagcgagacccctatgctgccttcctctctgatgctgttgaacacagcacatgagtacctaggtcggcgaagctggtgttgcaacagcgacggtgccctgctcagattttacgttcgagtgttgcaaaaggaacttgcggctagcaccagcgaggacacacacccctacaaagaggagctggagacagctctggagcagtgcttctactgcctgtattcctttccaagcaagaaaagcaaagcacggtacttggaggagcactcagctcaacaggtggatctgatttgggaagacgcgctgttcatgttcgaatatttcaaacccaaaaccctgcccgaattcgacagctacaaaaccagcacagtcagcgccgatctggccaacctgctgaaacgaatagccaccatcgtgccgaggaccgagcgacctgctttgagcttggataaggtttctgcatatattgaagggacatcgaccgaggtcccctgccttccagagggcgcagacccctcgccccctgttgtcaatgagctgtattatctactcgcagactatcacttcaagaacaaagaacagagtaaagccatcaaattctatatgcacgatatttgcatatgccccaacaggttcgacagttgggcaggtatggctcttgcgagggctagcaggattcaggacaagctgaattccaatgagctgaaaagtgacggtccaatatggaaacacgcaacgcccgtgctgaactgcttcaggagggccctggagatagattcgagcaatttgtccctctggattgaatacggtaccatgagctatgccttacactcctttgccagccggcaactgaaacagtggaggggcgaactcccacctgagctggtgcagcaaatggagggtagacgcgattccatgctcgaaaccgcgaaacattgcttcacttctgccgcaagatgcgagggcgatggcgacgaggaagagtggctgattcattacatgctgggaaaggttgccgagaagcaacagcaaccccctaccgtgtacctgctccattaccggcaagccggacactatttgcacgaagaagcagcgagatatccaaagaagatccattaccataacccaccagaattagcaatggaggccctggaagtgtacttcaggttgcatgcctcgatcttaaaattactgggcaagcctgactcgggggtgggagcggaagtgctcgtgaactttatgaaggaagctgccgagggccctttcgctcggggtgaagagaaaaataccccaaaagccagcgagaaggaaaaggcgtgcctggtggatgaagactcacattcttccgccggaactctgcccggacccggagcctctctccccagctctagcgggcctggattgacttcacccccttacacagccacccccattgaccacgattacgtgaagtgcaaaaaacctcatcagcaggccacacccgatgacaggtcccaggattctacagccgtggcactaagtgactcttcaagcacacaggacttcttcaacgaaccaacatctctgctggaaggatctcggaagagctacaccgagaagaggctgcccatcctgagttctcaggccggagccactggtaaggatctccagggagccacagaggaaagaggcaaaaacgaggagtcactggaatcgaccgaaggttttcgcgctgctgaacagggcgtgcagaaaccggctgcagagactcccgcttccgcgtgcatcccgggaaagccgtcggcatcaaccccaactctgtgggacggaaagaaaagaggagatctgccaggggaaccggttgcctttccccagggcctccctgccggagcggaagagcagaggcagttccttaccgaacagtgcatagcctcttttaggttgtgccttagccggttccctcagcattataagtcactctatcgccttgccttcctttacacatactcaaaaactcataggaatctccagtgggccagagatgtactccttgggagttctattccctggcagcagttacagcatatgcctgcccagggcttattttgcgagaggaacaaaaccaactttttcaacggtatttggcggatcccagtcgatgagatcgacaggcccggtagcttcgcttggcacatgaacagaagcattgtgttgctcttaaaggtcctcgcacagctgagagatcatagtactcttttaaaggtgtcgtctatgctgcaacgtacccctgaccagggaaagaagtacttgcgggacgccgaccggcaggttctggctcaacgcgctttcattctaactgtgaaggtgctcgaggatacactctccgagcttgcagaaggatcggaacgaccaggccctaaagtgtgtggactcccaggagcccgtatgaccacagatgtgagtcataaagcatccccggaggacgggcaggaaggactcccacagcccaaaaaaccacccctggccgacgggagcggcccaggtcccgagccaggaggtaaagtcggccttctgaatcaccgacccgtcgcgatggatgccggtgatagtgccgaccagtcaggtgaaagaaaagataaagaaagccctagggcaggccctaccgagcccatggacaccagtgaagcaactgtttgtcacagcgacttggagcggacccccccactcctgcctggtcgccctgcacgcgaccggggacctgagagccggcctaccgagttgtctctggaggagcttagtattagtgccaggcagcaaccgacgccgctcacacccgctcaaccagctccagcccctgctcctgctaccaccaccggaacgagggcagggggacacccggaggagcccctgtctcgactgtcacgtaaacgaaaactactggaggataccgaaagtgggaagactctccttctggacgcatacagggtgtggcagcagggacagaagggagttgcgtatgacctgggtagggtcgagagaatcatgagcgaaacctatatgctgattaaacaggtggacgaggaggctgccctggagcaggccgtcaagttttgccaggtgcacttaggtgctgcagcccagcgacaggcgtcaggcgatactccaacgacacctaagcaccctaaagactccagggagaacttttttcctgttaccgtcgttcctaccgcaccagatccagtgcccgcagatagcgtgcagcgcccaagcgatgcccacacaaaaccccgaccagcactagctgctgctaccaccataatcacttgcccaccatcagcctccgcaagtacccttgatcaaagcaaggaccctggcccacctcgcccacataggccggaggccaccccttcaatggcgtctttgggccctgagggggaggagctggcaagggtggccgaggggacctcttttccaccacaggagccacgccattccccccaggtgaagatggctccaactagcagcccagctgaaccccactgctggcccgctgaagccgctctggggaccggtgcggagcctacatgcagccaagagggcaagctccgccctgaaccacgacgagacggagaggcccaggaggccgcttcagagacgcaaccgctctcgagtccacctacggctgcctcatcaaaggctccctcgtcaggaagcgctcagccccctgagggtcacccaggtaaacctgaaccatcgcgagcaaaaagtcgtcctctccctaatatgcccaaactcgtcattccgtcggcggcaactaagtttcctccagagattacggtgacacccccaactcccacacttctttcaccgaaggggtcaattagcgaggaaacaaagcaaaaactgaagagtgcaatcctgagcgcacagagtgcggcaaacgtgcgcaaggaaagcttatgtcaacctgccctcgaggtcctagagacatcttcgcaggagagctccctcgagtccgagaccgatgaggatgacgactatatggacatctag

SEQ ID NO: 173791 - DNA, 6662 bp, Artificial Sequence
  derived and/or modified sequence
atgattcgcattgcagctttgaatgcctcctccactatcgaggacgaccacgagggtagtttcaagagccataaaactcagaccaaagaggctcaggaagccgaggctttcgccctttaccataaggcattggatcttcagaagcatgataggtttgaagagtctgcgaaagcttaccacgaactgttagaggcttcactgcttcgcgaggctgtgagttcaggagacgaaaaggaaggactgaagcatcctggccttatcctgaaatattcaacttataaaaatctagcccagttagccgcacagagagaggatctcgaaactgccatggagttttacttagaggctgtaatgttggatagcactgacgtgaacctgtggtacaagataggccacgttgcccttcgtttgattcgaataccacttgcacggcacgcttttgaagaggggctcaggtgtaaccccgaccactggccatgtcttgacaatttaatcacagtactatacacattatctgactacacgacatgcttgtatttcatctgcaaggctctcgaaaaggattgtagatactccaaagggcttgtgctgaaagaaaaaatcttcgaagagcagccttgcctgagaaaggacagcctgcggatgttcctgaagtgcgatatgagcattcacgacgttagcgtatccgccgctgagacccaggccattgtcgacgaggccttgggattgagaaagaaaagacaggctctgatcgtacgtgagaaggagcctgaccttaaactggtccaacctatcccctttttcacctggaaatgcctaggggaaagtttgctcgccatgtacaatcatttaacaacatgcgaaccccctaggccgtccctgggaaagaggatcgatctcagcgactaccaagacccatcccagccccttgagtcttctatggtggtgaccccggtgaacgtcatccagcctagcacagtatccaccaaccccgcagttgccgtggccgagcctgttgtctcatacaccagtgtcgcaacaaccagcttccctttgcactcccctggcctgctcgagactggtgctccagttggagatatctctggtggcgataaatccaagaagggcgttaaacggaagaagatttccgaggaatccggggagacagcaaagcgccgatctgccagagtgcgcaatacaaagtgtaaaaaggaggaaaaggttgacttccaggaactgttgatgaaattcctgccctcaagactgagaaaactggaccccgaggaagaggacgactctttcaataactatgaagtgcagtctgaagcaaaactggagagttttccatccatcggccctcagcgcttgtcatttgattcagctacgtttatggagtccgaaaagcaggacgtccacgaattcctcctggagaacctgacgaatggtgggattcttgaactcatgatgaggtacctgaaggccatgggtcataagttccttgtgagatggcccccagggctcgcggaagtagtgctgtccgtgtatcacagctggcgcaggcatagtacaagccttcctaatccattgttaagagattgctccaacaaacacatcaaggacatgatgttaatgagtctctcctgcatggagctgcagcttgaccagtggcttctcactaagggcagaagttcggcagtttcaccacgtaactgccctgctgggatggttaacggcagatttggcccagacttcccaggaactcactgcttaggggatctgctacagctgagtttcgcaagctcgcagagagatctcttcgaggacggctggctggagtttgttgtcagagtgtattggttaaaagccaggttcctggcactgcagggagacatggaacaggctctggagaattacgacatttgcacagagatgctccaatcatccacagctatccaggtggaggccggagctgagcgcagagatattgtcattcgtctccccaacctgcacaacgattccgtcgtctccctagaggaaattgacaaaaacctgaaatctttagaaaggtgccagtccctggaagaaatccagcgcctgtacgaggcaggtgattacaaagctgtggtgcacctgctaagaccaacattgtgtacctccggctttgaccgagcgaagcacctggagttcatgactagtatcccagagcggcctgcccaactgctgctgctccaggacagcctacttaggctcaaggattataggcagtgtttcgagtgtagcgatgtcgctctgaatgaagctgtgcagcagatggtgaactccggggaggcggcagcaaaggaggagtgggttgcgacggtcacccagctgcttatgggaatcgaacaggcattatcagcggattcttccgggtctattctgaaggtatcgagctctacgactggcctagtgcgcttaaccaataacctaatccaggttatagactgttccatggccgtgcaggaagaggcaaaggagccccacgtcagcagtgtgcttccatggatcatactgcaccggatcatctggcaggaagaagatacattccattcactgtgtcaccaacagcaactgcagaatcccgcagaggaaggaatgtctgaaaccccgatgctgccttctagcctgatgctgctgaacactgcccacgaatatttgggcagaaggagttggtgttgcaatagcgatggcgcacttttgagattctacgtgagagtgctccagaaggaactagccgcatccacaagtgaggacacacatccctacaaggaggagctggagaccgctttggagcaatgtttttactgtctgtacagtttcccgtccaaaaagtctaaggcaaggtatctcgaggagcacagtgcacagcaggtcgacctgatttgggaagacgcactgtttatgttcgagtattttaaaccgaagacattgcctgagtttgacagctataagactagtacagtgagtgccgacttggccaatctgctgaaacggatcgctaccattgtacccaggacggagcgcccagcattgtctctagataaggtatctgcctacattgaaggcacaagcaccgaagttccttgtctcccagaaggggctgatccttccccgcctgtggttaatgaattatattatctgctggccgattaccactttaaaaacaaagaacaatctaaggctataaagttctacatgcacgatatttgtatatgtccaaacaggttcgacagctgggctggaatggcattagcacgcgcttctcgaatccaggataaactgaactcaaatgaactgaagtccgatggacctatctggaaacacgccaccccagtgctcaattgttttcgacgggcattagagattgacagcagcaacctttctctgtggatcgagtatgggacgatgagctatgccctgcactcattcgcctctagacagctaaagcagtggcgaggggagttaccacccgaattagtgcaacagatggaagggagacgggactccatgctggaaacagccaaacattgctttacctccgcagcccgttgtgagggagacggggacgaggaggagtggctaattcactatatgctcggcaaggtggccgaaaaacagcagcagccccctacggtgtacctcttgcactataggcaggctggacactaccttcacgaagaagccgctaggtatcctaaaaagattcattatcataacccacccgagctggccatggaagccttggaagtgtacttccggctccacgcaagcatcctcaagctgttgggaaaacctgacagcggggttggggctgaggtactggtgaacttcatgaaagaggctgctgaggggcctttcgccagaggtgaggagaaaaataccccaaaggctagcgagaaagaaaaggcttgtctcgtggacgaggatagccacagcagcgccggaactctcccgggacccggtgcaagtctgcccagctccagtggaccaggactcacctccccaccctataccgctaccccaatcgatcacgactatgtgaaatgcaaaaaaccacaccagcaggccacacccgacgacaggagtcaggacagcactgccgtggcgctgtcagactcttcttccacccaggacttcttcaacgaacctacaagcctcttggaaggatctcggaaatcctatacagagaagagactgccaattctctcctcccaagctggagccacagggaaagatctgcagggggctacagaggagcgcggtaagaacgaagaatcactggaatcgaccgaggggttcagagctgcggaacagggggtgcaaaagccagcagctgagactcctgccagcgcttgtatccccggaaagccgtctgcaagcactccaaccttgtgggacgggaaaaaacgcggagatctcccaggtgagcccgtcgccttcccccagggtctccctgccggagcagaggagcagcggcagttcctcaccgaacaatgcatcgcaagctttagactctgcctgtcaagattcccccaacactacaaatctttgtacagactggcatttttgtatacatactctaagacccatcgcaatttacagtgggcacgggacgtacttttagggtcatctatcccatggcagcagctccagcatatgccagctcagggactgttctgcgagcggaacaagaccaacttcttcaacgggatctggaggatccccgtggacgagatcgacaggcccggaagttttgcttggcatatgaaccggtcaattgttcttctgttaaaggttctggcccaactccgtgaccactcgactctgcttaaggtaagctccatgttgcagcgcactcccgatcaaggtaaaaagtatctcagagacgctgatagacaggtgctggctcagcgcgcattcattctgacagtgaaggtcctggaggacaccctctctgagttagcggaagggagcgagagacctggccctaaggtgtgtgggctgcctggggctaggatgaccaccgatgttagccacaaagcctcgcccgaggacgggcaagaggggctgcctcagcctaaaaaacctcccctggcagacgggtctggtcccggacccgaacctgggggaaaggtggggttactgaatcatcgtcccgtagccatggatgcaggtgactctgccgaccaatcgggggaacgcaaggacaaggaatcacctagagccggacccaccgaacctatggacactagtgaagcaacggtctgccatagcgacttagaacgcaccccccctctcttgcccggacggccagcccgagatagagggccagaatctcgaccaactgaattgtccctggaagagctgtcgattagcgccaggcaacagcccactccactaactcctgcccagccggcacccgctccagcccctgcaactactacaggcacaagggctgggggtcacccagaagagccactctcccggctgagtcgcaagaggaagttgttagaggatactgaatccggtaagacactcctgctcgatgcctacagagtatggcagcaaggccagaaaggggtcgcatatgacctaggaagagtcgaacggattatgtcggaaacctatatgctgatcaaacaagtggacgaggaagccgcactggagcaggcagtaaaattttgccaagtccatctcggggctgctgcacaacgacaggcttctggtgacacccctaccactccaaaacaccccaaagattctcgggaaaatttcttccctgtgaccgtggtacccaccgctccagacccagtgccggctgatagtgtccagagaccttcagatgctcacaccaaacctcgacctgccctggctgccgctaccaccatcataacgtgccccccttcggctagtgccagcaccttggaccagagcaaggatcccggtccgcctcgacctcacagaccagaagccaccccttctatggcttctttgggaccagaaggcgaggagttggccagagtcgcagaagggactagtttcccgcctcaggagcccagacacagcccacaagtcaagatggcccctacctcttcgcctgcagagccccattgctggcccgcagaggcagccctcggaactggagccgaaccaacatgcagccaggagggaaaactgcgccctgaaccccgtagggatggcgaggcgcaagaagcagcatcggagacacaacccttaagttccccacctactgccgcatcttccaaagccccatcttcaggatctgcccagccgcctgaaggccacccgggaaaaccagaaccgtcaagggccaaatctaggccacttcctaacatgccgaaactagtgatcccatctgctgcaaccaagttcccacccgaaatcactgtcactcctccaacaccaaccctcctatcgccaaaaggaagcatctcagaagagacgaagcagaaactgaagtctgctatactaagtgcacagtccgcggcaaacgttcgcaaggagtccctatgccagcccgctctggaagtgctggagacatcttctcaagaaagcagtctggaaagcgaaacagatgaggacgatgattatatggacatata

SEQ ID NO: 173792 - DNA, 7222 bp, Artificial Sequence
  derived and/or modified sequence
agccggacggcgcggtggtcgggacagactggccgttgctgtggagacgcctggagagttgtggactggggcaacctttgccagtgatgagaagtgatgctcgtggcagtgctgaatctctctgaatatgattcgaattgcagccttaaatgccagctccaccattgaggatgatcatgaaggaagctttaaaagtcacaaaacccagacaaaggaggctcaggaagcagaggcttttgcattgtaccacaaggcccttgatctgcagaaacatgaccggtttgaggagtctgccaaagcctaccatgagctcttggaggcgagcctgctgcgggaggcagtttcatccggtgatgagaaagaggggttgaaacaccctgggctgatactgaaatattccacttataagaacttggcccagctggcagcccagcgggaggatctggagacagccatggagttctacttagaggcagtgatgctggactccacagatgtcaacctctggtataagattggacatgtggccctgaggctcatccggatccccctggctcgccatgcttttgaggaagggctgcggtgcaatcctgaccactggccctgtttggataacctaatcactgtcctgtacaccctcagtgattacacaacatgtctgtacttcatctgcaaagctttggagaaggattgccggtacagcaaagggctggtcctcaaggagaagatttttgaggagcagccttgtctccggaaggactctctcagaatgttcctcaaatgtgacatgtcgattcacgatgtttcggtgagtgcagctgagacacaggcgattgtagatgaggccttggggctgcgaaaaaagaggcaagcgctgattgtgcgggagaaggagccggacctgaaacttgtgcagcccattcctttcttcacctggaagtgcctcggagagagcttgctggccatgtacaatcatctcaccacctgtgagcccccacgtcccagccttggcaaaaggattgatttgtcggactaccaggaccccagccagcctcttgagtcctccatggtggtgacgccagttaacgtgatccagccaagcactgtcagcaccaacccagctgtggctgtcgccgagcctgtggtctcctacacctctgtggctacaaccagcttcccactgcacagtcctggtctgttggagacaggcgctcctgtgggtgatatttctgggggagataaatccaagaaaggggtaaaacggaagaagatttcagaagagagtggagaaacagcaaagcggcggtctgcccgtgtccgaaacaccaagtgcaaaaaagaagagaaagtagacttccaggagcttctgatgaagttcttgccgtccaggttaagaaagctggaccctgaggaggaagatgattcctttaataactatgaagtccagtcagaagccaaactggaaagcttcccaagcattgggcctcaaaggctgtcatttgactcagccacattcatggaatctgaaaagcaggacgtgcatgagttcctgctggagaacctaaccaacgggggcatcctggagctgatgatgcgctacctgaaagccatgggccacaagttcttggtaaggtggcctccaggcttggcggaggtcgtgctcagcgtctaccacagctggaggaggcacagcaccagcctgcccaacccgctgctgagggactgcagcaacaagcacatcaaggacatgatgctgatgtctctctcctgcatggaactccagctggaccagtggctgctgaccaaaggcagaagctctgcagtgtctcctcggaactgtcctgctggtatggtgaatggcagatttggacctgacttcccagggacccactgcctgggtgacctcctacagctgtcatttgcctcgtcccagcgcgacctgttcgaggatggttggctggagtttgtggtccgtgtttactggctgaaggctcgcttcctggcgctgcagggagacatggagcaggccctggagaactatgacatctgcacagaaatgctccagagttccaccgccatccaggtggaggcaggggctgaacgaagagacattgtcatccggctgcccaacctccataatgactctgtggtttccctggaggagattgataagaacctgaagtcgctggagcggtgccagtccctggaggagattcagcggctgtatgaagcaggcgactacaaggctgttgtgcatctgctccgccccactttgtgcaccagtgggtttgaccgggccaaacacctggagtttatgacttccattcctgagaggccagcccagctgcttcttctgcaggactccttgctccggctgaaggactatcggcagtgttttgagtgttccgatgtggctctgaacgaggctgtccagcagatggtgaactcaggtgaggctgccgccaaggaggagtgggtggccacagtgacccaactgctgatgggcatcgagcaggccctctctgcggacagcagtggtagcatcctgaaggtatcatcctccaccactggccttgtgcggctcaccaacaacctcatccaggtcattgactgcagcatggctgtgcaggaggaggccaaggagccccacgtctcttcagtgctaccctggatcattctacaccggatcatctggcaggaggaagacaccttccattctctgtgccaccagcagcagctccaaaacccagcggaggaagggatgtcagagacgcccatgctcccatcctccctcatgctgctgaacacagcccacgagtatttgggcagaaggtcctggtgctgcaattcagatggggctctgctgcgattctatgtgcgagtactccagaaggaactggctgcatccacctctgaagacacgcacccttacaaggaggagctggagacagccttggagcagtgcttctactgcctgtacagcttccccagcaagaagagtaaggccaggtacctggaggaacactcggcccagcaggtggatcttatatgggaggatgcactgttcatgtttgagtattttaagcccaagacccttcctgaatttgacagctataagaccagcaccgtgtctgctgacttggccaacctactgaagagaattgccaccattgtgcctcgcacagagaggccagcccttagcctggacaaagtctctgcctacattgagggaacttcaactgaggtaccctgcctcccagagggggctgacccctcccctccagtggtgaacgagctttactacctcctggctgattatcatttcaaaaacaaggagcagtccaaggccatcaagttctacatgcatgacatctgcatctgccccaataggtttgattcctgggcaggcatggctctggcccgggccagccgcattcaggacaagctgaactccaatgagctgaagagtgatgggcccatttggaagcatgccacgcccgtcttgaactgcttccgtcgggccctggagattgacagctccaacttgtccctatggattgagtatggcaccatgtcctatgccttgcactcattcgcctcacgtcaattgaagcagtggagaggcgagctgccccctgagctcgtgcagcagatggagggccggcgcgacagcatgctagagacagccaagcactgtttcacatcagcagcccgctgcgagggtgatggtgacgaggaggagtggctcatccactacatgctgggcaaggtggctgagaagcagcagcagccacccaccgtttacttgctgcactacaggcaggctggccactacctgcacgaggaggctgcccgctaccccaagaagatccactaccacaacccacctgagctggccatggaggccctggaggtgtactttcggctccatgcttccatcctgaagctcctggggaagcccgattctggggttggtgcagaggtcctggtcaactttatgaaggaggctgcagaaggaccctttgccaggggcgaggagaagaacacacccaaagcttcagaaaaggagaaggcctgcctggtggacgaggactcccactcttcagctgggacactgccgggccccggagcctccctcccctcctcctctggcccaggtctgacatccccaccttacacagccactccgattgaccacgattacgtcaaatgtaaaaaaccccaccagcaggcaacgccggacgaccgaagccaggacagcacagccgtagcactctcagactctagctcaacgcaggacttctttaatgagcccaccagcttactggaaggctccaggaaatcctacacagagaagaggctgcccattctcagttcccaagcaggagcgacgggtaaagatcttcagggggccacagaagaaagaggaaaaaacgaggagtcattggagagtacagaaggcttccgggctgcagagcaaggtgtccagaagcctgctgcagaaaccccagcctctgcttgcatccctggcaagccctcagcatccacacccaccctgtgggatgggaagaagagaggggacctcccaggggagccagtggccttcccccaggggctgccggctggtgctgaggagcagcggcagtttctcacagagcagtgcatcgcctccttccgcctgtgcctgagccgcttcccccagcactataagagtctctaccgtctggccttcctctacacctacagcaagacccaccggaacctccagtgggcccgcgacgtgttgctaggcagcagtatcccgtggcaacaactgcagcacatgccggcacaggggctcttctgcgagaggaacaagaccaatttcttcaacggcatctggcggatccccgtggacgagattgaccggccgggcagctttgcctggcacatgaaccgctccatcgtgctgctgctcaaggtgctggcccagctgcgggaccacagcaccctgctgaaggtgtcctccatgcttcagcggaccccagaccagggcaagaagtatctgcgagatgctgaccgccaggtcctggcgcagcgggccttcatcctcactgtgaaggtgctcgaagacacgctgagcgagctcgcagaggggtcagaacgcccagggcccaaggtctgtggcctccccggagccaggatgaccaccgatgtctcacacaaggccagtcctgaggatggccaggagggcctcccccagccgaagaagccccctctggctgatggctcagggccagggcccgagccaggaggcaaagtgggcctcctcaaccaccggcctgtggccatggatgcaggagacagtgcagaccaaagcggggagcggaaggataaagagagcccacgggcagggcccactgagcccatggacacgagtgaggccactgtttgccactcagacttggagcggacaccacccctgctgccaggtcgccccgcaagggaccggggccccgagagccggcccactgagctgtccctggaggagctgagcatcagtgcccggcagcagcccaccccgctcaccccagcccagccagcccccgcccccgcccccgccaccaccacagggaccagggcagggggccacccggaggagccgctctcccggctcagccgcaagaggaagctcctggaggacacagagtcaggcaagacacttctgttggatgcctaccgtgtgtggcagcagggccagaagggtgtggcctatgacctgggccgtgtggagaggatcatgtcggagacctacatgctcatcaagcaggtggatgaggaggctgcgctggagcaggctgtgaagttctgccaggtccatcttggggctgccgcccagagacaggcctcgggggacacccccaccactccaaagcaccccaaagacagccgagagaacttctttcctgtgacagtggtgcccacagcccctgaccctgtgccagctgactctgtccagcggcccagtgatgctcacaccaagcctcgccctgcactagctgccgccacaactattatcacctgccctccgtcagcatcagcttccaccctggaccagtccaaggaccctgggcctccccggccacacaggcctgaagctacccccagcatggcctctctgggcccagagggagaagagctggcgagagtggcagagggcaccagcttcccgcctcaggagccacggcacagtccgcaggtgaagatggcccccacaagttccccggcagagccacactgctggccggcagaggctgccctgggcacaggcgctgagcccacctgcagccaggaggggaaactgaggcctgagccgagaagggatggggaggctcaggaggctgcgagtgagactcagcccctgagctctcccccaacagctgccagctccaaggcccccagcagtgggagtgcccagccaccagagggtcacccaggcaagcctgagcccagccgggctaagtcccgccccctgcccaacatgccaaagctggtcatcccctccgccgccaccaagttcccccctgagatcaccgtcacgccacccaccccaaccctgctctcccccaaaggcagcatctcggaggagaccaagcagaagctgaagtcagccatcctttctgcccagtctgctgccaacgtgaggaaggagagcctatgccagccagccctggaggtcctggagacatccagccaggagtcctcgctggagagcgagacagacgaggacgacgactacatggacatttgaggggccactgcagccccaccgccacgccccaggggaccagccaggcctggaatgccccctgggcaggaccctgggcaggaccagaggcccacatggatgccactccccacacagcccccaggcctgcccagcccacctcctcatggcatcctccctgtacccaggtcaggctgtccacaccacatgggagcccagaggaggaggggcccgccttagccatgtgaaggtggattggtcgccatctgcacgccaggcggcatccttttctatgaagtgttgactttgtaaatctgcccacacccagctggccatatccacccctcgacgccgggatgagccggctctgcctgtgtcacagtggaggggtcctttagggccaggctcacccctcaccctttttttggttgcttttctaataaagatggaacagtt

SEQ ID NO: 173793 - DNA, 7480 bp, Artificial Sequence
  derived and/or modified sequence
ctcagcagagcccggggcacaggccggaggggctgcaggcgcgaggctgggttacgtgaggaagctgggggtttcgcgggcagctttagagccccagtcagggaaaccgaggccgggcttcctggctgcctcgcgagcctcttcatggctctcgccgccgccctgaggtgcctagaatgggttccggcctccggggaggttcccagtaaccgcaggagccaccattgatttggcgtctgctgggtgcaaagcccagcgcgctaaccctttactcgcgacctttcgcttcaccttcacagcagccctgcgaggagagttgtggactggggcaacctttgccagtgatgagaagtgatgctcgtggcagtgctgaatctctctgaatatgattcgaattgcagccttaaatgccagctccaccattgaggatgatcatgaaggaagctttaaaagtcacaaaacccagacaaaggaggctcaggaagcagaggcttttgcattgtaccacaaggcccttgatctgcagaaacatgaccggtttgaggagtctgccaaagcctaccatgagctcttggaggcgagcctgctgcgggaggcagtttcatccggtgatgagaaagaggggttgaaacaccctgggctgatactgaaatattccacttataagaacttggcccagctggcagcccagcgggaggatctggagacagccatggagttctacttagaggcagtgatgctggactccacagatgtcaacctctggtataagattggacatgtggccctgaggctcatccggatccccctggctcgccatgcttttgaggaagggctgcggtgcaatcctgaccactggccctgtttggataacctaatcactgtcctgtacaccctcagtgattacacaacatgtctgtacttcatctgcaaagctttggagaaggattgccggtacagcaaagggctggtcctcaaggagaagatttttgaggagcagccttgtctccggaaggactctctcagaatgttcctcaaatgtgacatgtcgattcacgatgtttcggtgagtgcagctgagacacaggcgattgtagatgaggccttggggctgcgaaaaaagaggcaagcgctgattgtgcgggagaaggagccggacctgaaacttgtgcagcccattcctttcttcacctggaagtgcctcggagagagcttgctggccatgtacaatcatctcaccacctgtgagcccccacgtcccagccttggcaaaaggattgatttgtcggactaccaggaccccagccagcctcttgagtcctccatggtggtgacgccagttaacgtgatccagccaagcactgtcagcaccaacccagctgtggctgtcgccgagcctgtggtctcctacacctctgtggctacaaccagcttcccactgcacagtcctggtctgttggagacaggcgctcctgtgggtgatatttctgggggagataaatccaagaaaggggtaaaacggaagaagatttcagaagagagtggagaaacagcaaagcggcggtctgcccgtgtccgaaacaccaagtgcaaaaaagaagagaaagtagacttccaggagcttctgatgaagttcttgccgtccaggttaagaaagctggaccctgaggaggaagatgattcctttaataactatgaagtccagtcagaagccaaactggaaagcttcccaagcattgggcctcaaaggctgtcatttgactcagccacattcatggaatctgaaaagcaggacgtgcatgagttcctgctggagaacctaaccaacgggggcatcctggagctgatgatgcgctacctgaaagccatgggccacaagttcttggtaaggtggcctccaggcttggcggaggtcgtgctcagcgtctaccacagctggaggaggcacagcaccagcctgcccaacccgctgctgagggactgcagcaacaagcacatcaaggacatgatgctgatgtctctctcctgcatggaactccagctggaccagtggctgctgaccaaaggcagaagctctgcagtgtctcctcggaactgtcctgctggtatggtgaatggcagatttggacctgacttcccagggacccactgcctgggtgacctcctacagctgtcatttgcctcgtcccagcgcgacctgttcgaggatggttggctggagtttgtggtccgtgtttactggctgaaggctcgcttcctggcgctgcagggagacatggagcaggccctggagaactatgacatctgcacagaaatgctccagagttccaccgccatccaggtggaggcaggggctgaacgaagagacattgtcatccggctgcccaacctccataatgactctgtggtttccctggaggagattgataagaacctgaagtcgctggagcggtgccagtccctggaggagattcagcggctgtatgaagcaggcgactacaaggctgttgtgcatctgctccgccccactttgtgcaccagtgggtttgaccgggccaaacacctggagtttatgacttccattcctgagaggccagcccagctgcttcttctgcaggactccttgctccggctgaaggactatcggcagtgttttgagtgttccgatgtggctctgaacgaggctgtccagcagatggtgaactcaggtgaggctgccgccaaggaggagtgggtggccacagtgacccaactgctgatgggcatcgagcaggccctctctgcggacagcagtggtagcatcctgaaggtatcatcctccaccactggccttgtgcggctcaccaacaacctcatccaggtcattgactgcagcatggctgtgcaggaggaggccaaggagccccacgtctcttcagtgctaccctggatcattctacaccggatcatctggcaggaggaagacaccttccattctctgtgccaccagcagcagctccaaaacccagcggaggaagggatgtcagagacgcccatgctcccatcctccctcatgctgctgaacacagcccacgagtatttgggcagaaggtcctggtgctgcaattcagatggggctctgctgcgattctatgtgcgagtactccagaaggaactggctgcatccacctctgaagacacgcacccttacaaggaggagctggagacagccttggagcagtgcttctactgcctgtacagcttccccagcaagaagagtaaggccaggtacctggaggaacactcggcccagcaggtggatcttatatgggaggatgcactgttcatgtttgagtattttaagcccaagacccttcctgaatttgacagctataagaccagcaccgtgtctgctgacttggccaacctactgaagagaattgccaccattgtgcctcgcacagagaggccagcccttagcctggacaaagtctctgcctacattgagggaacttcaactgaggtaccctgcctcccagagggggctgacccctcccctccagtggtgaacgagctttactacctcctggctgattatcatttcaaaaacaaggagcagtccaaggccatcaagttctacatgcatgacatctgcatctgccccaataggtttgattcctgggcaggcatggctctggcccgggccagccgcattcaggacaagctgaactccaatgagctgaagagtgatgggcccatttggaagcatgccacgcccgtcttgaactgcttccgtcgggccctggagattgacagctccaacttgtccctatggattgagtatggcaccatgtcctatgccttgcactcattcgcctcacgtcaattgaagcagtggagaggcgagctgccccctgagctcgtgcagcagatggagggccggcgcgacagcatgctagagacagccaagcactgtttcacatcagcagcccgctgcgagggtgatggtgacgaggaggagtggctcatccactacatgctgggcaaggtggctgagaagcagcagcagccacccaccgtttacttgctgcactacaggcaggctggccactacctgcacgaggaggctgcccgctaccccaagaagatccactaccacaacccacctgagctggccatggaggccctggaggtgtactttcggctccatgcttccatcctgaagctcctggggaagcccgattctggggttggtgcagaggtcctggtcaactttatgaaggaggctgcagaaggaccctttgccaggggcgaggagaagaacacacccaaagcttcagaaaaggagaaggcctgcctggtggacgaggactcccactcttcagctgggacactgccgggccccggagcctccctcccctcctcctctggcccaggtctgacatccccaccttacacagccactccgattgaccacgattacgtcaaatgtaaaaaaccccaccagcaggcaacgccggacgaccgaagccaggacagcacagccgtagcactctcagactctagctcaacgcaggacttctttaatgagcccaccagcttactggaaggctccaggaaatcctacacagagaagaggctgcccattctcagttcccaagcaggagcgacgggtaaagatcttcagggggccacagaagaaagaggaaaaaacgaggagtcattggagagtacagaaggcttccgggctgcagagcaaggtgtccagaagcctgctgcagaaaccccagcctctgcttgcatccctggcaagccctcagcatccacacccaccctgtgggatgggaagaagagaggggacctcccaggggagccagtggccttcccccaggggctgccggctggtgctgaggagcagcggcagtttctcacagagcagtgcatcgcctccttccgcctgtgcctgagccgcttcccccagcactataagagtctctaccgtctggccttcctctacacctacagcaagacccaccggaacctccagtgggcccgcgacgtgttgctaggcagcagtatcccgtggcaacaactgcagcacatgccggcacaggggctcttctgcgagaggaacaagaccaatttcttcaacggcatctggcggatccccgtggacgagattgaccggccgggcagctttgcctggcacatgaaccgctccatcgtgctgctgctcaaggtgctggcccagctgcgggaccacagcaccctgctgaaggtgtcctccatgcttcagcggaccccagaccagggcaagaagtatctgcgagatgctgaccgccaggtcctggcgcagcgggccttcatcctcactgtgaaggtgctcgaagacacgctgagcgagctcgcagaggggtcagaacgcccagggcccaaggtctgtggcctccccggagccaggatgaccaccgatgtctcacacaaggccagtcctgaggatggccaggagggcctcccccagccgaagaagccccctctggctgatggctcagggccagggcccgagccaggaggcaaagtgggcctcctcaaccaccggcctgtggccatggatgcaggagacagtgcagaccaaagcggggagcggaaggataaagagagcccacgggcagggcccactgagcccatggacacgagtgaggccactgtttgccactcagacttggagcggacaccacccctgctgccaggtcgccccgcaagggaccggggccccgagagccggcccactgagctgtccctggaggagctgagcatcagtgcccggcagcagcccaccccgctcaccccagcccagccagcccccgcccccgcccccgccaccaccacagggaccagggcagggggccacccggaggagccgctctcccggctcagccgcaagaggaagctcctggaggacacagagtcaggcaagacacttctgttggatgcctaccgtgtgtggcagcagggccagaagggtgtggcctatgacctgggccgtgtggagaggatcatgtcggagacctacatgctcatcaagcaggtggatgaggaggctgcgctggagcaggctgtgaagttctgccaggtccatcttggggctgccgcccagagacaggcctcgggggacacccccaccactccaaagcaccccaaagacagccgagagaacttctttcctgtgacagtggtgcccacagcccctgaccctgtgccagctgactctgtccagcggcccagtgatgctcacaccaagcctcgccctgcactagctgccgccacaactattatcacctgccctccgtcagcatcagcttccaccctggaccagtccaaggaccctgggcctccccggccacacaggcctgaagctacccccagcatggcctctctgggcccagagggagaagagctggcgagagtggcagagggcaccagcttcccgcctcaggagccacggcacagtccgcaggtgaagatggcccccacaagttccccggcagagccacactgctggccggcagaggctgccctgggcacaggcgctgagcccacctgcagccaggaggggaaactgaggcctgagccgagaagggatggggaggctcaggaggctgcgagtgagactcagcccctgagctctcccccaacagctgccagctccaaggcccccagcagtgggagtgcccagccaccagagggtcacccaggcaagcctgagcccagccgggctaagtcccgccccctgcccaacatgccaaagctggtcatcccctccgccgccaccaagttcccccctgagatcaccgtcacgccacccaccccaaccctgctctcccccaaaggcagcatctcggaggagaccaagcagaagctgaagtcagccatcctttctgcccagtctgctgccaacgtgaggaaggagagcctatgccagccagccctggaggtcctggagacatccagccaggagtcctcgctggagagcgagacagacgaggacgacgactacatggacatttgaggggccactgcagccccaccgccacgccccaggggaccagccaggcctggaatgccccctgggcaggaccctgggcaggaccagaggcccacatggatgccactccccacacagcccccaggcctgcccagcccacctcctcatggcatcctccctgtacccaggtcaggctgtccacaccacatgggagcccagaggaggaggggcccgccttagccatgtgaaggtggattggtcgccatctgcacgccaggcggcatccttttctatgaagtgttgactttgtaaatctgcccacacccagctggccatatccacccctcgacgccgggatgagccggctctgcctgtgtcacagtggaggggtcctttagggccaggctcacccctcaccctttttttggttgcttttctaataaagatggaacagtt

SEQ ID NO: 173794 - DNA, 6663 bp, Artificial Sequence
  derived and/or modified sequence
atgatcagaatcgccgccctgaacgccagcagcaccatcgaggacgaccacgagggcagcttcaagagccacaagacccagaccaaggaggcccaggaggccgaggccttcgccctgtaccacaaggccctggacctgcagaagcacgacagattcgaggagagcgccaaggcctaccacgagctgctggaggccagcctgctgagagaggccgtgagcagcggcgacgagaaggagggcctgaagcaccccggcctgatcctgaagtacagcacctacaagaacctggcccagctggccgcccagagagaggacctggagaccgccatggagttctacctggaggccgtgatgctggacagcaccgacgtgaacctgtggtacaagatcggccacgtggccctgagactgatcagaatccccctggccagacacgccttcgaggagggcctgagatgcaaccccgaccactggccctgcctggacaacctgatcaccgtgctgtacaccctgagcgactacaccacctgcctgtacttcatctgcaaggccctggagaaggactgcagatacagcaagggcctggtgctgaaggagaagatcttcgaggagcagccctgcctgagaaaggacagcctgagaatgttcctgaagtgcgacatgagcatccacgacgtgagcgtgagcgccgccgagacccaggccatcgtggacgaggccctgggcctgagaaagaagagacaggccctgatcgtgagagagaaggagcccgacctgaagctggtgcagcccatccccttcttcacctggaagtgcctgggcgagagcctgctggccatgtacaaccacctgaccacctgcgagccccccagacccagcctgggcaagagaatcgacctgagcgactaccaggaccccagccagcccctggagagcagcatggtggtgacccccgtgaacgtgatccagcccagcaccgtgagcaccaaccccgccgtggccgtggccgagcccgtggtgagctacaccagcgtggccaccaccagcttccccctgcacagccccggcctgctggagaccggcgcccccgtgggcgacatcagcggcggcgacaagagcaagaagggcgtgaagagaaagaagatcagcgaggagagcggcgagaccgccaagagaagaagcgccagagtgagaaacaccaagtgcaagaaggaggagaaggtggacttccaggagctgctgatgaagttcctgcccagcagactgagaaagctggaccccgaggaggaggacgacagcttcaacaactacgaggtgcagagcgaggccaagctggagagcttccccagcatcggcccccagagactgagcttcgacagcgccaccttcatggagagcgagaagcaggacgtgcacgagttcctgctggagaacctgaccaacggcggcatcctggagctgatgatgagatacctgaaggccatgggccacaagttcctggtgagatggccccccggcctggccgaggtggtgctgagcgtgtaccacagctggagaagacacagcaccagcctgcccaaccccctgctgagagactgcagcaacaagcacatcaaggacatgatgctgatgagcctgagctgcatggagctgcagctggaccagtggctgctgaccaagggcagaagcagcgccgtgagccccagaaactgccccgccggcatggtgaacggcagattcggccccgacttccccggcacccactgcctgggcgacctgctgcagctgagcttcgccagcagccagagagacctgttcgaggacggctggctggagttcgtggtgagagtgtactggctgaaggccagattcctggccctgcagggcgacatggagcaggccctggagaactacgacatctgcaccgagatgctgcagagcagcaccgccatccaggtggaggccggcgccgagagaagagacatcgtgatcagactgcccaacctgcacaacgacagcgtggtgagcctggaggagatcgacaagaacctgaagagcctggagagatgccagagcctggaggagatccagagactgtacgaggccggcgactacaaggccgtggtgcacctgctgagacccaccctgtgcaccagcggcttcgacagagccaagcacctggagttcatgaccagcatccccgagagacccgcccagctgctgctgctgcaggacagcctgctgagactgaaggactacagacagtgcttcgagtgcagcgacgtggccctgaacgaggccgtgcagcagatggtgaacagcggcgaggccgccgccaaggaggagtgggtggccaccgtgacccagctgctgatgggcatcgagcaggccctgagcgccgacagcagcggcagcatcctgaaggtgagcagcagcaccaccggcctggtgagactgaccaacaacctgatccaggtgatcgactgcagcatggccgtgcaggaggaggccaaggagccccacgtgagcagcgtgctgccctggatcatcctgcacagaatcatctggcaggaggaggacaccttccacagcctgtgccaccagcagcagctgcagaaccccgccgaggagggcatgagcgagacccccatgctgcccagcagcctgatgctgctgaacaccgcccacgagtacctgggcagaagaagctggtgctgcaacagcgacggcgccctgctgagattctacgtgagagtgctgcagaaggagctggccgccagcaccagcgaggacacccacccctacaaggaggagctggagaccgccctggagcagtgcttctactgcctgtacagcttccccagcaagaagagcaaggccagatacctggaggagcacagcgcccagcaggtggacctgatctgggaggacgccctgttcatgttcgagtacttcaagcccaagaccctgcccgagttcgacagctacaagaccagcaccgtgagcgccgacctggccaacctgctgaagagaatcgccaccatcgtgcccagaaccgagagacccgccctgagcctggacaaggtgagcgcctacatcgagggcaccagcaccgaggtgccctgcctgcccgagggcgccgaccccagcccccccgtggtgaacgagctgtactacctgctggccgactaccacttcaagaacaaggagcagagcaaggccatcaagttctacatgcacgacatctgcatctgccccaacagattcgacagctgggccggcatggccctggccagagccagcagaatccaggacaagctgaacagcaacgagctgaagagcgacggccccatctggaagcacgccacccccgtgctgaactgcttcagaagagccctggagatcgacagcagcaacctgagcctgtggatcgagtacggcaccatgagctacgccctgcacagcttcgccagcagacagctgaagcagtggagaggcgagctgccccccgagctggtgcagcagatggagggcagaagagacagcatgctggagaccgccaagcactgcttcaccagcgccgccagatgcgagggcgacggcgacgaggaggagtggctgatccactacatgctgggcaaggtggccgagaagcagcagcagccccccaccgtgtacctgctgcactacagacaggccggccactacctgcacgaggaggccgccagataccccaagaagatccactaccacaacccccccgagctggccatggaggccctggaggtgtacttcagactgcacgccagcatcctgaagctgctgggcaagcccgacagcggcgtgggcgccgaggtgctggtgaacttcatgaaggaggccgccgagggccccttcgccagaggcgaggagaagaacacccccaaggccagcgagaaggagaaggcctgcctggtggacgaggacagccacagcagcgccggcaccctgcccggccccggcgccagcctgcccagcagcagcggccccggcctgaccagccccccctacaccgccacccccatcgaccacgactacgtgaagtgcaagaagccccaccagcaggccacccccgacgacagaagccaggacagcaccgccgtggccctgagcgacagcagcagcacccaggacttcttcaacgagcccaccagcctgctggagggcagcagaaagagctacaccgagaagagactgcccatcctgagcagccaggccggcgccaccggcaaggacctgcagggcgccaccgaggagagaggcaagaacgaggagagcctggagagcaccgagggcttcagagccgccgagcagggcgtgcagaagcccgccgccgagacccccgccagcgcctgcatccccggcaagcccagcgccagcacccccaccctgtgggacggcaagaagagaggcgacctgcccggcgagcccgtggccttcccccagggcctgcccgccggcgccgaggagcagagacagttcctgaccgagcagtgcatcgccagcttcagactgtgcctgagcagattcccccagcactacaagagcctgtacagactggccttcctgtacacctacagcaagacccacagaaacctgcagtgggccagagacgtgctgctgggcagcagcatcccctggcagcagctgcagcacatgcccgcccagggcctgttctgcgagagaaacaagaccaacttcttcaacggcatctggagaatccccgtggacgagatcgacagacccggcagcttcgcctggcacatgaacagaagcatcgtgctgctgctgaaggtgctggcccagctgagagaccacagcaccctgctgaaggtgagcagcatgctgcagagaacccccgaccagggcaagaagtacctgagagacgccgacagacaggtgctggcccagagagccttcatcctgaccgtgaaggtgctggaggacaccctgagcgagctggccgagggcagcgagagacccggccccaaggtgtgcggcctgcccggcgccagaatgaccaccgacgtgagccacaaggccagccccgaggacggccaggagggcctgccccagcccaagaagccccccctggccgacggcagcggccccggccccgagcccggcggcaaggtgggcctgctgaaccacagacccgtggccatggacgccggcgacagcgccgaccagagcggcgagagaaaggacaaggagagccccagagccggccccaccgagcccatggacaccagcgaggccaccgtgtgccacagcgacctggagagaaccccccccctgctgcccggcagacccgccagagacagaggccccgagagcagacccaccgagctgagcctggaggagctgagcatcagcgccagacagcagcccacccccctgacccccgcccagcccgcccccgcccccgcccccgccaccaccaccggcaccagagccggcggccaccccgaggagcccctgagcagactgagcagaaagagaaagctgctggaggacaccgagagcggcaagaccctgctgctggacgcctacagagtgtggcagcagggccagaagggcgtggcctacgacctgggcagagtggagagaatcatgagcgagacctacatgctgatcaagcaggtggacgaggaggccgccctggagcaggccgtgaagttctgccaggtgcacctgggcgccgccgcccagagacaggccagcggcgacacccccaccacccccaagcaccccaaggacagcagagagaacttcttccccgtgaccgtggtgcccaccgcccccgaccccgtgcccgccgacagcgtgcagagacccagcgacgcccacaccaagcccagacccgccctggccgccgccaccaccatcatcacctgcccccccagcgccagcgccagcaccctggaccagagcaaggaccccggcccccccagaccccacagacccgaggccacccccagcatggccagcctgggccccgagggcgaggagctggccagagtggccgagggcaccagcttccccccccaggagcccagacacagcccccaggtgaagatggcccccaccagcagccccgccgagccccactgctggcccgccgaggccgccctgggcaccggcgccgagcccacctgcagccaggagggcaagctgagacccgagcccagaagagacggcgaggcccaggaggccgccagcgagacccagcccctgagcagcccccccaccgccgccagcagcaaggcccccagcagcggcagcgcccagccccccgagggccaccccggcaagcccgagcccagcagagccaagagcagacccctgcccaacatgcccaagctggtgatccccagcgccgccaccaagttcccccccgagatcaccgtgaccccccccacccccaccctgctgagccccaagggcagcatcagcgaggagaccaagcagaagctgaagagcgccatcctgagcgcccagagcgccgccaacgtgagaaaggagagcctgtgccagcccgccctggaggtgctggagaccagcagccaggagagcagcctggagagcgagaccgacgaggacgacgactacatggacatctag

SEQ ID NO: 173795 - protein, 638 aa, Artificial Sequence
  derived and/or modified sequence
MSGDPDVLEYYKNDHSKKPLRIINLNFCEQVDAGLTFNKKELQDSFVFDIKTSERTFYLVAETEEDMNKWVQSICQICGFNQAEESTDSLRNVSSAGHGPRSSPAELSSSSQHLLRERKSSAPSHSSQPTLFTFEPPVSNHMQPTLSTSAPQEYLYLHQCISRRAENARSASFSQGTRASFLMRSDTAVQKLAQGNGHCVNGISGQVHGFYSLPKPSRHNTEFRDSTYDLPRSLASHGHTKGSLTGSETDNEDVYTFKTPSNTLCREFGDLLVDNMDVPATPLSAYQIPRTFTLDKNHNAMTVATPGDSAIAPPPRPPKPSQAETPRWGSPQQRPPISENSRSVAATIPRRNTLPAMDNSRLHRASSCETYEYPQRGGESAGRSAESMSDGVGSFLPGKMIVGRSDSTNSEDNYVPMNPGSSTLLAMERAGDNSQSVYIPMSPGAHHFDSLGYPSTTLPVHRGPSRGSEIQPPPVNRNLKPDRKAKPTPLDLRNNTVIDELPFKSPITKSWSRANHTFNSSSSQYCRPISTQSITSTDSGDSEENYVPMQNPVSASPVPSGTNSPAPKKSTGSVDYLALDFQPSSPSPHRKPSTSSVTSDEKVDYVQVDKEKTQALQNTMQEWTDVRQSSEPSKGAKL

SEQ ID NO: 173796 - protein, 131 aa, Artificial Sequence
  derived and/or modified sequence
MSGDPDVLEYYKNDHSKKPLRIINLNFCEQVDAGLTFNKKELQDSFVFDIKTSERTFYLVAETEEDMNKWVQSICQICGFNQAEESTDSLRNVSSAGHGPRSSPAELSSSSQHLLRERKSSAPSHSSQPTL

SEQ ID NO: 173797 - protein, 102 aa, Artificial Sequence
  derived and/or modified sequence
MSGDPDVLEYYKNDHSKKPLRIINLNFCEQVDAGLTFNKKELQDSFVFDIKTSERTFYLVAETEEDMNKWVQSICQICGFNQAEESTDSLRNVSSAGHGPRS

SEQ ID NO: 173798 - DNA, 396 bp, Artificial Sequence
  derived and/or modified sequence
atgagtggggaccctgatgtattagagtattataaaaacgaccacagcaagaaacctctccgcattataaatttaaacttctgcgaacaggtagacgcaggattaacttttaataaaaaggaactccaggactcctttgtgtttgacatcaagacgtccgagaggactttctatttagtggcagagacagaagaagatatgaataagtgggtccaaagtatatgtcagatttgcggatttaatcaggccgaggagagcaccgattccctgcgcaatgtgtcttccgccggccatggaccccgctctagtcccgctgagctctcatctagctcccagcacctccttagggagcggaaaagctccgcccctagccacagcagccagccaactctctag

SEQ ID NO: 173799 - DNA, 309 bp, Artificial Sequence
  derived and/or modified sequence
atgtccggcgatcccgatgtgctggagtattataagaacgatcactccaaaaagccccttcgtatcataaacctcaatttctgtgaacaggtcgacgccgggttgactttcaacaaaaaggaactacaggactcttttgtgttcgacatcaagacctccgagcgcactttttatctggtagctgagaccgaggaggatatgaacaagtgggtgcagtccatctgccagatttgcgggtttaaccaggcggaagaatcaaccgattcactccggaatgtgtcctccgctggacatggaccccgttcctag

SEQ ID NO: 173800 - DNA, 396 bp, Artificial Sequence
  derived and/or modified sequence
atgtctggggaccctgatgtgctggagtactacaagaatgaccacagcaagaagcccctgcgcatcatcaacctgaacttctgtgagcaggtggatgctggcctgaccttcaacaagaaggagctgcaggacagctttgtgtttgacatcaagaccagcgagaggaccttctacctggtggccgagacagaggaggacatgaacaagtgggtgcagagcatctgccagatctgtggcttcaaccaggccgaggagagcacagacagcctgagaaatgtgtcctctgctggccacggccccaggagcagccctgctgagctgagcagcagcagccagcacctgctgcgggagaggaagagcagcgcccccagccacagcagccagcccaccctgtag

SEQ ID NO: 173801 - DNA, 309 bp, Artificial Sequence
  derived and/or modified sequence
atgtctggggaccctgatgtgctggagtactacaagaatgaccacagcaagaagcccctgcgcatcatcaacctgaacttctgtgagcaggtggatgctggcctgaccttcaacaagaaggagctgcaggacagctttgtgtttgacatcaagaccagcgagaggaccttctacctggtggccgagacagaggaggacatgaacaagtgggtgcagagcatctgccagatctgtggcttcaaccaggccgaggagagcacagacagcctgagaaatgtgtcctctgctggccacggccccaggagctag

SEQ ID NO: 173802 - DNA, 396 bp, Artificial Sequence
  derived and/or modified sequence
atgagcggcgaccccgacgtgctggagtactacaagaacgaccactcaaagaagcccttgagaattatcaacctcaatttctgtgagcaggtggatgctggcctgacctttaataagaaggagcttcaggattcattcgtctttgacatcaagacatccgagaggacattctacctggtcgcagagaccgaggaagacatgaacaagtgggttcaatctatctgccagatatgtggatttaatcaggccgaagaatccacagacagcctaagaaatgttagcagtgctggtcatggaccgcgatcgtcccctgccgagctctcttccagctcccagcacctactcagagagagaaagtcctccgctcccagccattccagtcagccgaccctgtag

SEQ ID NO: 173803 - DNA, 309 bp, Artificial Sequence
  derived and/or modified sequence
atgagcggcgaccccgacgtgctggagtactacaagaacgaccactcaaaaaaacccctgcgtattatcaatctgaacttctgcgagcaagtggacgctggcttgactttcaataagaaagagctgcaggatagcttcgtctttgacatcaagacatctgagaggacattctacctagtagccgaaacagaggaagacatgaataagtgggttcagagtatctgtcagatttgcggctttaaccaagcagaggaatccaccgatagccttcgcaacgtgtcctcagcaggacatggcccgagatcatag

SEQ ID NO: 173804 - DNA, 396 bp, Artificial Sequence
  derived and/or modified sequence
atgagcggggaccccgatgtgctggagtactacaaaaatgaccactccaagaagcccctgcgcattatcaacctcaacttttgtgagcaagtcgatgccggtctgacgttcaataaaaaggagcttcaggatagcttcgtttttgatattaaaacttctgagcgcacattttacttggtagcagagaccgaggaggatatgaacaagtgggtccagtcaatttgtcaaatttgtggctttaaccaggccgaggagagcacggactccctacggaacgtctcgagtgctggccacggaccaagaagtagtcccgcagagcttagctcgtcttcccagcacctcttgagagaacggaaatcctccgccccttcccactcctcccagcctaccctttag

SEQ ID NO: 173805 - DNA, 309 bp, Artificial Sequence
  derived and/or modified sequence
atgtccggcgaccctgatgtcctagagtattacaagaatgatcatagcaagaaacctctacgcatcatcaacctaaacttctgcgagcaggtggatgccggactgacattcaataaaaaagaacttcaggactctttcgtcttcgacatcaagacctcagagcggaccttttacctcgtggcggaaacagaggaagacatgaacaagtgggtccagagtatctgtcagatctgtggctttaatcaggctgaagagtctactgacagcctcagaaatgtcagttcggccggtcatggcccacgtagttag

SEQ ID NO: 173806 - DNA, 396 bp, Artificial Sequence
  derived and/or modified sequence
atgagcggcgaccccgacgtgctggagtactacaagaacgaccacagcaagaagcccctgagaatcatcaacctgaacttctgcgagcaggtggacgccggcctgaccttcaacaagaaggagctgcaggacagcttcgtgttcgacatcaagaccagcgagagaaccttctacctggtggccgagaccgaggaggacatgaacaagtgggtgcagagcatctgccagatctgcggcttcaaccaggccgaggagagcaccgacagcctgagaaacgtgagcagcgccggccacggccccagaagcagccccgccgagctgagcagcagcagccagcacctgctgagagagagaaagagcagcgcccccagccacagcagccagcccaccctgtag

SEQ ID NO: 173807 - DNA, 309 bp, Artificial Sequence
  derived and/or modified sequence
atgagcggcgaccccgacgtgctggagtactacaagaacgaccacagcaagaagcccctgagaatcatcaacctgaacttctgcgagcaggtggacgccggcctgaccttcaacaagaaggagctgcaggacagcttcgtgttcgacatcaagaccagcgagagaaccttctacctggtggccgagaccgaggaggacatgaacaagtgggtgcagagcatctgccagatctgcggcttcaaccaggccgaggagagcaccgacagcctgagaaacgtgagcagcgccggccacggccccagaagctag

SEQ ID NO: 173808 - protein, 1119 aa, Artificial Sequence
  derived and/or modified sequence
MSTAAFHISSLLEKMTSSDKDFRFMATSDLMSELQKDSIQLDEDSERKVVKMLLRLLEDKNGEVQNLAVKWLGVPLGAFHASLLHCLLPQLSSPRLAVRKRAVGALGHLAAACSTDLFVELADHLLDRLPGPRVPTSPTAIRTLIQCLGSVGRQAGHRLGAHLDRLVPLVEDFCNLDDDELRESCLQAFEAFLRKCPKEMGPHVPNVTSLCLQYIKHDPNYNYDSDEDEEQMETEDSEFSEQESEDEYSDDDDMSWKVRRAAAKCIAALISSRPDLLPDFHCTLAPVLIRRFKEREENVKADVFTAYIVLLRQTQPPKGWLEAMEEPTQTGSNLHMLRGQVPLVVKALQRQLKDRSVRARQGCFSLLTELAGVLPGSLAEHMPVLVSGIIFSLADRSSSSTIRMDALAFLQGLLGTEPAEAFHPHLPILLPPVMACVADSFYKIAAEALVVLQELVRALWPLHRPRMLDPEPYVGEMSAVTLARLRATDLDQEVKERAISCMGHLVGHLGDRLGDDLEPTLLLLLDRLRNEITRLPAIKALTLVAVSPLQLDLQPILAEALHILASFLRKNQRALRLATLAALDALAQSQGLSLPPSAVQAVLAELPALVNESDMHVAQLAVDFLATVTQAQPASLVEVSGPVLSELLRLLRSPLLPAGVLAAAEGFLQALVGTRPPCVDYAKLISLLTAPVYEQAVDGGPGLHKQVFHSLARCVAALSAACPQEAASTASRLVCDARSPHSSTGVKVLAFLSLAEVGQVAGPGHQRELKAVLLEALGSPSEDVRAAASYALGRVGAGSLPDFLPFLLEQIEAEPRRQYLLLHSLREALGAAQPDSLKPYAEDIWALLFQRCEGAEEGTRGVVAECIGKLVLVNPSFLLPRLRKQLAAGRPHTRSTVITAVKFLISDQPHPIDPLLKSFIAVHNKPSLVRDLLDDILPLLYQETKIRRDLIREVEMGPFKHTVDDGLDVRKAAFECMYSLLESCLGQLDICEFLNHVEDGLKDHYDIRMLTFIMVARLATLCPAPVLQRVDRLIEPLRATCTAKVKAGSVKQEFEKQDELKRSAMRAVAALLTIPEVGKSPIMADFSSQIRSNPELAALFESIQKDSASAPSTDSMELS

SEQ ID NO: 173809 - DNA, 3360 bp, Artificial Sequence
  derived and/or modified sequence
atgtctacagctgcattccatataagtagcctgctggaaaagatgacatccagcgacaaagatttccgatttatggcaacaagcgacctaatgtctgagcttcagaaagacagtatacagcttgatgaggatagtgagcgtaaggtggttaagatgctcttgcgcctattggaggataagaatggggaggttcagaatttagctgtgaaatggttgggagtacctctcggagcatttcacgcaagtctccttcactgtctccttccccagctctccagcccaaggctggccgtccggaaaagggctgtgggcgcgcttgggcatctggccgcggcctgttccacggatctctttgtcgagctggccgatcatctcctcgaccgcctgcccgggccacgtgtccccacatctcccacggcgattcggacacttatccagtgtctggggtccgttggccggcaggccggacaccgcctaggagcacacctggatcggttggtgccccttgtggaggacttttgcaacctggacgacgacgaactccgggaatcatgcctccaggccttcgaggccttcctgagaaaatgtcctaaggagatgggcccgcacgttcccaacgttactagcctgtgcctacagtacatcaagcacgatccgaactacaactatgatagcgatgaggatgaggagcagatggagaccgaggactccgaattcagtgaacaggagtcagaggacgagtattccgacgacgatgatatgtcttggaaagtaagaagagctgctgcaaagtgcattgccgctctgatcagcagtcggcctgacctcttaccagatttccactgtacactggctcctgtcctcatccgccggttcaaggaacgggaagagaacgtgaaggctgatgtttttactgcatacattgttcttctgaggcagacccagccaccaaaaggctggctggaggccatggaggagccgacacagactggatcaaacctgcatatgttgcgcgggcaggtcccccttgtcgttaaggcattgcaacggcagctcaaagaccggagtgtacgggccaggcagggatgcttttcgctacttacagaattagccggtgttctgccaggcagtcttgccgaacacatgcccgtgctggtgagcggtatcatctttagtctcgccgatcgcagctcttcttccaccatcagaatggacgcccttgcgtttttgcaaggtttgctgggcacagaaccggcagaagcctttcacccacacctccctatccttttgccaccggttatggcgtgcgtggcagattctttctataagattgcagctgaggctctagtggtcttgcaggagctggtccgcgcactgtggcccctccatcggcctagaatgctggatcctgagccctacgtgggagagatgtctgccgtaacacttgcccgcctccgtgctactgatttggaccaggaggtgaaggagcgtgccataagctgtatgggtcacctcgttggacacctgggggaccgcctgggcgacgacttagaacctacactcctgcttctgttagaccggctcaggaatgagatcacccgccttcctgccataaaggccttgacactagtcgcagtatctccgctgcagctggacttacagcctatactggccgaagcccttcacattttagcctctttcctgcggaaaaatcaacgtgcattgagattggcaaccctggctgcactcgacgccctcgcacagtcccagggcctgtcattgcccccatccgccgtgcaggccgtgcttgcagaactgcctgctctggtgaatgagagtgacatgcatgttgcccagctggctgtagatttcctcgctacagtgacccaagcacaaccagcctctctcgtggaagtgtcaggacctgtcctcagcgagctgcttaggttgttacgttctcccttactccctgctggagtccttgcagctgctgaaggctttctgcaggccctggtcggcactagaccaccctgcgtggattatgcaaagttaatcagtcttcttactgcccccgtgtacgagcaagctgtggacggagggcccggattgcataagcaagttttccacagcttggcgaggtgtgtggccgcgttgtccgctgcctgcccccaggaggccgcctctacagcttctaggcttgtgtgtgacgcccggagcccccattctagcaccggggttaaagttctggcatttctttcactcgccgaagtcggacaggtggctggccccgggcaccagcgggaactgaaggctgtgctactagaagcacttggctccccttccgaggacgtcagagccgctgcatcttacgccctgggtagggtgggggctggcagtttgcccgatttcctgccctttctcctcgaacagatagaggccgagccaaggagacaatacctattattacacagcctacgggaggctctgggtgcagcacagcccgacagcctgaagccttatgctgaagacatatgggctttgttatttcagcgctgcgaaggcgccgaggaggggaccagaggcgtggtcgcagagtgcatcgggaagctcgtgttagtgaatccctccttcctgttgcccaggctgagaaagcagctcgctgccggacggccccacacaaggtccacagtcataacggccgtgaaatttcttattagcgatcagccccacccaatagaccccttgctcaaatcttttatcgccgtccataacaagccaagtcttgttagggacctcctggacgacatcctccccctgctgtaccaggaaaccaagatcagacgggacctgatcagggaggtcgagatgggaccctttaagcacacagtcgatgacggcttggacgtgcgaaaggcagcgtttgaatgtatgtactcactcttagagagctgcctggggcagctcgacatttgtgaatttctgaatcacgtcgaggacgggcttaaggatcactatgatatccgcatgctaaccttcatcatggtggcaagacttgctacactgtgtcctgcccccgttttgcagagagtggaccgacttatagaaccactgcgcgcaacatgcacggcaaaagtcaaagccggatctgtgaagcaggagttcgaaaaacaggatgagttaaagcgctctgcgatgcgggctgtagcagcacttttgacaatccctgaagttgggaaatcgcccatcatggctgattttagttcacagattcgaagcaacccagagctggctgcgctttttgagtcaattcaaaaggactctgcgtcagctcctagtaccgatagtatggaactcagttag

SEQ ID NO: 173810 - DNA, 3360 bp, Artificial Sequence
  derived and/or modified sequence
atgagcacagctgccttccacatcagcagcctgctggagaagatgaccagcagtgacaaggacttccgcttcatggccaccagtgacctgatgtctgagctgcagaaggacagcatccagctggatgaagattctgagaggaaggtggtgaagatgctgctgcggctgctggaggacaagaatggagaggtgcagaacctggccgtgaagtggctgggcgtgcccctgggcgccttccacgccagcctgctgcactgcctgctgccccagctgagcagcccccggctggccgtgaggaagagagctgtgggcgccctgggccacctggccgccgcctgcagcacagacctgtttgtggagctggccgaccacctgctggaccggctgcccggcccccgggtgcccaccagccccacagccatccgcaccctcatccagtgcctgggctctgtgggccggcaggccggccaccggctgggcgcccacctggaccggctggtgcccctggtggaggacttctgcaacctggatgatgatgagctgcgggagagctgcctgcaggcctttgaggccttcctgaggaaatgtcccaaggagatgggcccccacgtgcccaacgtgaccagcctgtgcctgcagtacatcaagcatgaccccaactacaactatgacagtgatgaagatgaggagcagatggagacagaagattctgagttcagcgagcaggagagtgaagatgagtacagtgatgatgatgacatgtcctggaaggtgagaagagctgctgccaagtgcatcgccgccctgatcagcagcaggccagacctgctgcctgacttccactgcaccctggcccctgtgctgatccgccgcttcaaggagcgggaggagaatgtgaaggcagatgtgttcaccgcctacatcgtgctgctgcggcagacccagccccccaagggctggctggaggccatggaggagcccacccagacaggcagcaacctgcacatgctgcggggccaggtgcccctggtggtgaaggccctgcagaggcagctgaaggacagatctgtgcgggcccggcagggctgcttcagcctgctgacagagctggccggcgtgctgcccggcagcctggccgagcacatgcctgtgctggtgtctggcatcatcttcagcctggccgacaggagcagcagcagcaccatccgcatggatgccctggccttcctgcagggcctgctgggcacagagcctgctgaggccttccacccccacctgcccatcctgctgccccctgtgatggcctgtgtggccgacagcttctacaagattgctgctgaggccctggtggtgctgcaggagctggtgcgggccctgtggcccctgcaccggcccaggatgctggaccctgagccctacgtgggggagatgtctgctgtgaccctggcccggctgcgggccacagacctggaccaggaggtgaaggagcgggccatcagctgcatgggccacctggtgggccacctgggggaccggctgggagatgacctggagcccaccctgctgctgctgctggaccggctgagaaatgagatcacccggctgcctgccatcaaggccctgaccctggtggccgtgagccccctgcagctggacctgcagcccatcctggccgaggccctgcacatcctggccagcttcctgaggaagaaccagagggccctgcggctggccaccctggccgccctggatgccctggcccagagccagggcctgagcctgcccccatctgctgtgcaggccgtgctggccgagctgcctgccctggtgaatgaaagtgacatgcacgtggcccagctggccgtggacttcctggccaccgtgacccaggcccagcctgccagcctggtggaggtgtctggccctgtgctgtctgagctgctgcggctgctgcggagccccctgctgcctgctggggtgctggccgctgctgagggcttcctgcaggccctggtgggcacccggcccccctgtgtggactatgccaagctgatcagcctgctgacagcccctgtgtatgagcaggccgtggatggcggccctggcctgcacaagcaggtgttccacagcctggcccgctgtgtggccgccctgtctgctgcctgcccccaggaggccgccagcacagccagccggctggtgtgtgatgcccggagcccccacagcagcactggagtgaaggtgctggccttcctgagcctggccgaggtgggccaggtggccggccctggccaccagcgggagctgaaggctgtgctgctggaggccctgggcagccccagtgaagatgtgcgggctgctgccagctatgccctgggccgggtgggcgccggcagcctgcctgacttcctgcccttcctgctggagcagattgaagctgagccccggcggcagtacctgctgctgcacagcctgcgggaggccctgggcgccgcccagcctgacagcctgaagccctatgcagaggacatctgggccctgctcttccagagatgtgagggcgctgaggagggcacccggggcgtggtggctgaatgtattggcaagctggtgctggtgaaccccagcttcctgctgccccggctgaggaagcagctggccgccggccggccccacaccaggagcaccgtcatcacagctgtgaagttcctgatcagtgaccagccccaccccatcgaccccctgctgaagagcttcatcgctgtgcacaacaagcccagcctggtgcgggacctgctggatgacatcctgcccctgctgtaccaggagaccaagatcagaagagacctgatccgggaggtggagatgggccccttcaagcacacagtggatgatggcctggatgtgaggaaggccgcctttgagtgcatgtacagcctgctggagagctgcctgggccagctggacatctgtgagttcctgaaccacgtggaggatggcctgaaggaccactatgacatccgcatgctgaccttcatcatggtggcccggctggccaccctgtgcccagcccctgtgctgcagagggtggacaggctcatcgagcccctgcgggccacctgcacagccaaggtgaaggccggctctgtgaagcaggagtttgagaagcaggatgagctgaagaggtctgccatgagagctgtggccgccctgctgaccatccctgaggtgggcaagagccccatcatggctgacttcagcagccagatccgcagcaaccctgagctggccgccctgtttgagagcatccagaaggacagcgccagcgcccccagcacagacagcatggagctgtcctag

SEQ ID NO: 173811 - DNA, 3360 bp, Artificial Sequence
  derived and/or modified sequence
atgagcaccgccgccttccacatcagcagcctgctggagaagatgacaagctcggataaggactttcggttcatggctacctcagacctgatgtctgaattacagaaagacagcattcagttggatgaagactccgaacgtaaggtggtgaaaatgctgctcagattgctggaagacaagaatggcgaggtccagaacctggccgtgaaatggctgggggtgccgttgggtgcctttcatgcttcactgttgcattgcctgctgccacagcttagcagcccccgtcttgccgtcagaaagagggccgtgggagccttaggtcacctcgctgccgcctgcagcacagacctctttgtcgagttggcggaccacctgctggatcgcctgcctggccctcgcgtgcctacgtccccgacagccattaggaccttgatccaatgcttaggcagtgtcggtcggcaggcagggcatcgcctgggcgcacatcttgataggttagtgcctcttgtagaagatttttgcaacctggacgacgacgagctgcgcgagtcttgtctccaggcctttgaggcgtttctccgaaaatgtccgaaggaaatggggccccacgtgcctaatgttacatccttatgcctccagtatatcaagcacgatcccaattataattacgacagcgacgaggatgaagagcagatggagacagaggacagcgagttcagcgaacaggagagtgaggatgagtactctgatgacgacgatatgagctggaaggtccgccgggctgcagctaaatgcatagcagcccttatatcttctcgacccgaccttctgcccgattttcactgcacattggctcctgtgctaattaggaggttcaaggaacgcgaagagaatgtgaaagctgacgtctttactgcctacatcgtgctgctgcggcaaacacaacctccgaaggggtggcttgaagctatggaggagccgactcaaacaggaagcaatcttcatatgcttagagggcaggtcccactggtcgtcaaggctctgcaaagacaactaaaggatcgaagcgtgagggccagacaggggtgcttttcactcctcacagagctggcgggcgtcctccctggctcgctcgccgaacatatgcccgtgctggttagcggcattattttttcccttgcagatagatctagctcctcaacgatacggatggatgcacttgccttcctgcagggactgctgggcaccgagccagctgaagcgtttcacccgcacctgcccattctgcttccgcctgtcatggcctgtgtcgcagactcattttataagattgctgcagaagccctggttgtgctccaggagttggtccgggcgctgtggcccctgcacaggcctcggatgctggaccctgaaccctacgttggggagatgtcggctgttaccctggcccggctaagggcaacagatctagaccaggaggtgaaagaaagggccatttcttgtatgggacatctcgtggggcacctcggtgatcgcctcggggacgatctcgagccaaccttgttgctgcttttggatcgcctgcggaacgagatcacacggctcccagccataaaggccctgacccttgtggcagtttcccccctccagctagatctgcagccgatattggccgaggccctgcacatcctggcctccttcttgcggaaaaatcagcgtgccctccgactggcaacccttgctgcactagatgcgctggctcagtcgcagggtctaagtttgcctccaagcgcagtgcaagctgtgctggccgagctgccggctcttgtgaacgagtctgatatgcatgtagcgcagctggccgtcgattttctcgcaactgtgacacaggcccagccagcttcactagtggaagtgtctggcccggtgctgtctgagcttttacggctcctacgctctccactgctccctgcaggcgtgctggccgccgctgagggtttcctgcaggcattagttggtactaggcccccatgtgtcgattatgccaaattaatatccttactcacagcccctgtctacgagcaggcagtggacggcgggcctggcctccacaagcaagtattccattccctggcccggtgtgtcgccgctctgagtgctgcctgccctcaggaagctgcctccactgcctcccggctggtttgcgacgctcgtagtccccattcctctacaggtgtgaaagtgttggcttttctctctttagccgaggtgggtcaggtcgccggccccgggcatcagagggagctcaaggcggtattgctcgaggcgctggggtctcccagtgaagacgttcgtgcagccgcctcctacgcccttggcagagtgggcgcaggtagcctgcccgacttcctgcccttcctgctggagcagatcgaagcagaaccgcgcagacagtacctcttattgcactccttaagggaggccttaggcgctgcccaacctgactcactgaaaccatatgccgaggacatttgggccttgctttttcagagatgcgaaggcgcggaggaaggaaccaggggcgtcgtggcagaatgcattggaaagctagtgctggtcaacccatcctttctgttgcctcgcctgagaaagcagctcgccgccggcagaccccacacgaggtcaaccgtgatcacagctgtcaagtttctgatcagcgatcagccacaccccatcgatccccttctgaagagtttcatcgcagtccacaacaaaccgtcccttgtgcgagatttgctggatgacattttaccccttctgtaccaggaaacaaaaatccggcgggatctgatccgggaggtggaaatggggcctttcaaacatactgtggatgatggccttgacgtccgtaaagcggcattcgagtgcatgtatagcctgctggagtcctgcctggggcagcttgatatttgcgagttcttgaatcatgtggaagatgggctgaaggaccactacgacatcaggatgctcaccttcataatggttgcccggttggcaacactgtgccctgctcccgtcctacagcgagtggaccgtctcatagagcctctgcgcgcgacatgtacggccaaggtcaaagctggcagcgtgaaacaggaattcgagaagcaggacgaactcaagcggtccgctatgcgtgccgtggcggccctgcttacaataccagaggttggaaagtccccaatcatggcagatttctcctctcaaatcagatcaaatcctgaactggctgccctgttcgagagtatccaaaaggacagcgcgagtgcaccctccactgactccatggaattatcctag

SEQ ID NO: 173812 - DNA, 3360 bp, Artificial Sequence
  derived and/or modified sequence
atgtctacagcggctttccacattagcagcctcctcgaaaagatgactagttccgataaggattttagattcatggctacaagcgaccttatgtctgagctgcaaaaagactctatacagctggatgaggacagcgaaagaaaagtcgtgaaaatgctacttaggctcctggaggacaaaaatggcgaggtacagaacctggccgttaagtggctcggggtgcccctgggagcttttcacgccagcctcctgcactgcctcttgccccagttgtcaagcccccgacttgccgtgcggaaacgagcagtgggagccttagggcacttagctgccgcatgcagtacagacttattcgtcgagttggcagaccatctgctggatcgtcttccaggacctagagttcctacaagcccgactgccattcggaccctgatacagtgcctgggctcagtgggtcgccaagctggccaccgccttggcgctcatctggaccgattggtccctctagtggaggacttttgtaatttggatgatgatgaactgagagagagctgtcttcaggcttttgaggccttcctgaggaaatgccccaaggagatggggccacacgtacccaatgtaacctcgctgtgccttcaatatatcaaacatgatcccaactacaattacgattctgacgaggatgaagagcagatggagacagaagattctgagttttcggagcaggagtccgaggatgagtacagtgacgacgatgacatgtcttggaaggtcagaagagctgcagcaaaatgtatagccgcacttatctccagtcgtccagacctattgcctgactttcactgcactctggccccagtgctgattcggcgattcaaggaacgcgaggagaatgtaaaggccgacgtctttaccgcttatatagtgctgttaaggcagacacagcccccaaagggctggctcgaagctatggaagagccaacccaaacgggatctaatcttcacatgcttagaggacaagtgcctctggttgtgaaagccctccagagacaactaaaggaccgctctgtacgagctaggcaaggatgcttcagcctgctgaccgagttggccggagttttgcctgggtccctggcagagcatatgcctgtcctggtgtcggggatcattttttctctggctgatcgttcttcttcctcaacaatccgcatggacgctctagccttccttcagggactgctgggcacagagcccgctgaggccttccatcctcacctccccatcctactccctcccgttatggcatgcgtggcagatagtttctacaagattgctgccgaggccctcgttgtcctgcaggagttggtccgggctctgtggcctctccacaggcccagaatgcttgacccagaaccctacgttggagagatgagcgctgtgacactggcaaggctccgggctacagacctcgaccaggaggtgaaggagcgggcaatcagctgcatggggcacctcgtggggcatttaggggaccgcctgggcgacgatttggaaccaacgctccttcttttgcttgacaggcttcgtaacgaaataacacgcctcccggctatcaaggctctgacactggtggctgtgtctcccctgcaacttgacctgcagcctattcttgcggaggcactccacatactcgcatcatttctcagaaaaaatcagcgcgctctgagattggccaccttggctgcgttagacgccctggcacaaagtcagggtctatccctccccccaagcgccgtccaagcagtgctcgctgagcttcctgctttagtaaacgagagtgacatgcacgtggctcagctcgcggtggatttcctcgctacagtgacacaggcccagccagcaagcctcgtcgaagtgtcgggcccagtcctttccgagcttctccgcttactgcgttcacctctcctgccggctggtgtgctagccgctgctgaaggatttcttcaagctctcgtaggaacccgaccaccgtgcgtagactacgcaaaactgatctctttactgaccgctcctgtctatgagcaggccgtggacggcggacctgggcttcacaagcaggtgttccacagcctggctcggtgcgtcgccgcactctcagcggcatgtccacaggaggcggcttcgacagcctctaggctggtgtgtgatgctaggtccccacactccagcaccggagtcaaggtgctggcctttcttagcttggctgaagtaggacaggtggctggacccggtcatcaacgcgaattgaaggcagttctgctcgaagccctgggaagcccgagcgaggacgtgcgcgctgctgcgtcatacgctctgggaagagttggggcaggttcccttcctgactttcttccttttttgctcgaacagattgaggctgagccccgtagacagtatctgttgttgcatagcctgcgtgaggctcttggcgcagcacagcctgatagcctgaagccatacgctgaagacatttgggcacttctcttccagcgctgtgaaggagctgaagaaggtaccaggggagtggtggccgagtgtataggcaaattagttctggtcaacccaagtttcctgctgcctaggttgcgtaaacagttggccgcagggaggcctcacactcgatcaacagtgatcacagcagtgaaatttctcatttccgaccagccacatcccatcgacccgctcctaaagtctttcattgctgtgcataacaagccatcactggtgcgcgatttgcttgatgacattcttccgctgttatatcaagagacaaagattcgaagggatctcataagggaggtggagatggggccttttaaacacacagttgacgatgggttggatgtgcggaaggccgcattcgaatgtatgtactcgcttttggaatcatgtctgggacagttagacatctgcgagtttttaaaccacgttgaggacggtttgaaggatcattacgatatccgcatgctgacattcataatggttgcgcgtttggcaacactttgccctgcccctgtgcttcaaagggtggaccgcctgatcgaacccctgcgcgcaacatgcactgcaaaggtgaaggcaggtagcgttaagcaggagttcgagaagcaagacgagctcaagcgatcagcaatgcgagcagtggctgccctgttaactatcccggaggtaggaaagtcaccaattatggccgacttcagctcccagattcgtagtaatccagagctggcggcattgtttgaatcaattcagaaagactccgccagcgccccatccacagactctatggaactctcatag

SEQ ID NO: 173813 - DNA, 4429 bp, Artificial Sequence
  derived and/or modified sequence
gtctctgggggtgtgtgcaatccggcgctgcgctgtcagcagggcaagggctggggccggggccaagaccaccaagccaggcccaggcccgcccgcctcccgcggccgccacggccaaggcgtgagcacggggcggggcgggagctgctatttctgtctggtgagcgcagcccgcgcagctggcgagggagggggcgcccgcgccgccatattccctcccgccggccggctccgcggcgcgcagccaccatgagcaccgccgccttccacatctccagcctcctggagaagatgacgtccagcgacaaggacttcaggttcatggccaccagcgacctgatgtcggagttgcagaaggactccatccagctggacgaggacagcgagcgcaaggtggtgaagatgctgctccggctcctggaggacaagaacggtgaggtgcagaacctggctgtcaagtggctgggtgtcccgctgggcgccttccacgccagcctcctgcactgtctgctgccacagctgagcagcccgcgcctggcggtgcgcaagcgggcggtcggagcgcttggccacctggcggccgcctgcagcaccgacctcttcgtcgagctcgctgaccacctactggaccggctgcccggcccgcgggtgcccaccagcccgactgccatccgcaccctgatccaatgtttgggcagcgtcggccgccaggccggccaccgcctcggggctcacctggaccgcctggtgcccctggtggaggatttctgcaacctggatgatgatgagctccgggagtcctgcctccaggcttttgaggccttcttgaggaagtgccccaaggaaatgggtcctcacgtgcccaacgtgaccagcctctgcctccaatacataaaacacgaccccaactacaactacgacagtgatgaggatgaggagcagatggagacagaggatagtgaattcagtgagcaagagagtgaagacgagtacagcgatgacgatgacatgagctggaaggtgcgccgggcagctgccaagtgcatcgcagccttgatcagctcgcggcctgacctgctgcccgatttccactgcaccctggcacctgtgctcatccgccgcttcaaagaacgcgaggagaacgtcaaggctgacgtcttcactgcttacatcgtgctgctgcggcaaacacagcccccgaagggatggctggaggccatggaggaacccacccagaccggcagcaacctccatatgctacgtggacaggtgccccttgtggtcaaggccctgcagcggcagcttaaagatcggagcgtcagagcccgccagggatgcttcagcctcctcaccgagctggcgggtgtcctcccaggcagcctggccgagcatatgcctgtgctggtatcaggcatcatcttctcgctggccgaccgctccagctcctccaccatccggatggatgccctggccttcttgcaggggctgctgggcaccgaaccagctgaggccttccacccacacttgcctatcctcctgccacctgtgatggcctgtgtggctgactctttctacaagattgcagccgaggccctggtggtgctgcaggagctggtgcgggccctgtggccgctgcacaggcctcggatgctggatcctgagccatatgttggagagatgtctgctgtcaccctggcgcgacttcgtgccactgacctggaccaggaggtgaaggagcgggccatttcctgcatgggccaccttgtaggccacctgggtgaccggcttggggatgacctggagcccacgttactgctcctcctggaccgcctgcggaatgagatcacccggctgcccgccatcaaggcgcttacgctggtggccgtatccccactacagcttgacctacagcccatcctggccgaggcactgcacattctggcctcattcctgcggaagaaccagcgggctttgcgactggccacactggcagccctggacgccctggcccagagccagggcctcagcctcccaccgtctgccgtgcaggccgtgctggctgagctgcctgccctggtcaacgagagcgacatgcatgtggcccagctggctgtggacttccttgccacagtgacccaggcccagccagcctctttggtggaggtcagtggccctgtgctctcagagctgctgcggctgctgcgttcgcccctgttgccagccggggttctggcagctgctgaaggcttcctgcaggccctggtagggacccgtcccccgtgtgtggactatgccaaactcatcagcctgctcactgcgcctgtttatgagcaggctgtggatggtgggcctggcctgcacaagcaggtgttccactcattggcccggtgtgtggcagccctctcagctgcctgtccccaagaggcggcaagcacagccagtcgcctggtctgcgatgccaggtcgccccactccagcacgggggtcaaggtcctggcattcttgtcgctggctgaggtgggtcaggtggctgggccaggccaccagcgggagctgaaggcggtgctcctggaagctttggggtcacccagtgaggatgtgagggctgcagcctcgtatgcactgggccgtgtgggtgctggcagcctgcccgacttcctgcccttcctgctggagcagatcgaggctgagccccgacgacagtacctgctgctgcactcactcagggaggccctgggggccgcccagcctgacagcctgaagccctacgccgaggacatctgggccttgctgttccagcgctgcgagggtgctgaggagggcacccggggggtggtggccgagtgcattgggaagctggtccttgtgaacccttcgttccttctgccccgcttgcggaagcagcttgctgcaggtcggccacacacccggagcaccgtcatcacagcggtcaagttccttatctcggaccagccccatcccattgaccccctcctgaagagcttcatcgctgtgcacaacaagccctcgctagtccgggacctgctggatgacatcctgcccctcctctaccaggagacaaagatccggcgggacctcatccgagaggtggagatggggccctttaaacatacagtggacgatgggctggacgtgcggaaggcggcctttgaatgcatgtattcactgcttgagagctgcctgggccagctggatatctgtgagttcctgaaccatgtggaggacgggctgaaggaccactacgacatccggatgctgaccttcatcatggttgcccggctggccaccctgtgtcctgcacctgtcctgcagagggtggaccgactcattgagccactaagggccacctgcactgccaaggtcaaagctggttctgtgaagcaggagtttgaaaagcaagatgaactgaagcgctctgcaatgagggcagtggctgccctgctgaccatccccgaggtggggaaaagccccatcatggccgacttctcttcccaaatcagatccaaccctgaacttgctgccctctttgaaagcatccagaaggattccgcttcagcccccagcacagactcaatggagctcagctagtcccctcagcaccaaggtgggccctcgcttaagagaaaggagcccacccaagtccgaggcctccccatcccaccatcgcaggtctctacttttgcccttccaccatctcactgggggccctgtcgctcctggtcagggcttacagtgccttctccagggacccaactcaaaggcccccagcccaagctgtgaggctgccaacagttgggccccttccttaactcaggacagtcatccaaagaaatagggtgaggaagttttccagtgacttcacactgtacccctccatagtctgtctggttccttcagagggtgtctctgcctcacaaactagtagtatttagaaataggctgtgctgtcagctgtaaaagatcaggaggcagcagacaccactctggtttcttcactgcattcagcaatgcctgaagttagtgctcaggccgggcatctcaaaagaaaagatacttgagttattcacattttaaaattcaaaacggttcatttttaagtggcagtgatgaatcagaaatttggaagatgatacgggtttcttttttccagggaggaggaatgggttgggtagggaactggacaggcttggacctcatgtttcatttctaatttcaaaatacttattagcaaattgggcaacaatgggcatcttccatgccaccacccaggcataaccagttggtttgtttccttctgaggaaggtttcaaatgtgtctagtgttcagtattgaggacaaagaaatacaagtggcaggcccaagtattttctgtgatatcccaggttaataaagattagattctaagtt

SEQ ID NO: 173814 - DNA, 3360 bp, Artificial Sequence
  derived and/or modified sequence
atgagcaccgccgccttccacatcagcagcctgctggagaagatgaccagcagcgacaaggacttcagattcatggccaccagcgacctgatgagcgagctgcagaaggacagcatccagctggacgaggacagcgagagaaaggtggtgaagatgctgctgagactgctggaggacaagaacggcgaggtgcagaacctggccgtgaagtggctgggcgtgcccctgggcgccttccacgccagcctgctgcactgcctgctgccccagctgagcagccccagactggccgtgagaaagagagccgtgggcgccctgggccacctggccgccgcctgcagcaccgacctgttcgtggagctggccgaccacctgctggacagactgcccggccccagagtgcccaccagccccaccgccatcagaaccctgatccagtgcctgggcagcgtgggcagacaggccggccacagactgggcgcccacctggacagactggtgcccctggtggaggacttctgcaacctggacgacgacgagctgagagagagctgcctgcaggccttcgaggccttcctgagaaagtgccccaaggagatgggcccccacgtgcccaacgtgaccagcctgtgcctgcagtacatcaagcacgaccccaactacaactacgacagcgacgaggacgaggagcagatggagaccgaggacagcgagttcagcgagcaggagagcgaggacgagtacagcgacgacgacgacatgagctggaaggtgagaagagccgccgccaagtgcatcgccgccctgatcagcagcagacccgacctgctgcccgacttccactgcaccctggcccccgtgctgatcagaagattcaaggagagagaggagaacgtgaaggccgacgtgttcaccgcctacatcgtgctgctgagacagacccagccccccaagggctggctggaggccatggaggagcccacccagaccggcagcaacctgcacatgctgagaggccaggtgcccctggtggtgaaggccctgcagagacagctgaaggacagaagcgtgagagccagacagggctgcttcagcctgctgaccgagctggccggcgtgctgcccggcagcctggccgagcacatgcccgtgctggtgagcggcatcatcttcagcctggccgacagaagcagcagcagcaccatcagaatggacgccctggccttcctgcagggcctgctgggcaccgagcccgccgaggccttccacccccacctgcccatcctgctgccccccgtgatggcctgcgtggccgacagcttctacaagatcgccgccgaggccctggtggtgctgcaggagctggtgagagccctgtggcccctgcacagacccagaatgctggaccccgagccctacgtgggcgagatgagcgccgtgaccctggccagactgagagccaccgacctggaccaggaggtgaaggagagagccatcagctgcatgggccacctggtgggccacctgggcgacagactgggcgacgacctggagcccaccctgctgctgctgctggacagactgagaaacgagatcaccagactgcccgccatcaaggccctgaccctggtggccgtgagccccctgcagctggacctgcagcccatcctggccgaggccctgcacatcctggccagcttcctgagaaagaaccagagagccctgagactggccaccctggccgccctggacgccctggcccagagccagggcctgagcctgccccccagcgccgtgcaggccgtgctggccgagctgcccgccctggtgaacgagagcgacatgcacgtggcccagctggccgtggacttcctggccaccgtgacccaggcccagcccgccagcctggtggaggtgagcggccccgtgctgagcgagctgctgagactgctgagaagccccctgctgcccgccggcgtgctggccgccgccgagggcttcctgcaggccctggtgggcaccagacccccctgcgtggactacgccaagctgatcagcctgctgaccgcccccgtgtacgagcaggccgtggacggcggccccggcctgcacaagcaggtgttccacagcctggccagatgcgtggccgccctgagcgccgcctgcccccaggaggccgccagcaccgccagcagactggtgtgcgacgccagaagcccccacagcagcaccggcgtgaaggtgctggccttcctgagcctggccgaggtgggccaggtggccggccccggccaccagagagagctgaaggccgtgctgctggaggccctgggcagccccagcgaggacgtgagagccgccgccagctacgccctgggcagagtgggcgccggcagcctgcccgacttcctgcccttcctgctggagcagatcgaggccgagcccagaagacagtacctgctgctgcacagcctgagagaggccctgggcgccgcccagcccgacagcctgaagccctacgccgaggacatctgggccctgctgttccagagatgcgagggcgccgaggagggcaccagaggcgtggtggccgagtgcatcggcaagctggtgctggtgaaccccagcttcctgctgcccagactgagaaagcagctggccgccggcagaccccacaccagaagcaccgtgatcaccgccgtgaagttcctgatcagcgaccagccccaccccatcgaccccctgctgaagagcttcatcgccgtgcacaacaagcccagcctggtgagagacctgctggacgacatcctgcccctgctgtaccaggagaccaagatcagaagagacctgatcagagaggtggagatgggccccttcaagcacaccgtggacgacggcctggacgtgagaaaggccgccttcgagtgcatgtacagcctgctggagagctgcctgggccagctggacatctgcgagttcctgaaccacgtggaggacggcctgaaggaccactacgacatcagaatgctgaccttcatcatggtggccagactggccaccctgtgccccgcccccgtgctgcagagagtggacagactgatcgagcccctgagagccacctgcaccgccaaggtgaaggccggcagcgtgaagcaggagttcgagaagcaggacgagctgaagagaagcgccatgagagccgtggccgccctgctgaccatccccgaggtgggcaagagccccatcatggccgacttcagcagccagatcagaagcaaccccgagctggccgccctgttcgagagcatccagaaggacagcgccagcgcccccagcaccgacagcatggagctgagctag

SEQ ID NO: 173815 - protein, 542 aa, Artificial Sequence
  derived and/or modified sequence
MEPDSVIEDKTIELMCSVPRSLWLGCANLVESMCALSCLQSMPSVRCLQISNGTSSVIVSRKRPSEGNYQKEKDLCIKYFDQWSESDQVEFVEHLISRMCHYQHGHINSYLKPMLQRDFITALPEQGLDHIAENILSYLDARSLCAAELVCKEWQRVISEGMLWKKLIERMVRTDPLWKGLSERRGWDQYLFKNRPTDGPPNSFYRSLYPKIIQDIETIESNWRCGRHNLQRIQCRSENSKGVYCLQYDDEKIISGLRDNSIKIWDKTSLECLKVLTGHTGSVLCLQYDERVIVTGSSDSTVRVWDVNTGEVLNTLIHHNEAVLHLRFSNGLMVTCSKDRSIAVWDMASATDITLRRVLVGHRAAVNVVDFDDKYIVSASGDRTIKVWSTSTCEFVRTLNGHKRGIACLQYRDRLVVSGSSDNTIRLWDIECGACLRVLEGHEELVRCIRFDNKRIVSGAYDGKIKVWDLQAALDPRAPASTLCLRTLVEHSGRVFRLQFDEFQIISSSHDDTILIWDFLNVPPSAQNETRSPSRTYTYISR

SEQ ID NO: 173816 - DNA, 4342 bp, Artificial Sequence
  derived and/or modified sequence
ctgccggcggcccgggcgggctggcagctagagtgggtgcgatagccgcctccgcctctgccgcctccgccgtcgcctcctccgcccgggccgttcgctgctgcgcggggagagcgaggcggggccgccggggccgccatggagcccgactcggtgattgaggacaagaccatcgagctcatgtgttctgtgccaaggtctttgtggctaggctgcgccaacctggtagagagcatgtgcgcactgagttgcctgcagagcatgcccagtgtcagatgtctccagataagtaatggaacatcatctgtgatcgtctccagaaagaggccatcagaaggaaactatcaaaaagaaaaagacttgtgtattaaatattttgaccagtggtctgaatcagatcaagtggaatttgtggaacatcttatttcacgaatgtgtcattatcagcatggacatattaactcttacctgaagcccatgttgcagcgggactttattaccgctttaccagagcaaggcttagatcacatagcagaaaacattctttcgtacctggatgccaggtctctgtgtgcagcagagctggtatgtaaagaatggcagcgagtgatctcagaaggaatgctttggaagaagctgattgaacgaatggtacgcactgatcccctatggaaaggactttcagaaagaagagggtgggatcagtacctgtttaaaaacagacccacagatggccctccaaattcattttataggtcattatacccaaagattatccaggatatagagactatagaatctaactggcggtgtggacgacacaacttgcagaggattcagtgccgctctgaaaatagtaaaggtgtctactgtttacagtacgatgatgaaaaaattatcagtggcctacgagataattctattaagatatgggataaaaccagcctggaatgtttgaaagtgttaacaggacacacaggctctgtcctctgtctgcagtatgatgagcgtgtcattgtaactggctcttcagattctacggtgagagtgtgggatgtgaacacgggtgaagttcttaacacattgatccaccacaatgaggctgtattgcacttacgcttcagcaatggactgatggtgacctgttccaaggaccgctccattgctgtgtgggacatggcttctgcgaccgacatcactttacgccgtgtcctggttggccaccgggctgccgtcaatgtagtagactttgacgacaagtacatcgtgtctgcctctggtgacaggaccatcaaagtctggagcacgagcacctgtgaatttgttcgtactctcaatgggcacaagcggggcattgcctgtctccagtacagggatcgcctggttgttagtggatcatcagataataccattaggctctgggatattgaatgtggtgcctgtttaagagtcctagagggacatgaagaattggtccgatgcatccggtttgataacaagaggattgtcagtggggcctatgatgggaaaattaaagtttgggacttgcaagctgctcttgaccctcgagccccagcaagcacattgtgtttgcgcacattggtggaacattctggacgtgtgtttcggctccagtttgatgagtttcagatcatcagcagctcccatgatgacactattttgatttgggatttcttaaatgtgcctcccagtgcccagaatgagacccgttctccctccagaacatacacttacatctctagataacagtctgcactttcacccgtttcagggttttctagtcttgaactactggctacgtggctaccaaatgcctaagggagttcgttcacagctgagttatgaagctggaattggttctagacgctgggtagatgcaaagcagcctaactcttcaagtaccgacatttctcacctctgattccggctctcctttgagaaggagaccttagcttccccggcttcaagtagaacagaagcccgtttccttccctcatcagtgaaaaaatctaatgtttcaaatgtaaattgttcatagaaaaggaacatagaatctgttttacagaagtaaatcgaccgtcaagagaagacttggcctctaatttatattgctttgcactttggtttgatattaagaaacagcattcttcttcagtgaaattttgggtgccaaacacctacccagaatgtccagggctttcattttcaaaagttagcattctccttttgaccgtccaagtcattatgaattctgacttgttgtattaggaacatgttggacagtggaaaattttctctggattgttttagtaatatttttgggattatacttcctttctgtaccaatttcttttaatttaaagaactataagtcagttatattatctaccaacaggtaatatagctctttcttttattaactgttctctgtcccccaaccatctcctgatatttggtagagtaacacctttatacgtgtgcttgcctcctaatttaaaatactgtattcgcatgtagatataatgtacataacagtttaacctcaaagttgctggagtcagggccccctgtgcttgagacactaatacagagtgtgttcgcacttagccatgggctgggctcaagaacctgatacctgggttgatgtggattacctagaacccttcctgcagtattcatacagtgtttttattttgttgttgtcattgcgtgtgtgtggtttgtgtgtgtttttaatgagaatcttgttttaaaatgtaatttctaaggtttaacaccaaaatgttttatttgttgtggagtatatattatacaatagagaggtaccttaaacattttttgttcttattctttttctcataagtactcctgagtacaagtggtcacctcccatagtattcatttggcttcgctgtcaaaaatcattattctgtgcagtcgtggccctgggaaggggaaataagaaggccctgttgacgggctgtcttggctctggaattcatgcatcctggccttgccaaggttctggcagggcctgctggtgtgttggagcctgcagggcaggtcaggctggttcagaggcccatgctgaggggtgggtgctctgaagtggagtgaagcctcaagcccatgaatgccaccccagtcatctctggtgtcagctgctgctgtggccccagcaggttctcaaagctcccaagtcctccctacgacacagcccaaatgtgtaaatggcactgttgccctgacagtgcatggaaaggacgttggcatccaattggcactccttctcccttattcaatattaggtttgatttgcccttcgccattgtttccaaagatcaaggaatgtcaataacattttaaaggaccaataaacagcctcctataaagtaaacctcttcccgtggaagcacactctactactaaagggaaggccctgggctctgatttgtcctttgcattgagaacggtgtggggatcagtgtgtgtgtatgtgatttgtttattgagttggctttgcttttttagtttttcttttaaaaataaaatccttccttcccatgttactaaattaatttatgtttttgagaggttgagtctcaaagtgtaaacaataaacctccattcataaggtggatgttgtaagcttgatggtggttgtgaaagtgatttagctttgaccacttttcatcctacagcttcaatatcaaactggttaggaaagcccagggggaagggagggggcaggggaggaggcaattctgaatgaatgaatggattttttgttgtttttgcatgtttaatatagaagttcccctcgttccttgggagatgatggcctttgaatatgcagacaacctttgaattgtgcctactaaattatagcaggggactttggcacccaaggagttctgactttctgggattataatagtaattcccagccatactctggactttattttgctaaccataactgagcaaatgtaaattactgctatattaatgttttaaagcactgggatagtctaattctaacttgtaattaattatgtttgccaattatctgtttgaaataaatttgtgtctgaacagctattgaaactgttaaattgtacagatattattcatgacagctttgtactgtggaatgtgcttaataaaaaacaaaaaagtttgacttttgtccagtaaattgctaagtaatgtcaataaatcgagtatgggtattatgcagtgcacctaatctggcttcatgcaattgttacttcagctactgattcaaagccaatactcttaataaagtgttgcaatactc

SEQ ID NO: 173817 - DNA, 1629 bp, Artificial Sequence
  derived and/or modified sequence
atggaacctgatagcgttatcgaagacaagacaatagagctgatgtgttccgtgccgaggtcactgtggctgggctgcgctaacctcgttgagagcatgtgcgctctgtcctgtctccagagtatgccgagcgtgcggtgcctacagatctcaaatggcacatccagtgtcatcgtttctagaaaaagaccctcagaaggcaattatcagaaagagaaagatctgtgcatcaagtactttgatcagtggtccgaatcagatcaggtggagtttgtggagcatcttattagtcgcatgtgccactatcaacatggtcatattaacagctatctaaagcctatgctgcagagggactttattaccgcccttccagaacagggactggatcacatagcagagaacatcttgtcgtatctggacgctcgctcactgtgtgcagccgagctggtgtgtaaagagtggcagagggtgatctccgagggtatgctgtggaagaagctgattgagcggatggtgcgaacagacccactgtggaaaggacttagcgagcgccgtggatgggatcagtacttgtttaaaaatagaccaaccgatggcccccctaatagcttctaccgtagtttgtatcccaaaattattcaagacattgagacgattgagtcgaattggcggtgtggccggcacaacttgcagcgcatccagtgtaggtctgagaattcgaagggcgtctactgtctgcagtacgacgatgagaagataattagtggactgagagataactccataaagatttgggacaaaacttctttagaatgtctcaaagtgcttaccgggcatacaggaagcgtcctgtgtcttcaatacgacgagagggtcatcgtgacagggagctcggacagcactgtccgggtctgggatgtgaataccggggaggtgctgaacactcttattcatcacaacgaggcagtgctgcacctgcgtttcagtaacggactcatggtgacgtgctctaaagatcgcagcatcgcggtctgggatatggcaagcgcaacagatatcacactgaggcgcgttctagtgggtcatcgagcagcagtcaatgtcgtagatttcgacgataaatatatcgtctctgcgtcaggagatcggaccatcaaagtgtggtccacctctacctgcgagttcgtgcgcaccctcaacggccacaagcgcgggatcgcctgtctgcaatatagggaccggctggttgtctctggctctagcgataacactattaggctgtgggacattgaatgtggtgcctgcctgagagtcctcgagggacacgaagaactggtgaggtgtatccggttcgacaacaagcgcatcgtatcaggcgcctatgatggcaagatcaaggtatgggacctgcaggcggcgctggatccgagggccccagcctctacactgtgcctgagaaccctggtcgaacactcggggagagttttcagattgcaattcgatgagtttcagatcatctcttccagtcacgatgacactatcttgatatgggacttcctgaatgtgcccccttcggcacaaaatgagactaggagtccgagccggacttacacatatatctctagatag

SEQ ID NO: 173818 - DNA, 1629 bp, Artificial Sequence
  derived and/or modified sequence
atggagccagattctgtgattgaggacaagaccatcgagctgatgtgcagcgtgcccaggagcctgtggctgggctgtgccaacctggtggagagcatgtgtgccctgagctgcctgcagagcatgcccagcgtgcgctgcctgcagatcagcaatggcaccagcagcgtcatcgtgtccaggaagaggccttctgagggcaactaccagaaggagaaggacctgtgcatcaagtactttgaccagtggagcgagagtgaccaggtggagtttgtggagcacctgatcagcaggatgtgccactaccagcacggccacatcaacagctacctgaagcccatgctgcagagggacttcatcacagccctgcctgagcagggcctggaccacatcgccgagaacatcctgagctacctggatgcccggagcctgtgtgccgctgagctggtgtgcaaggagtggcagagggtcatcagcgagggcatgctgtggaagaagctgattgaaagaatggtgaggacagaccccctgtggaagggcctgtctgagcggcggggctgggaccagtacctgttcaagaaccggcccacagatggcccccccaacagcttctaccgcagcctgtaccccaagatcatccaggacatcgagaccatcgagagcaactggaggtgtggccgccacaacctgcagaggatccagtgccgctctgagaacagcaaaggagtgtactgcctgcagtatgatgatgagaagatcatcagcggcctgcgggacaacagcatcaagatctgggacaagaccagcctggagtgcctgaaggtgctgaccggccacacaggctctgtgctgtgcctgcagtatgatgagcgggtgattgtgacaggcagcagtgacagcacagtgcgggtgtgggatgtgaacacaggagaggtgctgaacaccctcatccaccacaatgaggccgtgctgcacctgcgcttcagcaatggcctgatggtgacctgcagcaaggacaggagcattgctgtgtgggacatggccagcgccacagacatcaccctgcggcgggtgctggtgggccacagagctgctgtgaatgtggtggactttgatgacaagtacatcgtgtctgccagcggggacaggaccatcaaggtgtggagcaccagcacctgtgaatttgtgaggaccctgaatggccacaagaggggcatcgcctgcctgcagtacagagaccggctggtggtgtctggcagcagtgacaacaccatccggctgtgggacattgaatgtggggcctgcctgcgggtgctggagggccacgaggagctggtgcgctgcatccgctttgacaacaagagaattgtgtctggggcctatgatggcaagatcaaggtgtgggacctgcaggccgccctggacccccgggccccagccagcaccctgtgcctgcggaccctggtggagcacagcggccgggtcttccggctgcagtttgatgagttccagatcatcagcagcagccatgatgacaccatcctgatctgggacttcctgaatgtgcccccatctgcccagaatgagaccaggagccccagcaggacctacacctacatcagcaggtag

SEQ ID NO: 173819 - DNA, 1629 bp, Artificial Sequence
  derived and/or modified sequence
atggagcccgacagcgtgatcgaggacaagaccatcgagctgatgtgcagcgtgccaagatccctttggctcggatgcgccaatttggtggagagcatgtgcgccctgtcttgcctgcagtccatgccctcagtgagatgcttgcaaataagcaatggtaccagctccgtcatcgtaagtcggaaaagacctagcgagggcaactatcagaaggagaaagatctgtgtataaagtactttgaccaatggagcgaatccgatcaagtagaatttgtggagcatttaatttccagaatgtgtcactaccagcacggacacatcaattcctaccttaaaccaatgcttcagcgcgatttcataacggccctccccgagcaaggactagaccatattgccgagaatatactctcttacctggatgctcgctcactctgtgccgccgagctggtctgtaaggagtggcaacgagtcatctcggaagggatgttatggaaaaagctcatcgaacgcatggttagaaccgatccgttatggaaaggcctgagtgagcggcgaggttgggaccagtatctgtttaagaaccggccgaccgatgggccaccaaattctttttatcgcagcctctatcccaagatcattcaggatattgagacgatagagtccaattggaggtgcggcaggcataaccttcagagaattcagtgccggagcgagaacagcaagggagtgtattgtctgcagtacgacgacgagaaaattatatctggccttagagataacagtataaagatatgggacaaaacctcacttgagtgtctaaaggtgctgactgggcacaccggctcagtgctgtgtttacagtatgacgaaagagtcatcgtgaccggaagctctgacagcaccgttagagtttgggatgtaaatacaggggaagttctgaacaccctgatacaccacaacgaggccgttttgcacctgcgattcagcaacggccttatggtcacatgttctaaagatcgaagcattgctgtttgggatatggcaagcgcgactgacatcacattgaggcgcgtcctcgttggacacagagccgccgtgaatgtagtggacttcgatgataagtatattgtctccgcatccggcgataggacaatcaaagtttggtctacttccacgtgtgagtttgttcgcaccctgaacggccataagagaggaatcgcctgtctacagtacagggaccggttggtcgttagtggcagctccgataacactattcgcctttgggacatcgagtgcggtgcctgcctccgtgtactggaaggccacgaggaactggtccggtgtatccgttttgacaataagaggattgtttcaggggcgtacgacggaaaaatcaaggtttgggatctgcaggccgctctggacccacgggctccggctagcactctctgcctgcggacccttgttgaacactccgggcgagtgtttcgcctccaatttgatgagtttcagataatttcctcgagccacgacgatacaattctgatttgggattttctcaatgtgcctccaagtgctcagaacgaaacccgcagcccatctcgcacctatacttacatcagtcgctag

SEQ ID NO: 173820 - DNA, 1629 bp, Artificial Sequence
  derived and/or modified sequence
atggagccggatagcgtgatcgaagacaaaacgatcgaacttatgtgcagcgttccaaggagcctgtggttaggatgcgctaatctggttgagagcatgtgcgccttgtcttgcctccagagtatgccctccgtgcgctgtttgcaaatcagtaacggtacttcgtcggtaatagtctctcggaagagaccgtcagagggcaattatcagaaggaaaaggacctgtgtatcaaatactttgatcagtggtcagagtccgatcaggtagaattcgtggaacacctcatatctagaatgtgtcactatcagcatggacacattaactcatatctgaagcctatgctacagcgtgattttatcaccgccctgccagagcaggggctggaccacatcgcagagaatatcctgtcctacctcgacgctagaagtctttgcgctgcagaacttgtttgtaaagagtggcaacgcgttatctcggaaggcatgctatggaagaagctgatcgaacgtatggttcggaccgaccccctgtggaaggggctctccgaaaggagagggtgggatcaatacttgtttaaaaatcgccctaccgacggccctcctaattcattttatagaagtctctaccctaaaattatccaggatattgagacaattgagagtaactggcgatgtggacgacacaacctccagcgtatccagtgcaggagtgaaaattcgaaaggcgtctattgcctccagtatgacgacgagaagattataagcggtctgagagacaacagtatcaagatttgggacaagacatccctggagtgcctcaaggtgctgaccgggcacacagggtcggtgctttgtctgcaatatgacgagcgagtgattgttaccggatctagtgactcaacagtaagagtctgggatgtgaacaccggagaagtcttgaatacattgatccatcataacgaagcggtattacacctgaggttctccaacggcctcatggtgacgtgttctaaggatagatccattgccgtgtgggacatggccagcgccactgacattactctccggagggttctggtggggcacagggccgctgtcaatgtggttgacttcgatgacaagtatatagtgtctgccagcggggacagaaccataaaggtttggagtacaagcacatgcgaatttgttagaaccctcaacgggcacaaaagaggcatcgcctgcctccagtatagggacaggcttgtcgtctcaggctccagcgacaatactatccgcctctgggatattgagtgcggggcatgtctccgagtcctcgagggacacgaagaactggtgaggtgcattcgcttcgacaacaagagaattgtgagcggggcatatgacggcaagataaaagtttgggacttacaggccgcactggaccctagggccccagcaagtaccctttgcctcagaacgctggtagagcactccggaagggtcttcaggctccaatttgacgaattccagattatatcttcttctcacgacgatacaatccttatatgggactttttaaacgtgcccccatccgcccaaaacgaaactcgatccccttccaggacatatacgtatatttctaggtag

SEQ ID NO: 173821 - DNA, 1629 bp, Artificial Sequence
  derived and/or modified sequence
atggagcccgacagcgtgatcgaggacaagaccatcgagctgatgtgcagcgtgcccagaagcctgtggctgggctgcgccaacctggtggagagcatgtgcgccctgagctgcctgcagagcatgcccagcgtgagatgcctgcagatcagcaacggcaccagcagcgtgatcgtgagcagaaagagacccagcgagggcaactaccagaaggagaaggacctgtgcatcaagtacttcgaccagtggagcgagagcgaccaggtggagttcgtggagcacctgatcagcagaatgtgccactaccagcacggccacatcaacagctacctgaagcccatgctgcagagagacttcatcaccgccctgcccgagcagggcctggaccacatcgccgagaacatcctgagctacctggacgccagaagcctgtgcgccgccgagctggtgtgcaaggagtggcagagagtgatcagcgagggcatgctgtggaagaagctgatcgagagaatggtgagaaccgaccccctgtggaagggcctgagcgagagaagaggctgggaccagtacctgttcaagaacagacccaccgacggcccccccaacagcttctacagaagcctgtaccccaagatcatccaggacatcgagaccatcgagagcaactggagatgcggcagacacaacctgcagagaatccagtgcagaagcgagaacagcaagggcgtgtactgcctgcagtacgacgacgagaagatcatcagcggcctgagagacaacagcatcaagatctgggacaagaccagcctggagtgcctgaaggtgctgaccggccacaccggcagcgtgctgtgcctgcagtacgacgagagagtgatcgtgaccggcagcagcgacagcaccgtgagagtgtgggacgtgaacaccggcgaggtgctgaacaccctgatccaccacaacgaggccgtgctgcacctgagattcagcaacggcctgatggtgacctgcagcaaggacagaagcatcgccgtgtgggacatggccagcgccaccgacatcaccctgagaagagtgctggtgggccacagagccgccgtgaacgtggtggacttcgacgacaagtacatcgtgagcgccagcggcgacagaaccatcaaggtgtggagcaccagcacctgcgagttcgtgagaaccctgaacggccacaagagaggcatcgcctgcctgcagtacagagacagactggtggtgagcggcagcagcgacaacaccatcagactgtgggacatcgagtgcggcgcctgcctgagagtgctggagggccacgaggagctggtgagatgcatcagattcgacaacaagagaatcgtgagcggcgcctacgacggcaagatcaaggtgtgggacctgcaggccgccctggaccccagagcccccgccagcaccctgtgcctgagaaccctggtggagcacagcggcagagtgttcagactgcagttcgacgagttccagatcatcagcagcagccacgacgacaccatcctgatctgggacttcctgaacgtgccccccagcgcccagaacgagaccagaagccccagcagaacctacacctacatcagcagatag

SEQ ID NO: 173822 - protein, 1455 aa, Artificial Sequence
  derived and/or modified sequence
MSKSLKKKSHWTSKVHESVIGRNPEGQLGFELKGGAENGQFPYLGEVKPGKVAYESGSKLVSEELLLEVNETPVAGLTIRDVLAVIKHCKDPLRLKCVKQGGIVDKDLRHYLNLRFQKGSVDHELQQIIRDNLYLRTVPCTTRPHKEGEVPGVDYIFITVEDFMELEKSGALLESGTYEDNYYGTPKPPAEPAPLLLNVTDQILPGATPSAEGKRKRNKSVSNMEKASIEPPEEEEEERPVVNGNGVVVTPESSEHEDKSAGASGEMPSQPYPAPVYSQPEELKEQMDDTKPTKPEDNEEPDPLPDNWEMAYTEKGEVYFIDHNTKTTSWLDPRLAKKAKPPEECKENELPYGWEKIDDPIYGTYYVDHINRRTQFENPVLEAKRKLQQHNMPHTELGTKPLQAPGFREKPLFTRDASQLKGTFLSTTLKKSNMGFGFTIIGGDEPDEFLQVKSVIPDGPAAQDGKMETGDVIVYINEVCVLGHTHADVVKLFQSVPIGQSVNLVLCRGYPLPFDPEDPANSMVPPLAIMERPPPVMVNGRHNYETYLEYISRTSQSVPDITDRPPHSLHSMPTDGQLDGTYPPPVHDDNVSMASSGATQAELMTLTIVKGAQGFGFTIADSPTGQRVKQILDIQGCPGLCEGDLIVEINQQNVQNLSHTEVVDILKDCPIGSETSLIIHRGGFFSPWKTPKPIMDRWENQGSPQTSLSAPAIPQNLPFPPALHRSSFPDSTEAFDPRKPDPYELYEKSRAIYESRQQVPPRTSFRMDSSGPDYKELDVHLRRMESGFGFRILGGDEPGQPILIGAVIAMGSADRDGRLHPGDELVYVDGIPVAGKTHRYVIDLMHHAARNGQVNLTVRRKVLCGGEPCPENGRSPGSVSTHHSSPRSDYATYTNSNHAAPSSNASPPEGFASHSLQTSDVVIHRKENEGFGFVIISSLNRPESGSTITVPHKIGRIIDGSPADRCAKLKVGDRILAVNGQSIINMPHADIVKLIKDAGLSVTLRIIPQEELNSPTSAPSSEKQSPMAQQSPLAQQSPLAQPSPATPNSPIAQPAPPQPLQLQGHENSYRSEVKARQDVKPDIRQPPFTDYRQPPLDYRQPPGGDYQQPPPLDYRQPPLLDYRQHSPDTRQYPLSDYRQPQDFDYFTVDMEKGAKGFGFSIRGGREYKMDLYVLRLAEDGPAIRNGRMRVGDQIIEINGESTRDMTHARAIELIKSGGRRVRLLLKRGTGQVPEYDEPAPWSSPAAAAPGLPEVGVSLDDGLAPFSPSHPAPPSDPSHQISPGPTWDIKREHDVRKPKELSACGQKKQRLGEQRERSASPQRAARPRLEEAPGGQGRPEAGRPASEARAPGLAAADAADAARAGGKEAPRAAAGSELCRREGPGAAPAFAGPGGGGSGALEAEGRAGARAGPRPGPRPPGGAPARKAAVAPGPWKVPGSDKLPSVLKPGASAASR

SEQ ID NO: 173823 - protein, 1253 aa, Artificial Sequence
  derived and/or modified sequence
MSKSLKKKSHWTSKVHESVIGRNPEGQLGFELKGGAENGQFPYLGEVKPGKVAYESGSKLVSEELLLEVNETPVAGLTIRDVLAVIKHCKDPLRLKCVKQGGIVDKDLRHYLNLRFQKGSVDHELQQIIRDNLYLRTVPCTTRPHKEGEVPGVDYIFITVEDFMELEKSGALLESGTYEDNYYGTPKPPAEPAPLLLNVTDQILPGATPSAEGKRKRNKSVSNMEKASIEPPEEEEEERPVVNGNGVVVTPESSEHEDKSAGASGEMPSQPYPAPVYSQPEELKEQMDDTKPTKPEDNEEPDPLPDNWEMAYTEKGEVYFIDHNTKTTSWLDPRLAKKAKPPEECKENELPYGWEKIDDPIYGTYYVDHINRRTQFENPVLEAKRKLQQHNMPHTELGTKPLQAPGFREKPLFTRDASQLKGTFLSTTLKKSNMGFGFTIIGGDEPDEFLQVKSVIPDGPAAQDGKMETGDVIVYINEVCVLGHTHADVVKLFQSVPIGQSVNLVLCRGYPLPFDPEDPANSMVPPLAIMERPPPVMVNGRHNYETYLEYISRTSQSVPDITDRPPHSLHSMPTDGQLDGTYPPPVHDDNVSMASSGATQAELMTLTIVKGAQGFGFTIADSPTGQRVKQILDIQGCPGLCEGDLIVEINQQNVQNLSHTEVVDILKDCPIGSETSLIIHRGGFFSPWKTPKPIMDRWENQGSPQTSLSAPAIPQNLPFPPALHRSSFPDSTEAFDPRKPDPYELYEKSRAIYESRQQVPPRTSFRMDSSGPDYKELDVHLRRMESGFGFRILGGDEPGQPILIGAVIAMGSADRDGRLHPGDELVYVDGIPVAGKTHRYVIDLMHHAARNGQVNLTVRRKVLCGGEPCPENGRSPGSVSTHHSSPRSDYATYTNSNHAAPSSNASPPEGFASHSLQTSDVVIHRKENEGFGFVIISSLNRPESGSTITVPHKIGRIIDGSPADRCAKLKVGDRILAVNGQSIINMPHADIVKLIKDAGLSVTLRIIPQEELNSPTSAPSSEKQSPMAQQSPLAQQSPLAQPSPATPNSPIAQPAPPQPLQLQGHENSYRSEVKARQDVKPDIRQPPFTDYRQPPLDYRQPPGGDYQQPPPLDYRQPPLLDYRQHSPDTRQYPLSDYRQPQDFDYFTVDMEKGAKGFGFSIRGGREYKMDLYVLRLAEDGPAIRNGRMRVGDQIIEINGESTRDMTHARAIELIKSGGRRVRLLLKRGTGQVPEYDPPAPAQAVLLRFRLTAF

SEQ ID NO: 173824 - DNA, 4368 bp, Artificial Sequence
  derived and/or modified sequence
atgagcaagagcctgaagaagaagagccactggaccagcaaggtgcacgagagcgtgatcggcagaaaccccgagggccagctgggcttcgagctgaagggcggcgccgagaacggccagttcccctacctgggcgaggtgaagcccggcaaggtggcctacgagagcggcagcaagctggtgagcgaggagctgctgctggaggtgaacgagacccccgtggccggcctgaccatcagagacgtgctggccgtgatcaagcactgcaaggaccccctgagactgaagtgcgtgaagcagggcggcatcgtggacaaggacctgagacactacctgaacctgagattccagaagggcagcgtggaccacgagctgcagcagatcatcagagacaacctgtacctgagaaccgtgccctgcaccaccagaccccacaaggagggcgaggtgcccggcgtggactacatcttcatcaccgtggaggacttcatggagctggagaagagcggcgccctgctggagagcggcacctacgaggacaactactacggcacccccaagccccccgccgagcccgcccccctgctgctgaacgtgaccgaccagatcctgcccggcgccacccccagcgccgagggcaagagaaagagaaacaagagcgtgagcaacatggagaaggccagcatcgagccccccgaggaggaggaggaggagagacccgtggtgaacggcaacggcgtggtggtgacccccgagagcagcgagcacgaggacaagagcgccggcgccagcggcgagatgcccagccagccctaccccgcccccgtgtacagccagcccgaggagctgaaggagcagatggacgacaccaagcccaccaagcccgaggacaacgaggagcccgaccccctgcccgacaactgggagatggcctacaccgagaagggcgaggtgtacttcatcgaccacaacaccaagaccaccagctggctggaccccagactggccaagaaggccaagccccccgaggagtgcaaggagaacgagctgccctacggctgggagaagatcgacgaccccatctacggcacctactacgtggaccacatcaacagaagaacccagttcgagaaccccgtgctggaggccaagagaaagctgcagcagcacaacatgccccacaccgagctgggcaccaagcccctgcaggcccccggcttcagagagaagcccctgttcaccagagacgccagccagctgaagggcaccttcctgagcaccaccctgaagaagagcaacatgggcttcggcttcaccatcatcggcggcgacgagcccgacgagttcctgcaggtgaagagcgtgatccccgacggccccgccgcccaggacggcaagatggagaccggcgacgtgatcgtgtacatcaacgaggtgtgcgtgctgggccacacccacgccgacgtggtgaagctgttccagagcgtgcccatcggccagagcgtgaacctggtgctgtgcagaggctaccccctgcccttcgaccccgaggaccccgccaacagcatggtgccccccctggccatcatggagagacccccccccgtgatggtgaacggcagacacaactacgagacctacctggagtacatcagcagaaccagccagagcgtgcccgacatcaccgacagacccccccacagcctgcacagcatgcccaccgacggccagctggacggcacctaccccccccccgtgcacgacgacaacgtgagcatggccagcagcggcgccacccaggccgagctgatgaccctgaccatcgtgaagggcgcccagggcttcggcttcaccatcgccgacagccccaccggccagagagtgaagcagatcctggacatccagggctgccccggcctgtgcgagggcgacctgatcgtggagatcaaccagcagaacgtgcagaacctgagccacaccgaggtggtggacatcctgaaggactgccccatcggcagcgagaccagcctgatcatccacagaggcggcttcttcagcccctggaagacccccaagcccatcatggacagatgggagaaccagggcagcccccagaccagcctgagcgcccccgccatcccccagaacctgcccttcccccccgccctgcacagaagcagcttccccgacagcaccgaggccttcgaccccagaaagcccgacccctacgagctgtacgagaagagcagagccatctacgagagcagacagcaggtgccccccagaaccagcttcagaatggacagcagcggccccgactacaaggagctggacgtgcacctgagaagaatggagagcggcttcggcttcagaatcctgggcggcgacgagcccggccagcccatcctgatcggcgccgtgatcgccatgggcagcgccgacagagacggcagactgcaccccggcgacgagctggtgtacgtggacggcatccccgtggccggcaagacccacagatacgtgatcgacctgatgcaccacgccgccagaaacggccaggtgaacctgaccgtgagaagaaaggtgctgtgcggcggcgagccctgccccgagaacggcagaagccccggcagcgtgagcacccaccacagcagccccagaagcgactacgccacctacaccaacagcaaccacgccgcccccagcagcaacgccagcccccccgagggcttcgccagccacagcctgcagaccagcgacgtggtgatccacagaaaggagaacgagggcttcggcttcgtgatcatcagcagcctgaacagacccgagagcggcagcaccatcaccgtgccccacaagatcggcagaatcatcgacggcagccccgccgacagatgcgccaagctgaaggtgggcgacagaatcctggccgtgaacggccagagcatcatcaacatgccccacgccgacatcgtgaagctgatcaaggacgccggcctgagcgtgaccctgagaatcatcccccaggaggagctgaacagccccaccagcgcccccagcagcgagaagcagagccccatggcccagcagagccccctggcccagcagagccccctggcccagcccagccccgccacccccaacagccccatcgcccagcccgcccccccccagcccctgcagctgcagggccacgagaacagctacagaagcgaggtgaaggccagacaggacgtgaagcccgacatcagacagccccccttcaccgactacagacagccccccctggactacagacagccccccggcggcgactaccagcagcccccccccctggactacagacagccccccctgctggactacagacagcacagccccgacaccagacagtaccccctgagcgactacagacagccccaggacttcgactacttcaccgtggacatggagaagggcgccaagggcttcggcttcagcatcagaggcggcagagagtacaagatggacctgtacgtgctgagactggccgaggacggccccgccatcagaaacggcagaatgagagtgggcgaccagatcatcgagatcaacggcgagagcaccagagacatgacccacgccagagccatcgagctgatcaagagcggcggcagaagagtgagactgctgctgaagagaggcaccggccaggtgcccgagtacgacgagcccgccccctggagcagccccgccgccgccgcccccggcctgcccgaggtgggcgtgagcctggacgacggcctggcccccttcagccccagccaccccgccccccccagcgaccccagccaccagatcagccccggccccacctgggacatcaagagagagcacgacgtgagaaagcccaaggagctgagcgcctgcggccagaagaagcagagactgggcgagcagagagagagaagcgccagcccccagagagccgccagacccagactggaggaggcccccggcggccagggcagacccgaggccggcagacccgccagcgaggccagagcccccggcctggccgccgccgacgccgccgacgccgccagagccggcggcaaggaggcccccagagccgccgccggcagcgagctgtgcagaagagagggccccggcgccgcccccgccttcgccggccccggcggcggcggcagcggcgccctggaggccgagggcagagccggcgccagagccggccccagacccggccccagaccccccggcggcgcccccgccagaaaggccgccgtggcccccggcccctggaaggtgcccggcagcgacaagctgcccagcgtgctgaagcccggcgccagcgccgccagcagatag

SEQ ID NO: 173825 - DNA, 1668 bp, Artificial Sequence
  derived and/or modified sequence
atggagctggagaagagcggcgccctgctggagagcggcacctacgaggacaactactacggcacccccaagccccccgccgagcccgcccccctgctgctgaacgtgaccgaccagatcctgcccggcgccacccccagcgccgagggcaagagaaagagaaacaagagcgtgagcaacatggagaaggccagcatcgagccccccgaggaggaggaggaggagagacccgtggtgaacggcaacggcgtggtggtgacccccgagagcagcgagcacgaggacaagagcgccggcgccagcggcgagatgcccagccagccctaccccgcccccgtgtacagccagcccgaggagctgaaggagcagatggacgacaccaagcccaccaagcccgaggacaacgaggagcccgaccccctgcccgacaactgggagatggcctacaccgagaagggcgaggtgtacttcatcgaccacaacaccaagaccaccagctggctggaccccagactggccaagaaggccaagccccccgaggagtgcaaggagaacgagctgccctacggctgggagaagatcgacgaccccatctacggcacctactacgtggaccacatcaacagaagaacccagttcgagaaccccgtgctggaggccaagagaaagctgcagcagcacaacatgccccacaccgagctgggcaccaagcccctgcaggcccccggcttcagagagaagcccctgttcaccagagacgccagccagctgaagggcaccttcctgagcaccaccctgaagaagagcaacatgggcttcggcttcaccatcatcggcggcgacgagcccgacgagttcctgcaggtgaagagcgtgatccccgacggccccgccgcccaggacggcaagatggagaccggcgacgtgatcgtgtacatcaacgaggtgtgcgtgctgggccacacccacgccgacgtggtgaagctgttccagagcgtgcccatcggccagagcgtgaacctggtgctgtgcagaggctaccccctgcccttcgaccccgaggaccccgccaacagcatggtgccccccctggccatcatggagagacccccccccgtgatggtgaacggcagacacaactacgagacctacctggagtacatcagcagaaccagccagagcgtgcccgacatcaccgacagacccccccacagcctgcacagcatgcccaccgacggccagctggacggcacctaccccccccccgtgcacgacgacaacgtgagcatggccagcagcggcgccacccaggccgagctgatgaccctgaccatcgtgaagggcgcccagggcttcggcttcaccatcgccgacagccccaccggccagagagtgaagcagatcctggacatccagggctgccccggcctgtgcgagggcgacctgatcgtggagatcaaccagcagaacgtgcagaacctgagccacaccgaggtggtggacatcctgaaggactgccccatcggcagcgagaccagcctgatcatccacagaggcggcaagaccaacaccggcagcgccatcaagtacgtgggcaagatcgtgggcagcttcaacaacatcgtgaagatgcagatcagcctggagctgaacgagatcatcctgtag

SEQ ID NO: 173826 - DNA, 3762 bp, Artificial Sequence
  derived and/or modified sequence
atgagcaagagcctgaagaagaagagccactggaccagcaaggtgcacgagagcgtgatcggcagaaaccccgagggccagctgggcttcgagctgaagggcggcgccgagaacggccagttcccctacctgggcgaggtgaagcccggcaaggtggcctacgagagcggcagcaagctggtgagcgaggagctgctgctggaggtgaacgagacccccgtggccggcctgaccatcagagacgtgctggccgtgatcaagcactgcaaggaccccctgagactgaagtgcgtgaagcagggcggcatcgtggacaaggacctgagacactacctgaacctgagattccagaagggcagcgtggaccacgagctgcagcagatcatcagagacaacctgtacctgagaaccgtgccctgcaccaccagaccccacaaggagggcgaggtgcccggcgtggactacatcttcatcaccgtggaggacttcatggagctggagaagagcggcgccctgctggagagcggcacctacgaggacaactactacggcacccccaagccccccgccgagcccgcccccctgctgctgaacgtgaccgaccagatcctgcccggcgccacccccagcgccgagggcaagagaaagagaaacaagagcgtgagcaacatggagaaggccagcatcgagccccccgaggaggaggaggaggagagacccgtggtgaacggcaacggcgtggtggtgacccccgagagcagcgagcacgaggacaagagcgccggcgccagcggcgagatgcccagccagccctaccccgcccccgtgtacagccagcccgaggagctgaaggagcagatggacgacaccaagcccaccaagcccgaggacaacgaggagcccgaccccctgcccgacaactgggagatggcctacaccgagaagggcgaggtgtacttcatcgaccacaacaccaagaccaccagctggctggaccccagactggccaagaaggccaagccccccgaggagtgcaaggagaacgagctgccctacggctgggagaagatcgacgaccccatctacggcacctactacgtggaccacatcaacagaagaacccagttcgagaaccccgtgctggaggccaagagaaagctgcagcagcacaacatgccccacaccgagctgggcaccaagcccctgcaggcccccggcttcagagagaagcccctgttcaccagagacgccagccagctgaagggcaccttcctgagcaccaccctgaagaagagcaacatgggcttcggcttcaccatcatcggcggcgacgagcccgacgagttcctgcaggtgaagagcgtgatccccgacggccccgccgcccaggacggcaagatggagaccggcgacgtgatcgtgtacatcaacgaggtgtgcgtgctgggccacacccacgccgacgtggtgaagctgttccagagcgtgcccatcggccagagcgtgaacctggtgctgtgcagaggctaccccctgcccttcgaccccgaggaccccgccaacagcatggtgccccccctggccatcatggagagacccccccccgtgatggtgaacggcagacacaactacgagacctacctggagtacatcagcagaaccagccagagcgtgcccgacatcaccgacagacccccccacagcctgcacagcatgcccaccgacggccagctggacggcacctaccccccccccgtgcacgacgacaacgtgagcatggccagcagcggcgccacccaggccgagctgatgaccctgaccatcgtgaagggcgcccagggcttcggcttcaccatcgccgacagccccaccggccagagagtgaagcagatcctggacatccagggctgccccggcctgtgcgagggcgacctgatcgtggagatcaaccagcagaacgtgcagaacctgagccacaccgaggtggtggacatcctgaaggactgccccatcggcagcgagaccagcctgatcatccacagaggcggcttcttcagcccctggaagacccccaagcccatcatggacagatgggagaaccagggcagcccccagaccagcctgagcgcccccgccatcccccagaacctgcccttcccccccgccctgcacagaagcagcttccccgacagcaccgaggccttcgaccccagaaagcccgacccctacgagctgtacgagaagagcagagccatctacgagagcagacagcaggtgccccccagaaccagcttcagaatggacagcagcggccccgactacaaggagctggacgtgcacctgagaagaatggagagcggcttcggcttcagaatcctgggcggcgacgagcccggccagcccatcctgatcggcgccgtgatcgccatgggcagcgccgacagagacggcagactgcaccccggcgacgagctggtgtacgtggacggcatccccgtggccggcaagacccacagatacgtgatcgacctgatgcaccacgccgccagaaacggccaggtgaacctgaccgtgagaagaaaggtgctgtgcggcggcgagccctgccccgagaacggcagaagccccggcagcgtgagcacccaccacagcagccccagaagcgactacgccacctacaccaacagcaaccacgccgcccccagcagcaacgccagcccccccgagggcttcgccagccacagcctgcagaccagcgacgtggtgatccacagaaaggagaacgagggcttcggcttcgtgatcatcagcagcctgaacagacccgagagcggcagcaccatcaccgtgccccacaagatcggcagaatcatcgacggcagccccgccgacagatgcgccaagctgaaggtgggcgacagaatcctggccgtgaacggccagagcatcatcaacatgccccacgccgacatcgtgaagctgatcaaggacgccggcctgagcgtgaccctgagaatcatcccccaggaggagctgaacagccccaccagcgcccccagcagcgagaagcagagccccatggcccagcagagccccctggcccagcagagccccctggcccagcccagccccgccacccccaacagccccatcgcccagcccgcccccccccagcccctgcagctgcagggccacgagaacagctacagaagcgaggtgaaggccagacaggacgtgaagcccgacatcagacagccccccttcaccgactacagacagccccccctggactacagacagccccccggcggcgactaccagcagcccccccccctggactacagacagccccccctgctggactacagacagcacagccccgacaccagacagtaccccctgagcgactacagacagccccaggacttcgactacttcaccgtggacatggagaagggcgccaagggcttcggcttcagcatcagaggcggcagagagtacaagatggacctgtacgtgctgagactggccgaggacggccccgccatcagaaacggcagaatgagagtgggcgaccagatcatcgagatcaacggcgagagcaccagagacatgacccacgccagagccatcgagctgatcaagagcggcggcagaagagtgagactgctgctgaagagaggcaccggccaggtgcccgagtacgacccccccgcccccgcccaggccgtgctgctgagattcagactgaccgccttctag

SEQ ID NO: 173827 - DNA, 4368 bp, Artificial Sequence
  derived and/or modified sequence
atgagtaaaagtcttaagaagaagtcccactggaccagtaaggtccacgagagcgtgatcggtcgtaatcccgaggggcagttgggctttgagctgaaaggcggggcggagaacggacagtttccatacctgggcgaggtaaagccaggtaaggttgcatatgaatcaggctctaagctggtctcagaagaactgttgcttgaggtcaacgaaacgcccgtggccggtctcaccattagggatgtgctggctgtaataaagcactgcaaggatcctctcaggctgaaatgcgtgaaacagggtggaatagtggataaagatttgaggcactaccttaatctcagattccagaagggctcagtggaccacgagctgcagcagattattcgcgacaatctatacctgcgcacagtaccttgcactacccgtccccacaaagagggagaggtcccaggagtggactacatttttattaccgtagaagactttatggagctggagaagtcaggcgcgctgctggagagtggcacctatgaagacaactactatggaacccctaaacctcctgctgagcccgccccactgttgctcaatgtgactgatcagatactacctggcgccaccccctccgccgagggcaaaagaaaaaggaataaaagcgtaagcaacatggagaaggcatctattgaacctccggaggaggaagaagaagaaaggccagtggtgaacggaaatggagtcgttgtcacgcccgagtcttctgaacatgaggacaaatctgcaggggcctcaggcgagatgcccagccagccttaccccgctcctgtctattcacaaccggaagagctgaaggaacagatggacgacactaaacccacgaagcctgaagacaatgaagagcccgaccccctccctgacaactgggaaatggcatataccgaaaagggggaggtgtattttatcgaccataacaccaagaccacttcttggctcgacccacgcctggccaaaaaggcaaagccccctgaggagtgtaaagaaaatgaacttccttacggatgggagaaaatcgacgaccccatttatgggacttattatgtcgatcatatcaaccgacgcacccagtttgaaaacccggtcctagaagctaaacgaaaactacagcagcacaatatgccacatacagagttgggtaccaagccattgcaggcgcctggctttcgcgaaaaacccctgttcactcgggacgctagtcaactaaagggcacatttttgtccaccaccctgaaaaagagcaacatgggattcgggtttactattatcggaggggacgaaccagatgagttccttcaggtgaagtccgtgatacctgatgggcctgcagcacaagatggtaagatggagaccggcgatgtgatcgtgtacatcaatgaagtttgtgtgctcggccacacccacgccgacgtagtgaagttattccaatccgtccccataggccaatcagtaaacctggtgctgtgccgaggatatcctcttccattcgaccctgaggaccccgcaaactccatggtcccacctttggcgatcatggagcgtcctccccctgtgatggttaatggcagacataactacgaaacatacctagagtacatctcacgcacttctcagtccgttccggacatcaccgacaggccgccccactcccttcactcgatgcccacagacggccagcttgacggtacatacccaccccctgtgcatgacgataacgtttccatggcttcttctggtgcaactcaagcagaactgatgacactgactattgtcaaaggcgcacagggtttcgggtttacaattgccgatagccctaccgggcagcgcgtaaaacagatccttgacatccagggatgccctgggctttgtgaaggtgaccttatcgttgaaatcaatcaacagaacgtgcagaatctctctcataccgaagtagttgatatcctgaaggattgccccattggttctgagacttcactcataattcaccgtggaggtttcttcagtccttggaagacccctaaacccataatggacaggtgggagaaccaggggtcaccacagactagtctgtccgctccagcaatcccccagaatctgccttttccacccgctcttcaccgatctagtttcccagattccacagaggccttcgaccccaggaaaccagatccgtatgagctgtatgagaagtcccgagcaatttacgaaagtcgccagcaggtcccaccacggaccagttttagaatggacagctcaggccccgactataaagaattagacgtgcatctgcggagaatggagtccggctttggttttcggatcttaggaggagacgagccggggcagccgatccttattggtgctgttattgccatgggcagcgccgatagagacggcagattgcatcccggcgacgagctcgtctacgtcgatggcatccctgtcgcaggcaagacacacagatacgtgattgacctgatgcatcatgctgcccgaaacgggcaagtcaacctaaccgtcagaaggaaagtgctctgcggcggtgaaccctgccccgaaaacggcagatctccaggtagtgttagcacccaccattcatcgccacgcagtgactatgcaacgtacacaaatagtaaccatgccgccccaagcagcaacgccagcccgccggagggatttgccagccatagcctgcagacctcagacgttgtgatccacagaaaggagaatgaaggcttcggctttgtaatcattagctctctgaataggccagagtctggcagtaccatcacagtacctcacaaaattggtaggatcattgacgggtctccggctgaccgctgcgccaaactcaaagtcggcgataggatcctggcagtgaacgggcagtctatcattaacatgccacacgctgacatcgtaaagctgataaaggacgcaggcctcagtgtcaccttgcgcattatccctcaggaggagttgaattctcctacttctgctccaagttctgagaagcaatctcccatggcccagcaatctccccttgcgcagcagtctccacttgcccagcccagccctgctacccccaactcccctattgcacagccggcacccccgcagcccctacagctgcagggacacgagaattcatatagatccgaagtgaaggccagacaggatgtgaaaccagatataaggcagcccccatttacggattacaggcagccgccactggattaccgccagccacccggtggtgactaccaacagccaccccctcttgattaccggcagccacccctgctggactaccggcagcactcacctgacacacgccagtatccattaagtgattaccggcagcctcaagactttgactattttacagttgacatggaaaaaggcgcaaaaggcttcgggttttccatccggggaggccgggagtacaaaatggatctctacgttctccgactcgcggaagacggtcctgctattaggaatggcaggatgcgcgtgggcgaccagatcattgaaattaatggtgagtctactagagacatgacacatgcacgggccattgagctgatcaagtccgggggcagaagagttcggttactgttgaagcgaggcaccggtcaggtgccagaatatgatgaaccggctccatggtcttcacccgctgccgcagcccctgggctacccgaagtcggtgtcagccttgatgacggactggccccattcagtccatcacatcccgccccaccctctgatccttcacaccagatttccccaggccctacctgggacatcaaacgcgaacacgatgttcgcaagcccaaagaactgagcgcttgcgggcagaaaaaacagagactgggcgaacagcgggaacgctccgccagccctcagcgcgccgcccgcccgcggctcgaagaggctcctggaggccaggggcgcccggaggctggacggcctgccagtgaggccagggctccaggactggccgccgctgacgccgcagacgcagcacgggctggcggaaaggaggcccctcgtgcagctgcagggtccgagctgtgtcggagggagggcccaggcgctgccccagcctttgcgggcccaggcggaggaggcagcggcgcccttgaagctgagggcagagcgggagcacgcgccggacctagacctggtccccgtccccccggcggtgcacccgccaggaaggcagccgttgcacctgggccttggaaggtccctgggagtgacaaattaccatccgtgctgaagcctggggccagtgccgcatccaggtag

SEQ ID NO: 173828 - DNA, 1668 bp, Artificial Sequence
  derived and/or modified sequence
atggagctcgagaagtctggagcactgctcgagtccggaacctacgaggataactactatggcacccctaaaccgccggctgagcctgctcctctactgcttaacgtgaccgatcagattctccctggcgcgacaccatccgccgaaggtaaaagaaagagaaataagtctgtttctaacatggagaaggccagtatagagccacctgaagaagaggaggaggaacgtcccgtcgtcaacggaaatggcgtagtggttacgcccgagagtagtgagcatgaggacaagtccgccggggccagcggtgaaatgccgtcacagccgtacccagcgccagtctattcacaaccagaagagcttaaagagcagatggatgacactaagccaactaaacctgaagataatgaggaacctgatccgctccctgacaactgggaaatggcctatacagagaaaggcgaggtgtacttcattgatcataataccaaaaccacaagttggctcgaccccagacttgcgaagaaagcgaaaccgcccgaagagtgcaaagaaaatgaactgccctacgggtgggagaagatcgacgaccccatatatggaacatattatgtggaccacatcaatagaaggacacaatttgagaaccctgtgctggaggccaaacggaagctgcagcaacataatatgcctcataccgagctagggaccaagccattacaggccccagggttccgcgaaaaacccttgtttacgcgagacgcctcacagctgaagggcacgttcctttcaaccactctgaagaaaagcaacatgggattcggattcacgatcatcggaggtgatgagccagatgaatttttgcaggtcaaaagcgtgatccctgatggcccagcagcacaggacgggaaaatggagactggtgatgtgattgtctatattaacgaggtgtgtgtcctgggacacacccacgccgatgtcgtcaagctgttccagagtgtgcccattgggcaaagcgtgaacctggtgctctgtcgtggttatccgctcccattcgatccggaagatcctgctaatagtatggttccgcctctcgccattatggaacgacctccccccgtcatggtcaacggacggcacaactatgagacttatctagaatacatcagtcggacgtcacaatccgtgccggatataacagaccgaccaccacactcacttcactcaatgcccacagacggccaattggatgggacatatccccccccagtgcacgacgataacgttagcatggccagctcaggcgcgactcaggctgagctcatgaccctgactatagtgaagggggcgcagggcttcgggtttaccatcgccgactctcccactggacagagagtgaaacagattctcgatatccagggatgtcctggactgtgcgagggtgacctgatcgtggagatcaaccaacaaaacgtgcaaaatctatcccacacggaagtcgtggatatcctgaaagactgtcccattgggtccgaaacctcgctgataatccatagaggggggaaaaccaatacgggaagtgccatcaaatatgtggggaaaattgttggtagctttaataatattgtgaagatgcagatctccctggagctaaacgaaatcattctctag

SEQ ID NO: 173829 - DNA, 3762 bp, Artificial Sequence
  derived and/or modified sequence
atgtccaagtccctgaaaaaaaagtcgcactggaccagtaaagtccacgagtcagtaattggccggaatccggaaggtcagcttgggttcgaactgaaaggtggcgccgagaacggccagttcccttatctcggagaagtgaaacccgggaaggtagcctatgaaagtggcagtaaactggtgagcgaggagctgttgctagaggtaaacgaaacaccagtggctggactgaccattcgagacgtgctggctgttataaaacactgtaaggacccactgcggttaaaatgtgttaaacaaggtggtattgtggacaaagaccttaggcactaccttaacctgcgcttccagaagggctcagtggaccatgagctacagcagattataagagataacctgtacttacgaactgtgccgtgcacgactcggccacacaaggagggagaagtgccaggcgtcgattacatttttatcaccgttgaggacttcatggagttggaaaaatctggcgctttattggaaagtggcacatacgaggacaattactacggaacacctaaacccccagcagaacccgcccctctactcctgaatgtgacggaccagatcttacctggggcaacacccagtgctgaaggcaagaggaagaggaataaaagcgtgagcaacatggagaaggctagcatcgagccacctgaagaagaggaggaggagcggccagttgtgaatggcaacggcgtggtcgtcacaccggaatcttcggagcatgaagacaaatctgctggcgcaagtggggagatgcctagtcagccgtatcccgcgccggtgtactcccagccagaagagctcaaagagcagatggacgacaccaagcccactaagcctgaggataacgaagagcccgaccccctgccagacaattgggaaatggcctatactgagaagggggaggtttacttcatcgatcacaacacaaaaacaacatcgtggctggacccccgcttggccaagaaagccaagcccccagaggagtgtaaagagaatgagttgccctatggatgggagaaaattgatgacccaatatacggcacctattacgtggatcacatcaaccgacgcacgcaatttgaaaaccctgtgctggaggcaaaacggaaactgcagcagcataatatgccccacacagagctgggtactaagccactccaagctcctggttttagggaaaagccgctgttcacgcgggatgcctcgcaactcaagggcaccttcttatcaacaaccctgaaaaagtcaaatatggggtttggatttaccatcatcggcggcgatgagcccgatgaatttctgcaggtgaaatccgtgatccctgacggacctgccgcccaagacggtaagatggaaaccggtgatgttatagtttatattaatgaggtctgcgttctggggcacacgcacgccgatgttgtcaaattatttcaatccgtccccattggccagagtgtgaacctggtattatgcagaggctatcccctgcccttcgatccggaagacccagctaattcaatggtgccacctttagccatcatggagcgaccgccccctgtcatggtcaacggcaggcacaactacgagacttaccttgagtatatcagcaggacaagtcagtcggtgcctgatattactgacaggccaccccactctcttcactctatgccaaccgacggccagctggacggaacctacccgccacccgtgcatgatgataatgtgtccatggcttcgtcaggggcgacgcaggctgaattgatgactctgactattgtaaagggtgcccaaggcttcggtttcacaatagcggacagccccactggtcaacgggtgaagcagatcttggacatccagggatgcccagggctgtgtgagggcgatctcattgtggaaatcaaccagcagaatgttcagaatctgtcacataccgaagttgtcgacatcttaaaggactgtcccataggaagtgaaacaagtctaatcatacaccggggagggttttttagtccttggaagacccccaaaccaatcatggacaggtgggagaatcaagggtcacctcagacctccctctctgcacctgccatcccccagaatttgccttttccaccggctctgcataggtcaagctttccagactctacagaggctttcgatccacgaaaacctgacccatatgagctgtacgagaaaagtagggcaatttacgagagcagacagcaggttccacctaggacctcgtttcgtatggacagcagcggacccgactataaggagctggacgttcacctgcgtcgcatggaatctgggtttggcttccgcattcttggcggggatgagcctggacaacccatacttattggagccgtgatcgccatgggttctgccgatcgagatgggcgtctgcatcctggggacgagttggtgtacgtggacggcattcccgtggccggcaaaactcaccggtacgtcattgacctaatgcaccacgccgcccgaaacggccaagtgaatttgactgtaaggaggaaagttttatgcgggggagaaccctgcccagaaaatggcagaagccctggatcggtctcaacacatcactcatcaccaaggtcagattacgctacttacaccaattctaaccacgcggccccaagtagcaacgcctccccacccgagggtttcgcctctcacagcctccaaacttctgatgtggtgattcatcggaaggagaacgaaggattcggtttcgtgatcatttcttcattaaatcgccctgaatcaggctccacaatcaccgtgccacataaaatcgggcgaattattgatggatcgccggccgatcgctgcgcaaagctgaaagtgggcgatcggatactggctgtaaatgggcaatccatcatcaacatgccacacgctgacattgtgaaactgatcaaagatgcagggctgtctgtgacgctcaggataatcccccaagaggagttaaacagtcctacaagtgccccgtctagcgagaaacagtcaccaatggcccaacagtcgcctctcgcccagcagtcccctctcgctcagccgagccccgctacccctaacagccccattgcccagccggctcctccacagcccctccagctgcagggccatgagaatagctatcgcagtgaagtaaaggcccgacaagacgtgaaacccgacatccgacagccaccttttaccgattatcgccagccgccgctggattatcgccaaccccccggaggtgattatcagcagcctccacccctggactatcgccagccccccctgcttgactaccggcagcactctccagacacccggcaatacccactgagcgactaccgccaaccccaggacttcgactacttcacagtggatatggaaaagggggccaagggattcggcttctctatacgcggcgggagggaatacaagatggatctgtatgtgctgcgtctcgctgaagacggcccagccattcggaacggtaggatgcgggtcggcgatcaaattattgaaattaacggcgagtcgaccagagatatgactcacgcgcgcgctatcgagctgatcaaatccggcggccgaagagttcggttactccttaaaagaggtaccggccaggtacccgaatacgacccgcccgctcctgcacaggccgtcctgttgcggttccgtctgaccgcgttctag

SEQ ID NO: 173830 - DNA, 4368 bp, Artificial Sequence
  derived and/or modified sequence
atgagcaagagcctgaagaagaagagccactggaccagcaaggtgcatgagagcgtcatcggcaggaaccctgagggccagctgggctttgagctgaagggcggcgcagaaaatggccagttcccctacctgggggaggtgaagccaggcaaggtggcctatgagagcggcagcaagctggtgtctgaggagctgctgctggaggtgaatgagacccctgtggccggcctgaccatcagagatgtgctggccgtcatcaagcactgcaaggaccccctgcggctgaagtgtgtgaagcagggcggcatcgtggacaaggacctgcggcactacctgaacctgcgcttccagaagggctctgtggaccacgagctgcagcagatcatccgggacaacctgtacctgaggacagtgccctgcaccacccggccccacaaggagggggaggtgcctggggtggactacatcttcatcaccgtggaggacttcatggagctggagaagagcggggccctgctggagagcggcacctatgaggacaactactacggcacccccaagcccccagctgagcccgcccccctgctgctgaatgtgacagaccagatcctgcccggggccacccccagcgctgagggcaagaggaagaggaacaagtctgtgagcaacatggagaaggccagcattgagcccccagaggaggaggaggaggagaggcctgtggtgaatggaaatggagtggtggtgaccccagagagcagcgagcacgaggacaagtctgctggggccagcggggagatgcccagccagccctacccagcccctgtgtacagccagcctgaggagctgaaggagcagatggatgacaccaagcccaccaagccagaggacaatgaggagccagaccccctgcctgacaactgggagatggcctacacagagaagggggaggtgtacttcatcgaccacaacaccaagaccacctcctggctggacccccggctggccaagaaggccaagcccccagaggagtgcaaggaaaatgagctgccctacggctgggagaagattgatgaccccatctacggcacctactacgtggaccacatcaacagaaggacccagtttgaaaatcctgtgctggaggccaagaggaagctgcagcagcacaacatgccccacacagagctgggcaccaagcccctgcaggcccctggcttccgggagaagcccctcttcaccagagatgccagccagctgaagggcaccttcctgagcaccaccctgaagaagagcaacatgggcttcggcttcaccatcattggaggagatgagccagatgagttcctgcaggtgaagagcgtcatcccagatggccctgctgcccaggacggcaagatggagactggagatgtgattgtgtacatcaatgaggtgtgtgtgctgggccacacccatgctgatgtggtgaagctgttccagagcgtgcccatcggccagagcgtgaacctggtgctgtgccggggctaccccctgccctttgatcctgaagatcctgccaacagcatggtgccccccctggccatcatggagaggcctcctcctgtgatggtgaatggccgccacaactatgagacctacctggagtacatcagcaggaccagccagagcgtgcctgacatcacagacaggcctccccacagcctgcacagcatgcccacagatggccagctggatggcacctacccacctcctgtgcatgatgacaacgtgtccatggccagcagcggggccacccaggccgagctgatgaccctgaccatcgtgaagggggcccagggcttcggcttcaccatcgctgacagccccaccggccagagggtgaagcagatcctggacatccagggctgccccggcctgtgtgagggggacctgattgtggagatcaaccagcagaatgtgcagaacctgagccacacagaggtggtggacatcctgaaggactgccccatcggcagcgagaccagcctcatcatccaccggggcggcttcttcagcccctggaagacccccaagcccatcatggaccgctgggagaaccagggcagcccccagaccagcctgagcgccccagccatcccccagaacctgcccttccccccagccctgcacaggagcagcttcccagacagcacagaggcctttgaccccaggaagccagacccctatgagctgtatgagaagagccgggccatctatgagagccggcagcaggtgccccccaggaccagcttcaggatggacagcagcggccctgactacaaggagctggatgtgcacctgcggaggatggagagcggcttcggcttccgcatcctgggcggagatgagcccggccagcccatcctgattggagctgtgattgccatgggcagcgctgacagagatggccgcctgcaccctggagatgagctggtgtatgtggatggcatccctgtggccggcaagacccaccgctacgtgattgacctgatgcaccacgccgccagaaatggccaggtgaacctgactgtgcggaggaaggtgctgtgtggcggggagccctgcccagaaaatggccgcagccctggctctgtgtccacccaccacagcagccccaggagtgactatgccacctacaccaacagcaaccacgccgcccccagcagcaatgccagccccccagagggctttgccagccacagcctgcagaccagtgatgtggtgatccacaggaaagaaaatgaaggatttggatttgtgatcatcagcagcctgaacagacctgagagcggcagcaccatcaccgtgccccacaagattggccgcatcattgatggcagccctgctgacagatgtgccaagctgaaggtgggggaccgcatcctggccgtgaatggccagagcatcatcaacatgcctcatgctgacatcgtgaagctgatcaaggatgctggcctgtctgtgaccctgcgcatcatcccccaggaggagctgaacagccccaccagcgcccccagcagcgagaagcagagccccatggcccagcagagccccctggcccagcagagccccctggcccagcccagccctgccacccccaacagccccatcgcccagcctgccccaccccagcccctgcagctgcagggccacgagaacagctacagaagtgaggtgaaggcccggcaggatgtgaagccagacatccggcagccccccttcacagactaccggcagccccccctggactaccggcagcccccaggaggagactaccagcagcccccacccctggactaccggcagccccccctgctggactaccggcagcacagcccagacacccggcagtaccccctgagtgactaccggcagccccaggactttgactacttcaccgtggacatggagaagggggccaagggcttcggcttcagcatccggggcggccgggagtacaagatggacctgtatgtgctgcggctggccgaggatggccctgccatcagaaatggaaggatgagggtgggggaccagatcatcgagatcaacggggagagcacccgggacatgacccacgcccgggccatcgagctgatcaagagcggcggcagaagagtgcggctgctgctgaagaggggcaccggccaggtgcctgaatatgatgagcccgccccctggagcagccctgctgctgctgcccctggcctgcctgaggtgggcgtgtccctggatgatggcctggcccccttcagccccagccacccagccccacccagcgaccccagccaccagatcagccctggccccacctgggacatcaagcgggagcatgatgtgaggaagcccaaggagctgagcgcctgtggccagaagaagcagaggctgggggagcagcgggagaggtctgccagcccccagagagctgcccggccccggctggaggaggcccctgggggccagggccggcctgaggccggccgcccagccagcgaggcccgggcccctggcctggccgctgctgatgctgctgatgctgcccgggccggcggcaaggaggcccccagggctgctgctggcagcgagctgtgcagaagagagggccctggagctgccccagcctttgctggccctgggggcggcggcagcggggccctggaggccgagggccgggccggggcccgggccggcccccggcccggcccccggcccccaggaggagccccagccaggaaggctgctgtggcccctggcccctggaaggtgcccggcagtgacaagctgcccagcgtgctgaagccaggggccagcgctgccagcaggtag

SEQ ID NO: 173831 - DNA, 1668 bp, Artificial Sequence
  derived and/or modified sequence
atggagctggagaagagcggggccctgctggagagcggcacctatgaggacaactactacggcacccccaagcccccagctgagcccgcccccctgctgctgaatgtgacagaccagatcctgcccggggccaccccatctgctgagggcaagaggaagaggaacaagtctgtgagcaacatggagaaggccagcattgagcccccagaggaggaggaggaggagaggcctgtggtgaatggaaatggagtggtggtgaccccagagagcagcgagcacgaggacaagtctgctggggccagcggggagatgcccagccagccctacccagcccctgtgtacagccagcctgaggagctgaaggagcagatggatgacaccaagcccaccaagccagaagataatgaggagccagaccccctgcctgacaactgggagatggcctacacagagaagggggaggtgtacttcatcgaccacaacaccaagaccacctcctggctggacccccggctggccaagaaggccaagcccccagaggagtgcaaggaaaatgagctgccctacggctgggagaagattgatgaccccatctacggcacctactacgtggaccacatcaacagaaggacccagtttgagaaccctgtgctggaggccaagaggaagctgcagcagcacaacatgccccacacagagctgggcaccaagcccctgcaggcccctggcttccgggagaagcccctcttcaccagagatgccagccagctgaagggcaccttcctgagcaccaccctgaagaagagcaacatgggcttcggcttcaccatcattggaggagatgagccagatgagttcctgcaggtgaagagcgtcatcccagatggccctgctgcccaggacggcaagatggagactggagatgtgattgtgtacatcaatgaggtgtgtgtgctgggccacacccatgctgatgtggtgaagctgttccagagcgtgcccatcggccagagcgtgaacctggtgctgtgccggggctaccccctgccctttgatcctgaggaccctgccaacagcatggtgccccccctggccatcatggagcggcccccacctgtgatggtgaatggccgccacaactatgagacctacctggagtacatcagcaggaccagccagagcgtgcctgacatcacagaccggcccccccacagcctgcacagcatgcccacagatggccagctggatggcacctacccacctcctgtgcatgatgacaacgtgtccatggccagcagcggggccacccaggccgagctgatgaccctgaccatcgtgaagggggcccagggcttcggcttcaccatcgctgacagccccaccggccagagggtgaagcagatcctggacatccagggctgccccggcctgtgtgagggggacctgattgtggagatcaaccagcagaatgtgcagaacctgagccacacagaggtggtggacatcctgaaggactgccccatcggcagcgagaccagcctcatcatccacagaggaggcaagaccaacacaggcagcgccatcaagtatgtgggcaagatcgtgggcagcttcaacaacatcgtgaagatgcagatcagcctggagctgaatgagatcatcctgtag

SEQ ID NO: 173832 - DNA, 3762 bp, Artificial Sequence
  derived and/or modified sequence
atgagcaagagcctgaagaagaagagccactggaccagcaaggtgcatgagagcgtcatcggcaggaaccctgagggccagctgggctttgagctgaagggcggcgcagaaaatggccagttcccctacctgggggaggtgaagccaggcaaggtggcctatgagagcggcagcaagctggtgtctgaggagctgctgctggaggtgaatgagacccctgtggccggcctgaccatcagagatgtgctggccgtcatcaagcactgcaaggaccccctgcggctgaagtgtgtgaagcagggcggcatcgtggacaaggacctgcggcactacctgaacctgcgcttccagaagggctctgtggaccacgagctgcagcagatcatccgggacaacctgtacctgaggacagtgccctgcaccacccggccccacaaggagggggaggtgcctggggtggactacatcttcatcaccgtggaggacttcatggagctggagaagagcggggccctgctggagagcggcacctatgaggacaactactacggcacccccaagcccccagctgagcccgcccccctgctgctgaatgtgacagaccagatcctgcccggggccacccccagcgctgagggcaagaggaagaggaacaagtctgtgagcaacatggagaaggccagcattgagcccccagaggaggaggaggaggagaggcctgtggtgaatggaaatggagtggtggtgaccccagagagcagcgagcacgaggacaagtctgctggggccagcggggagatgcccagccagccctacccagcccctgtgtacagccagcctgaggagctgaaggagcagatggatgacaccaagcccaccaagccagaggacaatgaggagccagaccccctgcctgacaactgggagatggcctacacagagaagggggaggtgtacttcatcgaccacaacaccaagaccacctcctggctggacccccggctggccaagaaggccaagcccccagaggagtgcaaggaaaatgagctgccctacggctgggagaagattgatgaccccatctacggcacctactacgtggaccacatcaacagaaggacccagtttgaaaatcctgtgctggaggccaagaggaagctgcagcagcacaacatgccccacacagagctgggcaccaagcccctgcaggcccctggcttccgggagaagcccctcttcaccagagatgccagccagctgaagggcaccttcctgagcaccaccctgaagaagagcaacatgggcttcggcttcaccatcattggaggagatgagccagatgagttcctgcaggtgaagagcgtcatcccagatggccctgctgcccaggacggcaagatggagactggagatgtgattgtgtacatcaatgaggtgtgtgtgctgggccacacccatgctgatgtggtgaagctgttccagagcgtgcccatcggccagagcgtgaacctggtgctgtgccggggctaccccctgccctttgatcctgaagatcctgccaacagcatggtgccccccctggccatcatggagaggcctcctcctgtgatggtgaatggccgccacaactatgagacctacctggagtacatcagcaggaccagccagagcgtgcctgacatcacagacaggcctccccacagcctgcacagcatgcccacagatggccagctggatggcacctacccacctcctgtgcatgatgacaacgtgtccatggccagcagcggggccacccaggccgagctgatgaccctgaccatcgtgaagggggcccagggcttcggcttcaccatcgctgacagccccaccggccagagggtgaagcagatcctggacatccagggctgccccggcctgtgtgagggggacctgattgtggagatcaaccagcagaatgtgcagaacctgagccacacagaggtggtggacatcctgaaggactgccccatcggcagcgagaccagcctcatcatccaccggggcggcttcttcagcccctggaagacccccaagcccatcatggaccgctgggagaaccagggcagcccccagaccagcctgagcgccccagccatcccccagaacctgcccttccccccagccctgcacaggagcagcttcccagacagcacagaggcctttgaccccaggaagccagacccctatgagctgtatgagaagagccgggccatctatgagagccggcagcaggtgccccccaggaccagcttcaggatggacagcagcggccctgactacaaggagctggatgtgcacctgcggaggatggagagcggcttcggcttccgcatcctgggcggagatgagcccggccagcccatcctgattggagctgtgattgccatgggcagcgctgacagagatggccgcctgcaccctggagatgagctggtgtatgtggatggcatccctgtggccggcaagacccaccgctacgtgattgacctgatgcaccacgccgccagaaatggccaggtgaacctgactgtgcggaggaaggtgctgtgtggcggggagccctgcccagaaaatggccgcagccctggctctgtgtccacccaccacagcagccccaggagtgactatgccacctacaccaacagcaaccacgccgcccccagcagcaatgccagccccccagagggctttgccagccacagcctgcagaccagtgatgtggtgatccacaggaaagaaaatgaaggatttggatttgtgatcatcagcagcctgaacagacctgagagcggcagcaccatcaccgtgccccacaagattggccgcatcattgatggcagccctgctgacagatgtgccaagctgaaggtgggggaccgcatcctggccgtgaatggccagagcatcatcaacatgcctcatgctgacatcgtgaagctgatcaaggatgctggcctgtctgtgaccctgcgcatcatcccccaggaggagctgaacagccccaccagcgcccccagcagcgagaagcagagccccatggcccagcagagccccctggcccagcagagccccctggcccagcccagccctgccacccccaacagccccatcgcccagcctgccccaccccagcccctgcagctgcagggccacgagaacagctacagaagtgaggtgaaggcccggcaggatgtgaagccagacatccggcagccccccttcacagactaccggcagccccccctggactaccggcagcccccaggaggagactaccagcagcccccacccctggactaccggcagccccccctgctggactaccggcagcacagcccagacacccggcagtaccccctgagtgactaccggcagccccaggactttgactacttcaccgtggacatggagaagggggccaagggcttcggcttcagcatccggggcggccgggagtacaagatggacctgtatgtgctgcggctggccgaggatggccctgccatcagaaatggaaggatgagggtgggggaccagatcatcgagatcaacggggagagcacccgggacatgacccacgcccgggccatcgagctgatcaagagcggcggcagaagagtgcggctgctgctgaagaggggcaccggccaggtgcctgaatatgaccccccagccccagcccaggccgtgctgctgcgcttccggctgacagccttctag

SEQ ID NO: 173833 - DNA, 6861 bp, Artificial Sequence
  derived and/or modified sequence
agccttgagtgtcattcaagggacagcacaacctcatccaagctctcctacctctgcccagccgtccctctcatcctccccattcctcgtccacactccatccaaagaagagggaaagcaccgaatagaggggggcgaaggcaaagtctgctgttcttccccctgggcccccttgctcctccatcctcattctctcaccaccagcccccctaaccccaaggagcccaggaactgaggcgactcgccccactgccatgtccaaaagcttgaaaaagaaaagccactggactagcaaagtccatgagagtgtcattggcaggaacccggagggccagctgggctttgaactgaaggggggcgccgagaatggacagttcccctacctgggggaggtgaagcccggcaaggtggcctatgagagcggcagcaaattggtgtcggaggagctgctgctggaggtgaacgagacccccgtggcggggctcaccatcagggacgtgctggccgtgatcaaacactgcaaggaccccctccggctcaagtgtgtcaagcaaggaggaattgttgataaagaccttcgtcactacctcaacttacgatttcaaaagggttctgtggaccatgagcttcagcaaatcattcgtgacaacctctacctccgcacggtgccatgcaccacaaggccacataaggagggtgaggtccctggagtggattatattttcatcactgttgaagattttatggaattggagaaaagtggtgctctcctagaaagtgggacttatgaagacaattactacggtaccccaaagccgccagcagaaccagcaccattattgttaaatgtaacagaccagatacttccaggagccactccaagtgctgaaggaaaacggaagaggaataaatcagtgagcaacatggagaaagccagtatagagcctcctgaggaggaagaggaagagaggcctgtggtcaatggaaatggagtagtagtaacaccagaatccagtgaacatgaagacaaaagtgcaggtgcctcaggggagatgccctcccagccttatcctgcaccagtgtacagtcagcctgaggagctgaaggagcagatggatgacacaaagccaactaaacctgaagacaatgaggaaccagacccattgcctgataactgggaaatggcctatacagagaagggcgaagtctacttcattgaccataacacaaagacaacatcatggctggatccacgacttgcgaaaaaggctaaacctccagaagagtgcaaagaaaatgagcttccatatggctgggaaaaaatcgatgatcccatttatggcacttattatgttgaccacataaatagaagaacacagtttgaaaatcctgtcctggaagcaaaaaggaagctacagcaacataacatgccccacacagaacttggaacaaagcccctgcaggccccaggtttccgagaaaaaccactcttcacccgggatgcatcccagttgaagggaacattcctcagcaccaccctaaaaaagagcaacatgggctttggatttaccatcattggtggagacgagcctgatgagtttctgcaggtgaaaagtgtgattccggatgggcctgcagcacaggatggaaaaatggaaacaggtgatgtcattgtctatattaatgaagtttgtgtccttggacacactcatgcagatgttgtcaaacttttccagtctgttcctattggtcagagtgtcaacctggtgttgtgtcgtggctaccctttgccctttgatcctgaagaccctgctaacagcatggtgccaccccttgcaataatggagaggccacctccagtgatggtcaatggaagacacaactatgaaacatatttggagtacatttctcggacctcacagtcagttccagatataacagatcggccgcctcattctctgcactccatgccaactgatggtcagctagacggcacgtatccaccgcccgtccatgatgacaatgtgtctatggcttcatctggggccacccaagctgaacttatgaccttaaccattgtgaaaggtgcccagggcttcggcttcactattgccgacagtcctacaggacagcgggtgaaacaaatacttgacattcagggatgccctggcctgtgtgaaggcgacctcattgttgagatcaaccagcagaatgtacagaacctgagccatacagaagtagtggatatacttaaggactgtcccattggaagtgaaacttctttgattatccatcgaggaggtttcttttctccatggaaaactccaaagcctataatggaccgatgggagaatcaaggcagtcctcaaacgagtttatctgctccggccataccgcagaacctgcccttcccacctgcccttcacaggagctcctttcctgactcaacagaggcctttgacccacggaagcctgatccatatgagctctacgagaaatctagggccatttatgaaagtaggcaacaagtgccacccaggaccagttttcgaatggattcctctggtccagattataaggaattggatgttcatcttcggaggatggagtctggatttggcttcagaatcctcgggggagatgagcctggacagcctattttgattggagctgtcattgccatgggctcagccgacagagatggccgccttcacccaggagatgagcttgtgtatgttgatgggattccagtagccggcaaaacccaccgctatgtcatcgacctcatgcaccacgcagcccgcaatgggcaggtcaacctcactgtgagaagaaaggtgctatgtggaggggagccctgcccagagaacgggagaagtccaggctctgtatccacccaccacagctctccacgcagtgactacgcaacctacaccaacagcaaccacgctgcccccagtagcaatgcctctccccctgaaggcttcgcctcccacagcctgcagaccagtgatgtggtcattcaccgcaaagagaatgagggcttcggctttgtcatcatcagctccctgaacaggcctgagtctggatccactataactgtgccccataaaatcggacgcatcattgatgggagtcctgcagatcgctgtgcaaaactaaaagtgggagaccggatcctagcagtgaatggccagtctatcatcaacatgcctcacgctgacatcgtgaagctcatcaaggatgcaggtcttagtgtcacccttcgcatcattcctcaggaggagctcaacagccccacctcggcacccagctcagagaagcagagtcccatggcgcagcagagtcccctggcacagcagagtcccctggcccagccaagcccagccacccccaacagccccatcgcccagccagcaccacctcaaccacttcagctgcaaggacacgaaaatagttacaggtcggaagtgaaagcaaggcaagatgtgaaaccagacatccgacagcctccattcacagactacaggcagcccccgctggattacaggcaacccccaggaggggactaccagcagcccccacccttggactacaggcagcctcccctactggactacaggcagcactcccccgacaccaggcagtaccctctgtcggactacagacaaccccaggattttgattatttcactgtggacatggagaaaggagccaaaggatttggattcagcattcgtggaggaagggaatacaaaatggatttgtatgtgttgagactggcagaagatggaccagcaataaggaatgggaggatgagggtaggagatcaaatcattgaaatcaatggggaaagcacaagggacatgacacatgccagagcaatagaactcatcaaatctggaggaagacgagtgaggctgctgctcaagagaggcacgggacaggtcccagaatatgacgaacccgccccctggagttctcccgctgccgccgccccaggtctgccggaagtaggcgtctccctggacgacggcctcgctccattctctccatcacatccagccccaccctccgacccttcccaccagataagcccaggcccaacttgggatatcaaacgggaacacgacgttaggaaaccaaaggagctttcagcctgcggccagaagaagcagcgcctcggggagcagagggagcgctcggcgagtccgcagagggccgcgcggccgaggctcgaggaggcgcccggcggccaggggcggcccgaggccggcaggcccgcctcggaggccagggcgcccgggctcgcggcggcagacgcggcggacgcggcgcgggcgggcgggaaggaggcgccccgtgcggcggcgggctccgagctctgccggcgcgaaggcccgggggctgcgccggcgtttgccggcccgggcggcggcggcagcggcgcgctggaggccgagggcagggcgggtgcgcgcgcgggtccccggccgggcccgcgacccccggggggcgccccggcgcgcaaggccgccgtcgcgccggggccctggaaggtgccgggttctgacaagctgcccagcgtcctcaaacccggcgcctcggccgccagcagatgagccgcgcggccacggccaacccgcccgccccggcgcaggcagttcttcttaggttccgtctcacggcgttttaatttattttcactgtcacacgcatagatccacgaggcaccaaggcctgggagcatcgacgtgaagtcccacgtgtccggtgtgcttgggcggcatcgcatcaacgcgcagacctaaactgatcctaaagcccccggttcccttgtgggggctttggcagctatggaagaaccaaaataacgtgaagaacatcacagagagacagtgcagtgtagctttagtttaagaaaaaaaaatattcctccccactgcatgaaggacttggatgtcatccaaactttatatcaagaaacaggacaaagttaagagcaatcacaaactggaatatcgccttaaaaatcaaactgcacggagcaagctgaaactgagacaagattatatcttttaattgatctaaagcgttgtaaataaattgttctcgacatatctagacaggggttaaagggtttctttgacacattcggaaccgttcacccatgacatgtttccatggctcacccttggcatccatcctcggtgttagcagcagcgttccctgcctcctgcaggatgacttagaaatctagtgagtttcttggtgtgatgccatttttattgccctttctgtgatcaaatcatatttctgtacattttcagtggtagaaaaaaaaggttttaaaaattgtatcctagggaacagtttgccataagtcagaattttgcagtttagctcatagatcttaattggtttttctctaaaatatgaattttataattgaaggaccacaatttgtttaatcaagataggcaacgctgcagttcctttatgaagaggcttttctgtcgtcccaggctagcagagatggatagcttctttgtcagcaatgtgatttcacttattttattgtcttattttaaaccctgtctccatgacttcatttgcactttgacagagcagaggcagagtatttgtcttatatttctcagattataatattaaaaaattacaatcaatttattttcattaaagaacgtgagtctttttagcattcctttctgcttatccttctttccttaccctttgtccttttgtttccattagttttctttcgtcttgtattccttgccactttattttgttagcaacttctagatgtttatcttcatggatctatgattgacctcctagtaaaattctaagtcttgcctttcttccctgctgttttagcatttctttgtaaaatgttagcttcaattaattagccattggtacttactgtagctacacatattaaaaggcaaagtgtttctgaaggcaatttctttttaatatgcccgaatgaatgaggcttcatcctttccatattcttactctttacaggagttcaaatgcaaataagctccacctccctgcacttgtagtctaaaaagtaaaaggggcgatcaggtccatctcaaaggtcacacgtaatagcctccctgggctgatcattccctctccttgtaattgcagtatcctgagtagcagtttaattttcatcaaacatcggagtagtttagttgtttgacaggaggagaataaggctgaaagcctcaagtgaaggatcttgcagcttgtaaaagcaatttccaaaaatgaaacccattcatcgtaaacaaaagcacaaacacttgtagcagtttataatgcttttggtttaatctcaattagtctttctcccctggactagaaatccagtatagtttgccattaatttattgaatctggttttggacaatgcttctgtagtgtagctgcacgtcctggtactgtatcctctgactttattttccatgtattacaaaaggaaaaaaaaattgagattacactggcataaactctagtttgcacagttcacagctactacttgtgcagtaattgctttatgcggctgtaatccataacctgtgaagacagcacatcatctaaatcccattccaaataatatttgtgtagtgttagctgtgaatttaccctgtacagctgtatctctataaatataattccatgtattaatagtcacagaaagactgtaagtgagcaactatttttatgaaacgtaccactatggataaattaacttttacagaaatcttgtttactgtatgatattctaaaacactgtcaaataaaatatatatccaaaaa

SEQ ID NO: 173834 - DNA, 2013 bp, Artificial Sequence
  derived and/or modified sequence
aaaagagctcagcggcagttttgtgttgctgtgtctggcttaaagaggaaaattctagacatccatgttgaaaaatcaaagctcagctgagactacttctatcaagaaaattatttttatctgcgaatgggttggatcagtacaggtggtttgagaagacactgactgaggaccatggaaaggtgggagaggacgtgcggcttctctgcttcctttgaacagagctctaggcaccacaaggccacataaggagggtgaggtccctggagtggattatattttcatcactgttgaagattttatggaattggagaaaagtggtgctctcctagaaagtgggacttatgaagacaattactacggtaccccaaagccgccagcagaaccagcaccattattgttaaatgtaacagaccagatacttccaggagccactccaagtgctgaaggaaaacggaagaggaataaatcagtgagcaacatggagaaagccagtatagagcctcctgaggaggaagaggaagagaggcctgtggtcaatggaaatggagtagtagtaacaccagaatccagtgaacatgaagacaaaagtgcaggtgcctcaggggagatgccctcccagccttatcctgcaccagtgtacagtcagcctgaggagctgaaggagcagatggatgacacaaagccaactaaacctgaagacaatgaggaaccagacccattgcctgataactgggaaatggcctatacagagaagggcgaagtctacttcattgaccataacacaaagacaacatcatggctggatccacgacttgcgaaaaaggctaaacctccagaagagtgcaaagaaaatgagcttccatatggctgggaaaaaatcgatgatcccatttatggcacttattatgttgaccacataaatagaagaacacagtttgaaaatcctgtcctggaagcaaaaaggaagctacagcaacataacatgccccacacagaacttggaacaaagcccctgcaggccccaggtttccgagaaaaaccactcttcacccgggatgcatcccagttgaagggaacattcctcagcaccaccctaaaaaagagcaacatgggctttggatttaccatcattggtggagacgagcctgatgagtttctgcaggtgaaaagtgtgattccggatgggcctgcagcacaggatggaaaaatggaaacaggtgatgtcattgtctatattaatgaagtttgtgtccttggacacactcatgcagatgttgtcaaacttttccagtctgttcctattggtcagagtgtcaacctggtgttgtgtcgtggctaccctttgccctttgatcctgaagaccctgctaacagcatggtgccaccccttgcaataatggagaggccacctccagtgatggtcaatggaagacacaactatgaaacatatttggagtacatttctcggacctcacagtcagttccagatataacagatcggccgcctcattctctgcactccatgccaactgatggtcagctagacggcacgtatccaccgcccgtccatgatgacaatgtgtctatggcttcatctggggccacccaagctgaacttatgaccttaaccattgtgaaaggtgcccagggcttcggcttcactattgccgacagtcctacaggacagcgggtgaaacaaatacttgacattcagggatgccctggcctgtgtgaaggcgacctcattgttgagatcaaccagcagaatgtacagaacctgagccatacagaagtagtggatatacttaaggactgtcccattggaagtgaaacttctttgattatccatcgaggaggtaagacaaacactggctcagcaataaaatatgtgggtaaaatagtaggatcatttaataatattgttaaaatgcagatttccttggagttgaatgaaattatactttaaaaaataaagcttaaagagtgagagagaaaaacatgaattaaagg

SEQ ID NO: 173835 - DNA, 3762 bp, Artificial Sequence
  derived and/or modified sequence
atgtccaaaagcttgaaaaagaaaagccactggactagcaaagtccatgagagtgtcattggcaggaacccggagggccagctgggctttgaactgaaggggggcgccgagaatggacagttcccctacctgggggaggtgaagcccggcaaggtggcctatgagagcggcagcaaattggtgtcggaggagctgctgctggaggtgaacgagacccccgtggcggggctcaccatcagggacgtgctggccgtgatcaaacactgcaaggaccccctccggctcaagtgtgtcaagcaaggaggaattgttgataaagaccttcgtcactacctcaacttacgatttcaaaagggttctgtggaccatgagcttcagcaaatcattcgtgacaacctctacctccgcacggtgccatgcaccacaaggccacataaggagggtgaggtccctggagtggattatattttcatcactgttgaagattttatggaattggagaaaagtggtgctctcctagaaagtgggacttatgaagacaattactacggtaccccaaagccgccagcagaaccagcaccattattgttaaatgtaacagaccagatacttccaggagccactccaagtgctgaaggaaaacggaagaggaataaatcagtgagcaacatggagaaagccagtatagagcctcctgaggaggaagaggaagagaggcctgtggtcaatggaaatggagtagtagtaacaccagaatccagtgaacatgaagacaaaagtgcaggtgcctcaggggagatgccctcccagccttatcctgcaccagtgtacagtcagcctgaggagctgaaggagcagatggatgacacaaagccaactaaacctgaagacaatgaggaaccagacccattgcctgataactgggaaatggcctatacagagaagggcgaagtctacttcattgaccataacacaaagacaacatcatggctggatccacgacttgcgaaaaaggctaaacctccagaagagtgcaaagaaaatgagcttccatatggctgggaaaaaatcgatgatcccatttatggcacttattatgttgaccacataaatagaagaacacagtttgaaaatcctgtcctggaagcaaaaaggaagctacagcaacataacatgccccacacagaacttggaacaaagcccctgcaggccccaggtttccgagaaaaaccactcttcacccgggatgcatcccagttgaagggaacattcctcagcaccaccctaaaaaagagcaacatgggctttggatttaccatcattggtggagacgagcctgatgagtttctgcaggtgaaaagtgtgattccggatgggcctgcagcacaggatggaaaaatggaaacaggtgatgtcattgtctatattaatgaagtttgtgtccttggacacactcatgcagatgttgtcaaacttttccagtctgttcctattggtcagagtgtcaacctggtgttgtgtcgtggctaccctttgccctttgatcctgaagaccctgctaacagcatggtgccaccccttgcaataatggagaggccacctccagtgatggtcaatggaagacacaactatgaaacatatttggagtacatttctcggacctcacagtcagttccagatataacagatcggccgcctcattctctgcactccatgccaactgatggtcagctagacggcacgtatccaccgcccgtccatgatgacaatgtgtctatggcttcatctggggccacccaagctgaacttatgaccttaaccattgtgaaaggtgcccagggcttcggcttcactattgccgacagtcctacaggacagcgggtgaaacaaatacttgacattcagggatgccctggcctgtgtgaaggcgacctcattgttgagatcaaccagcagaatgtacagaacctgagccatacagaagtagtggatatacttaaggactgtcccattggaagtgaaacttctttgattatccatcgaggaggtttcttttctccatggaaaactccaaagcctataatggaccgatgggagaatcaaggcagtcctcaaacgagtttatctgctccggccataccgcagaacctgcccttcccacctgcccttcacaggagctcctttcctgactcaacagaggcctttgacccacggaagcctgatccatatgagctctacgagaaatctagggccatttatgaaagtaggcaacaagtgccacccaggaccagttttcgaatggattcctctggtccagattataaggaattggatgttcatcttcggaggatggagtctggatttggcttcagaatcctcgggggagatgagcctggacagcctattttgattggagctgtcattgccatgggctcagccgacagagatggccgccttcacccaggagatgagcttgtgtatgttgatgggattccagtagccggcaaaacccaccgctatgtcatcgacctcatgcaccacgcagcccgcaatgggcaggtcaacctcactgtgagaagaaaggtgctatgtggaggggagccctgcccagagaacgggagaagtccaggctctgtatccacccaccacagctctccacgcagtgactacgcaacctacaccaacagcaaccacgctgcccccagtagcaatgcctctccccctgaaggcttcgcctcccacagcctgcagaccagtgatgtggtcattcaccgcaaagagaatgagggcttcggctttgtcatcatcagctccctgaacaggcctgagtctggatccactataactgtgccccataaaatcggacgcatcattgatgggagtcctgcagatcgctgtgcaaaactaaaagtgggagaccggatcctagcagtgaatggccagtctatcatcaacatgcctcacgctgacatcgtgaagctcatcaaggatgcaggtcttagtgtcacccttcgcatcattcctcaggaggagctcaacagccccacctcggcacccagctcagagaagcagagtcccatggcgcagcagagtcccctggcacagcagagtcccctggcccagccaagcccagccacccccaacagccccatcgcccagccagcaccacctcaaccacttcagctgcaaggacacgaaaatagttacaggtcggaagtgaaagcaaggcaagatgtgaaaccagacatccgacagcctccattcacagactacaggcagcccccgctggattacaggcaacccccaggaggggactaccagcagcccccacccttggactacaggcagcctcccctactggactacaggcagcactcccccgacaccaggcagtaccctctgtcggactacagacaaccccaggattttgattatttcactgtggacatggagaaaggagccaaaggatttggattcagcattcgtggaggaagggaatacaaaatggatttgtatgtgttgagactggcagaagatggaccagcaataaggaatgggaggatgagggtaggagatcaaatcattgaaatcaatggggaaagcacaagggacatgacacatgccagagcaatagaactcatcaaatctggaggaagacgagtgaggctgctgctcaagagaggcacgggacaggtcccagaatatgacccgcccgccccggcgcaggcagttcttcttaggttccgtctcacggcgttttaa

SEQ ID NO: 173836 - DNA, 4368 bp, Artificial Sequence
  derived and/or modified sequence
atgagcaagagcctgaagaagaagagccactggaccagcaaggtgcatgaatccgttattggaaggaatcctgaggggcaacttgggtttgaattgaaaggaggagcagagaacggccagttcccttatctgggtgaggtcaaacccgggaaggtcgcttacgagtccggttcaaagctggtgtctgaagagttgttactggaggtgaatgagacacctgtggccggcttaacaattcgagacgtattagctgtaattaaacactgcaaagacccactgaggctgaagtgcgtcaaacaggggggaatagttgacaaggatttgcgtcactatctgaacttacgtttccagaagggctccgtggatcatgagctgcaacagataatcagggataatctctatcttcgcaccgtaccatgtaccactcgcccccataaagagggagaggttcctggtgtggactacatcttcataacagtagaggacttcatggaattggagaaatccggagctctgctggaaagtggaacttatgaagacaattactatggcacgccaaagcctcctgccgagcccgctccattactgttaaatgtaacggatcaaatcctgcccggcgcaactccctctgcagaggggaaacgtaaaagaaataaaagtgtatcaaacatggaaaaggcctcaatagagccacctgaagaggaggaggaagagcgccccgtcgtgaacgggaacggtgtcgtggtgactcctgaatcttctgagcatgaagacaaatcggcaggcgctagtggcgaaatgccatcgcagccttaccctgccccagtgtattctcagcctgaggaactgaaggagcagatggacgataccaagccgaccaagccagaggacaatgaagagcccgacccactgcctgacaattgggaaatggcgtacactgagaagggagaggtatacttcatcgaccataataccaagacgaccagctggctggatccaagattagctaagaaagccaagccgcctgaagagtgcaaggaaaacgaactgccttacggctgggagaaaatagatgatcccatttatggcacatactatgtggaccatattaatcggcgaacccagttcgagaacccggtgctcgaggcaaagcgcaaactgcagcagcacaacatgccccacacggagctaggaactaaacctctgcaggctccaggatttagggagaaaccactattcacaagagatgcttcacaactcaaggggacctttctctctaccacactgaaaaagtctaatatgggcttcggctttactataatcggcggtgacgagccagacgagtttctgcaggtcaagagcgtgattcctgatggaccagcggcccaggatggtaagatggagaccggagacgtaatcgtctacattaacgaggtttgtgtcctcggacatacacacgctgatgttgtaaagctctttcagtccgtcccaatcggtcaaagtgtgaacctggtgctctgcaggggatatcccctgccgtttgacccggaagatccagcgaacagtatggttcccccgctcgcaatcatggagcgtcccccacccgtgatggtgaacggcaggcacaattatgaaacctatctggagtatattagccggacctctcagagtgttcccgacatcactgatagaccaccacactctttacactctatgccaaccgacggccagctcgatgggacttacccacccccagtccacgacgacaatgtgagcatggcctcatcaggagcgactcaagccgagctgatgaccctgacaatcgtaaaaggggcccagggtttcgggtttacaatcgccgacagccctaccgggcaaagagtgaaacagatcctggatattcaggggtgtccagggctgtgcgagggggacctgattgtcgaaataaaccagcagaacgtgcagaaccttagccatactgaggtcgtcgacattcttaaggattgtcccattggctctgagacttccctcattatccaccgtgggggcttcttcagcccttggaagacgccaaaacctataatggatcgctgggagaaccagggctctccgcagacgagcctgagcgctcctgccattccacagaacttaccctttcctcctgcgctgcataggtcatccttcccagacagtaccgaggctttcgatccacgtaagcccgacccttatgagctatatgagaagagtagggccatctacgagtccagacagcaggtgccaccccggacttccttccgaatggattctagtgggcccgattataaagagttggacgtacaccttaggcgaatggagtccggctttggcttcaggattttaggtggtgacgagcctggtcagcccattttgattggggcagtgatcgccatgggttctgcagatagagatggccggttgcatcctggcgatgaactggtgtatgtggatggtattccagtggccgggaaaacacaccggtacgtgatcgaccttatgcatcacgccgcgcgcaatggacaagtgaatctgaccgtgagacggaaggttctctgcggcggtgagccctgtccggaaaatggacggagtcccgggtccgtgtccacacatcacagctctccgagaagcgactatgctacctataccaactctaatcacgcagccccaagctccaatgcgtctccccctgagggatttgcctcacatagtctgcagacctctgatgtagtgatccacagaaaggaaaatgagggatttggtttcgtaattatttccagcttgaaccggcctgagagtggtagcaccatcaccgtgcctcacaagattggtcgtataattgatgggagtcccgccgacagatgcgccaagttgaaagtcggagatcggatcctagcagtgaatggccaatctataattaatatgcctcacgcagacatcgtaaagttgattaaagatgcaggcctatccgtcactctgcgaatcataccacaggaggaactaaatagtccaacaagtgctccctcgtctgagaaacagtcgcctatggctcaacagagccccctggcccagcaaagccccctggctcagcccagtcctgcaacccccaactctccaatcgcacaacccgcaccccctcagccgctgcagcttcaggggcatgagaacagctacagatcagaagtgaaggcccggcaagatgttaagccagacatcagacaaccccctttcaccgattacaggcagcccccattagactataggcaaccccccggcggtgattatcagcagccccctcctctggattacagacagcctccattactggattaccgacaacactcacccgacaccagacagtatcctctctccgactacagacagccgcaggattttgactacttcactgttgatatggagaaaggggccaagggctttggctttagtatacgcggcggccgcgagtataagatggacttgtatgtcctgagactggccgaggacggaccggcgataagaaatggaaggatgagggtgggagatcaaataatcgagatcaacggtgagagcacacgggatatgactcatgctcgcgctatcgaattgattaagtccggagggcgtcgggtgcggctattgttgaaaagaggtaccggccaggtccccgaatacgatgagccagccccatggtctagccccgcggctgccgctccaggcctgcccgaagtgggcgtttccctcgatgatgggctggctccattttctccttcccacccagccccccccagtgacccatctcatcagatctcgccagggcccacatgggacattaaacgcgagcacgatgtcaggaagccaaaagagttgtccgcttgtggccagaaaaaacagagactgggagaacagcgcgaaaggtctgcaagcccccagagggccgcaagacccaggcttgaagaggcgccagggggtcaggggagacccgaagccggtaggccagcaagtgaggcaagggccccaggactggctgctgctgacgcagctgacgccgcaagggctggaggcaaagaggctccccgcgctgccgcaggatccgagctgtgccgacgcgaaggcccaggcgcagccccagccttcgcaggccccgggggcggtggttcaggggccctggaggctgagggacgcgccggagctcgggctggtcctcggcctgggccccgacctcccggtggtgctcccgcccgtaaggccgcagtggcccctggaccctggaaggttcctgggtccgacaagctgcccagtgtactgaagccaggagcctctgccgcgtcaaggtag

SEQ ID NO: 173837 - DNA, 1668 bp, Artificial Sequence
  derived and/or modified sequence
atggagctggagaagagcggcgccctgctggagagcggcacctacgaagataattattatgggacaccaaagccccccgcagaaccagcccccctcctgcttaacgtaacagatcagatcttgccaggcgcaaccccttccgcagaaggcaaacggaagcggaacaaaagcgtgagtaatatggagaaagcctctatcgagcctccggaggaggaagaagaggagaggccggtcgtgaacggaaacggggtggtggttacccctgagtcctctgagcatgaggataagtccgccggtgcaagcggcgagatgccttcccagccctaccccgccccagtgtacagccaaccagaagagttgaaggagcagatggacgacacaaagcccaccaaaccggaggacaatgaagagcctgaccccctccccgacaactgggagatggcttacaccgagaagggtgaagtttacttcatcgaccacaacaccaaaaccacttcttggcttgacccccgcctggctaaaaaagcaaagccaccagaagaatgcaaggagaacgaacttccctatggctgggaaaagatcgacgacccaatctacggaacttattacgttgatcacattaacagaaggacacagtttgagaaccctgtgctggaagctaagaggaagctgcagcaacataatatgccacacacagagttgggaactaagccattgcaagctccgggctttagggaaaaacccctgtttaccagagacgccagtcagctcaagggcacatttctcagcaccacacttaagaagtctaatatggggttcgggttcacaatcataggcggcgacgagccagacgagtttctgcaggtaaaatcagtaatcccagatggtccagccgcacaggacggcaagatggagaccggcgatgtgattgtgtacattaacgaagtgtgtgttctcggtcacacccacgctgacgtcgtcaagttattccagtcggtgcctattggtcagagtgtgaacttagtcctttgcaggggctacccattaccatttgaccccgaagaccccgctaactccatggtacctcccctcgctataatggaacgccccccacctgtgatggtgaacgggagacacaattacgaaacatatctggagtacatttcacggaccagtcagtctgtcccagacataactgatagacccccccatagcctccacagcatgcctactgatggccagctggacggtacttatcccccccccgtacacgatgacaatgtgtccatggcatcttccggggccacccaggctgaactcatgaccctcaccattgtgaagggcgcccaggggtttgggttcaccatagccgactcccctactggtcagagggtaaagcagatattggatatccagggttgcccaggactgtgtgaaggggacctcatcgtagagatcaaccagcagaatgtgcagaatctgtcccataccgaagttgtggatattcttaaggactgtcctattggttcagagaccagtctgatcatccatcgggggggtaaaactaacacgggttccgccattaaatatgtggggaaaatcgtaggttcttttaacaatatcgtgaagatgcagatttcccttgagctgaacgaaataatactgtag

SEQ ID NO: 173838 - DNA, 3762 bp, Artificial Sequence
  derived and/or modified sequence
atgagcaagagcctgaagaagaagagccactggaccagcaaggtgcacgagagcgtcattgggaggaatccagagggccaactgggatttgagctcaagggaggcgcggagaatggtcaatttccctacttgggcgaggtgaagcccgggaaagtcgcctacgagtcaggatctaagctggtttccgaggagctgcttcttgaggtgaacgagacacctgtggctggactgacgataagggatgtgctggccgtgattaagcattgtaaagatccattacgccttaaatgtgtcaagcaaggtggcattgttgacaaggaccttcgccattacctcaacctcaggttccaaaagggcagcgtagatcatgaacttcaacagattattcgtgacaacctgtatctgcgtaccgtcccctgtacaactcggccacacaaggaaggggaagtcccaggagttgactatattttcattaccgtcgaagatttcatggaattagagaaaagcggagccttactggagtccggcacctatgaagataactactatggaacacctaagcctcccgcagagcccgctcctctcttgctcaatgtgacggatcagattttacctggcgcaaccccttctgcagaaggcaaacggaaacggaacaagagtgtgtcaaatatggaaaaagcaagtatcgagccaccagaagaagaggaagaggagcggcctgtcgtaaatgggaacggagtggtggttactccagagagcagtgagcacgaagacaaaagtgccggcgcttctggtgaaatgccaagccaaccataccctgcacctgtgtacagccaaccagaagaattaaaagaacagatggacgatacgaaacctactaaacccgaagacaatgaggagcctgacccgttacccgataattgggaaatggcatatacagaaaaaggggaagtatactttatagaccacaacacaaaaaccacttcctggctggaccctagactcgcaaagaaggccaagccaccagaagagtgcaaggagaatgagctgccctacggttgggagaaaattgatgatcctatctatgggacatactacgtagatcatatcaacaggcgaacacagtttgaaaacccagtgcttgaagcaaaaagaaagctgcagcagcacaacatgccccacaccgaactgggtacaaagccactgcaagccccagggttccgtgagaaacccttgtttacacgagacgcttcccagcttaaaggaacctttctcagcacaacactgaagaagagtaatatggggttcggatttaccattattgggggggacgaaccagatgaattcttacaggtcaaaagtgttatcccagatgggccagccgcgcaagacggaaaaatggagacaggggacgtcattgtgtatattaacgaggtctgcgtgctgggacacacccacgcggacgtggtgaaactattccagtctgttccaataggacagagcgttaacctggtgctgtgtcgcggctatcctctcccatttgatccggaagatccagctaactccatggtcccacccctggccatcatggaaagaccacccccggtgatggtgaatggcaggcacaattatgaaacatatctggaatatatctcgagaacaagtcaatccgtgccagatataacagaccggcctcctcacagcttgcacagcatgccaacagacggccaactggatgggacttaccctcctcccgtgcatgacgacaacgtgtctatggcttctagcggggctacccaggctgagctcatgacactcacaatcgtcaagggagcccagggcttcggcttcacgattgctgattcacctaccgggcagcgtgtgaagcagattctggacattcagggctgtcctggcctatgcgagggggatctgattgtcgaaattaatcaacagaatgtgcagaacttatcacacacagaggtcgttgatatcctgaaagattgccccatcggaagtgagacgagcctgattatccaccgtggaggcttcttctctccgtggaagacgcccaagcctataatggatcgctgggagaaccagggtagtccacaaacttcacttagtgcccccgctattccccaaaatctgccttttccgcccgctcttcatcgatctagcttcccggactccactgaagctttcgacccacggaaaccagacccgtatgagttgtacgagaagagcagagccatttatgagtcccgacagcaggttccccctcgcactagttttcggatggacagcagcggaccagactacaaagagctggatgtgcacctgagacggatggagtcaggcttcggctttcgtattttgggaggggatgagcccggccagccaatcttaataggtgccgtcatcgctatgggatccgccgatagagacggccgactccatccaggggacgagctggtatatgtggacggaattcccgtggctggcaaaacacatcgttacgtgatagaccttatgcatcacgccgcgagaaacgggcaggtaaacctgacggttaggcggaaagtgctctgcggtggcgaaccttgccccgagaacggccggtctcccggctcggtttctacccatcattcaagcccccgctcagactacgcgacgtacactaacagtaaccatgccgccccatcctcaaatgcctcacctcccgaaggtttcgcctcccatagcctgcagacaagcgatgtggtgatacaccgtaaggagaacgaaggcttcggatttgtgattatctcgtcccttaatcggcctgagagcggcagcacaatcactgtcccacataagatcggtagaatcattgacggatctccggccgaccgatgcgcaaaactgaaggtaggcgacagaattctggccgtcaacgggcaaagtataatcaatatgcctcatgcagacattgttaagctgattaaggacgctggcctctcggtgactctgagaatcatccctcaagaagagttgaacagtcctacttcagccccatcaagcgaaaagcagagccctatggctcaacagagtccactcgcacagcagtcaccgctggctcagccgtcaccagcaactcccaactcaccaatcgcgcagcctgcacccccgcaacctctgcaactccagggacacgagaactcttacagatcagaggtaaaggcgaggcaggatgttaagccagatatccgacagcccccctttacagactatcgacagcccccgctggattatcgacaaccaccgggaggcgactatcaacagccacccccattggactacagacagccacctctactggactacagacaacactctcccgacactcgtcagtatcctttgagtgattaccgccagccccaggattttgattatttcaccgtggatatggagaagggggctaaaggatttgggtttagtattcgcggtgggcgcgagtataaaatggatctctatgtcctccgtcttgctgaagatggaccggccattaggaatggacgcatgagggtcggcgatcagattattgaaattaatggtgaaagcaccagggacatgacgcacgctagggcgatcgaattgattaaatccggaggtaggagggtgagactgttgctgaagcgtgggacaggacaagtgccagaatatgatccaccagcaccagcccaggccgttttgctgcgcttccgcctcactgcattctag

SEQ ID NO: 173839 - DNA, 4368 bp, Artificial Sequence
  derived and/or modified sequence
atgtccaagtccttgaaaaagaaatcgcactggaccagtaaagttcacgaaagcgtgattggcaggaatcccgaaggccagctcggtttcgaattgaaagggggtgcggaaaatggtcagtttccatacttaggtgaggtaaagcctgggaaagtggcctacgagtccggcagcaaactcgtgagtgaggagttgcttctggaagtgaacgagacccccgtggccggactgacgattcgagatgtgctcgccgtgataaagcattgtaaagaccctttgagacttaagtgcgttaaacaaggtggcatcgtggataaagatctgcggcactacctgaacctgagatttcaaaagggtagcgtagatcacgaactccagcagatcatccgcgacaacttgtatttgcgaactgtaccttgtacaaccaggccccacaaggaaggcgaagttcctggcgtcgactatattttcatcactgtcgaggattttatggagttagagaagtccggcgctctcctggagtctggaacatacgaggacaattactatggtacacctaagcccccagccgagcctgcccctctgctgctgaacgtgaccgatcaaatcttacccggagccaccccaagcgctgaggggaagcgtaagcggaacaagtcagtatccaacatggagaaagcctcaatcgaaccccctgaggaagaagaagaagagagacccgtggtgaacggcaatggcgtggttgtgacccccgagtctagcgagcatgaagacaaaagcgctggggcatcaggagaaatgcccagtcaaccttacccggcaccagtgtattcgcagcccgaggagctaaaggagcagatggatgacacgaagcctacgaagcccgaggataacgaggaacctgacccattgcccgataattgggagatggcgtatacagaaaagggggaggtttacttcattgatcacaataccaagacgacatcatggctggatccgagacttgctaaaaaggccaagcctcctgaagagtgcaaggagaatgagttgccatatggttgggaaaagattgatgatccaatttacggcacatactatgtcgaccacataaatcggcgaacccagttcgaaaaccctgtcctggaagccaaaagaaaattgcagcagcataatatgccacacaccgagctgggcaccaaaccgctccaagcacctgggttcagggagaagcccttatttacacgggatgcctcccagcttaagggaacttttctgtccaccacactcaagaagagcaacatgggctttgggttcactatcatcggaggggacgagcctgatgagttcctccaggtgaaatcggtgattcctgacggtcccgcagcccaggacggtaagatggaaacaggcgacgtgattgtctatatcaacgaggtttgtgtgttgggccacacacatgcagatgtcgttaaactttttcaaagtgtgccaataggccagagcgtcaatctggtcttgtgccggggttatcctctacctttcgatcccgaggaccctgccaatagtatggtgcccccactggctatcatggagcggcctcctcctgtcatggtaaatggcagacacaattacgaaacatacttggaatacataagccggacctctcagtctgtccctgatattactgacagaccaccacattcactccactcaatgccaactgatgggcagctggacggaacgtatcccccacctgttcacgacgataacgtctccatggcatccagcggggctacgcaggccgaactgatgacgctaaccattgtgaaaggagctcaggggttcggattcactattgctgactcaccaaccgggcaacgagtcaagcaaatattggatattcagggctgccccggactctgtgagggcgatctcatcgtcgagattaatcaacagaatgtacagaatctctcacatacagaagtagtagatattctgaaggactgcccaatcggtagcgagacgagcctgatcattcacagaggtggattcttcagtccctggaagacccctaaaccaattatggaccggtgggaaaaccagggatccccccagacctcgctgagcgcgccagctataccccagaatctaccgtttcccccagccctccacagatcctcctttccagatagcaccgaagccttcgacccgcgaaaaccagacccttatgagctttatgagaaatcccgagcaatttacgagagtcggcaacaggtgccaccacggacctcttttagaatggattcctcaggtcccgactataaggagttggatgtccacctacgcaggatggagtccggctttgggttcaggattctgggaggcgacgaacccggtcagcctatcctcataggtgccgttattgctatgggcagtgctgatagggacggtcgcctgcaccccggagatgagctcgtgtacgtggacggcatcccagtggcaggcaagactcacagatacgtgatcgacttaatgcatcacgcggctagaaatggccaggtgaatttgacagtgcgcaggaaggttttgtgcggcggagagccctgtcctgaaaacggcagatctccaggttccgtatccacccatcattcatctcccagaagcgactatgctacatacacgaattccaatcatgccgcaccttcatcaaacgctagcccccctgagggttttgcttctcactctctgcaaacctcagatgtagtgatacacagaaaagaaaatgagggttttgggtttgttattattagcagccttaataggccagagagcggcagcaccattacggtgcctcacaaaatagggaggatcatcgacgggtctccagccgatcgatgcgccaaacttaaggtaggtgatagaatcctcgctgtaaacggccagagcatcattaacatgccccatgccgacatcgtgaagctgatcaaggacgccggtctcagcgtcactctgcgcataattccgcaggaagagctcaactctcccacgagtgcgccttcctcagagaaacagtcccctatggctcagcaatccccccttgcacaacaatccccactggcccaaccctctcccgctacccccaactcacccatagcgcagcctgctcctccacagcccttgcagcttcagggacacgaaaacagttaccggtcggaggttaaagcgagacaggatgtgaaacctgatattcgccaacctccatttactgattatcggcagccccctttagattataggcagccacctggcggtgactaccagcagccgcctccactggattatagacagccccctctcctggactatagacaacactcccctgatactcggcagtacccattgagcgactacaggcagcctcaagatttcgattactttacagtcgacatggagaagggagccaaagggtttgggttctcgatcagagggggaagggagtacaagatggatctgtacgtgctaaggctggcggaagatggacccgcaatccgtaatgggagaatgcgggtgggcgatcaaattattgaaattaatggggagtccacaagagacatgacccacgctagagccatagaactgataaagtctgggggaagacgggtcaggctgcttcttaagaggggaactgggcaagtcccagaatacgacgaaccagcgccttggagttcccctgctgccgcagctccgggattacctgaagtgggagtaagcctagatgatggcctggcacccttctcaccgtcacaccccgctcccccatctgatcctagtcaccaaatttcgcccggtcccacctgggatatcaaacgtgaacatgacgtccgcaagccgaaggagctcagtgcttgtgggcagaagaagcaaaggttaggcgagcagagggaacggtctgcaagtcctcagagggcggcacggcctcggctcgaagaagccccaggcggtcagggaagaccagaagctggacgcccagcctccgaggcgagagcccctggcttggccgcagctgatgcggctgacgcagcacgggctggagggaaagaagcacctcgcgctgcggcaggctcagagctctgtcgaagagaggggcctggcgctgccccagcctttgcgggtccgggaggcggtggatcaggggctcttgaagccgagggcagagccggtgccagagctggacctcgccctggccctcgtcccccagggggtgctcccgcaagaaaggcagccgtcgccccaggaccctggaaagttcccggaagcgacaagcttcccagtgtgctgaagccaggtgcatccgcggcttcacggtag

SEQ ID NO: 173840 - DNA, 1668 bp, Artificial Sequence
  derived and/or modified sequence
atggaattggaaaaatccggagccctcctcgaatccggaacttacgaggacaactattacggcacgcccaagcctcccgcagaaccagccccactgctcctgaatgtgacggatcagatcctccctggagcaactcccagtgctgagggaaaacggaaaagaaataaaagcgtgagcaacatggagaaggccagcattgaaccccctgaggaagaggaagaggaaagacctgtggttaatggcaatggcgtggtggtgaccccagagtcctccgagcacgaagataagtccgcaggcgcatctggcgagatgccctcacagccctatcccgcaccagtttacagccaacctgaagaattgaaagaacagatggatgacacaaagcccacaaaaccagaagataacgaggagccggatcctctccctgacaactgggaaatggcctacaccgagaagggcgaagtttatttcattgatcacaacaccaagactacctcttggctggatcctcgtctggccaaaaaagcaaaaccgcctgaggagtgcaaagaaaacgaactgccgtacggttgggagaagatcgatgatccgatctatgggacatactacgtggaccacatcaaccgccgaacccaatttgaaaatcccgtgttagaagctaagagaaagttgcaacaacacaacatgcctcatacggaattgggaacaaagccgctgcaggccccaggcttcagggaaaagccacttttcacgagggatgcgagccagcttaagggaaccttcctcagcaccactttgaagaagagtaacatgggatttggctttaccattatcggaggggacgaaccagatgagttcttacaggtcaaatcagtgatacctgatgggcctgctgcccaggacggaaagatggagacaggagacgtaattgtgtatatcaatgaagtgtgtgtactaggccacacgcacgccgacgtggttaaactgtttcagtctgtgccgataggccagagcgtgaacctggtgctgtgcaggggctatccacttccctttgacccggaggatcctgccaactccatggtgcctcccctggccatcatggagcgccctcccccagttatggtgaatggtaggcacaactacgaaacctatctcgagtatattagccggacaagccagtctgtgccagatatcacagaccggcctccacatagtctccactcgatgcctacagatggccaactcgacggtacatatcctccgcctgtacacgacgacaatgtgagcatggcttccagcggagctacacaggcagagttgatgacgctcacgattgtgaagggggcacagggcttcggattcactatcgcggacagtccaaccggccaacgggtcaaacaaatactggatatccagggctgccctggtctgtgtgaaggggacttaatcgtagagattaatcagcagaacgtgcaaaatctcagtcacaccgaagtggtagatatcctgaaagactgccccatcgggtcagagaccagcctaatcattcatcggggagggaagactaatactggcagcgcgatcaagtacgtgggaaaaattgtgggcagttttaacaacatagttaaaatgcagatttccttggaactgaatgagatcatactctag

SEQ ID NO: 173841 - DNA, 3762 bp, Artificial Sequence
  derived and/or modified sequence
atgtcaaagtcccttaaaaagaagtcgcactggacctcaaaggtgcacgaaagcgtaatcggacgcaatcctgaggggcaactcggcttcgaactcaagggcggtgccgaaaatggacagtttccatatctcggagaggtcaaacctggaaaggtcgcctacgaaagtggatctaagctagtgagcgaggaactgctcttagaggtcaatgagacccccgtcgccggactgaccatcagagatgtgctcgcagtgatcaaacattgcaaagacccactccggctgaaatgcgttaagcaagggggtatcgtcgacaaagacttacgccattacttgaacttgcggttccagaagggatcggtggaccacgaacttcaacagattatcagagataatctatacttaagaacagttccatgcactacccgccctcacaaagaaggggaggttcctggagtggattatatctttataacggtggaggattttatggagttggagaaaagcggcgcacttcttgagtcaggaacctacgaagacaactactacggcactcccaagccacctgccgagcctgcccctttgctattaaatgtgacggaccagattttgccaggcgctacaccctccgccgaggggaaacgcaagcgtaacaaatccgtgagcaatatggagaaagcgtccatcgagccaccagaagaagaagaagaagaaaggcccgtagtgaacggcaatggagtagtcgttacccctgagagtagcgaacacgaggataaaagtgccggtgcatctggcgagatgccatcacaaccctatcccgctcccgtgtattctcagcctgaggagctgaaagagcagatggacgacacgaagcccacaaaaccggaggacaacgaggagccagatccccttcctgacaactgggagatggcctacaccgaaaaaggtgaggtatatttcatagaccacaacacaaaaaccacctcctggttggatccacgccttgcgaaaaaggccaaaccacctgaggagtgcaaggaaaacgagctaccctatggttgggagaagatagatgaccccatttacgggacgtactatgtggaccacatcaatcggagaacacagttcgaaaacccggttttggaggctaaaagaaaactacagcaacacaatatgccccacaccgagttgggcactaagccccttcaggcccctggatttagggagaagcctctttttactcgcgacgcatcccaactgaagggcacattcttgtcgacaaccttgaaaaagagcaatatgggttttggattcacgatcatcggaggggacgaacccgacgagtttctgcaggtgaagagtgtgattcccgatggacccgcagcccaagacggcaagatggagacgggcgacgttatagtctacatcaatgaagtctgtgtacttgggcacacacacgcggatgttgtcaagctttttcagagcgtgcctatcgggcagagcgtgaatctggttttatgcagaggctaccctttgcccttcgatcccgaagacccagcaaattctatggttcctccgctggctataatggaaagacctccaccggtgatggtcaacggacggcataattacgagacctatctggaatatatcagccgcacctcccagagcgtgccggatattacagacaggccacctcatagcctccactccatgcctactgatggccagcttgatgggacgtatccaccgcctgtgcacgacgataacgtgtcaatggcctccagtggcgctacccaagctgaattaatgaccctgactatcgttaaaggtgcccaaggctttggtttcacaatcgcagatagccctacaggacagcgggtgaaacagatcttggatatacaaggctgtccagggctgtgcgaaggggatttgattgtcgaaattaatcagcagaacgtgcagaacctcagtcataccgaagtcgtcgacatcctcaaggattgtcccatcggttctgagacgagcctaataattcatcgaggaggcttcttttcaccgtggaagacaccaaagcctatcatggacaggtgggaaaaccagggtagtccacagacatccctgtccgccccagccatcccccagaacttaccatttcctcctgccctgcatcggagcagcttcccagacagcaccgaggccttcgacccacggaaaccagatccatacgaactgtatgaaaaatcccgagcaatttatgagagtcggcaacaggtgccaccccgaactagctttcgtatggactcttctggaccagactacaaagaattggacgttcatctgaggagaatggaatctggattcgggtttcgaatattaggtggtgacgaacccggtcagccaattctcattggtgcagttatagccatggggagcgcagacagggatgggaggctgcaccctggtgacgagctggtgtacgtggacggaattccagttgccggaaaaacccatcgatatgtcatagacctaatgcaccacgctgcccgaaacggccaggtgaatctgaccgtgaggcgcaaggtgttgtgcggcggagaaccttgccctgagaacggccgatctccaggctctgtgagcacacaccatagcagtccgagatcagactacgcgacttacaccaactctaaccacgcagcgccttcatcaaatgcgtcaccacccgaaggatttgcaagtcacagtctccagacaagtgacgtggtgatacaccgaaaggagaacgagggcttcgggtttgttatcatctccagcttgaaccgcccagagtccggctctaccataacagtgccgcataaaataggccgaatcattgatggttccccggctgatagatgcgccaagctgaaggtgggggatcggattctggcagttaacggtcagagcattatcaatatgcctcacgcagatattgttaagcttataaaggacgccggtctttcagtgaccttgcgtatcatcccacaggaggagttgaatagcccgacttcagctccctcaagcgaaaaacaatcacctatggctcagcagtcgccactggcacagcagtcacctctagcccaaccgagccccgcaacgcccaattcaccgatcgctcagcctgctccacctcaacccctccagttgcagggccatgagaatagttatagatctgaagtcaaagccagacaagacgtgaagcctgatatccgccagccacccttcacagattatagacagcctccgctggactataggcaacccccaggaggcgactatcagcagccacccccactcgactacagacagccaccgctgctggactaccgccaacattctcccgataccagacagtatcctctgtccgattacagacagccacaggactttgactattttaccgtggacatggaaaaaggggcaaagggctttgggttttcaatccgagggggaagagagtataagatggatctctacgtgctgcggctggccgaggacggccctgctattcgcaatggtaggatgagagttggtgatcagatcattgagatcaatggcgagtctactcgcgacatgactcacgcaagagccatagaactcataaaatccgggggtaggcgggttcgcctgttgcttaagagaggaaccggccaggtgcccgaatacgatccacctgccccagctcaagctgtgctgctacggtttcgcctgaccgccttctag

SEQ ID NO: 173842 - protein, 479 aa, Artificial Sequence
  derived and/or modified sequence
GKGSSSISSDVSSSTDHTPTKAQKNVATSEDSDLSMRTLSTPSPALICPPNLPGFQNGRGSSTSSSSITGETVAMVHSPPPTRLTHPLIRLASRPQKEQASIDRLPDHSMVQIFSFLPTNQLCRCARVCRRWYNLAWDPRLWRTIRLTGETINVDRALKVLTRRLCQDTPNVCLMLETVTVSGCRRLTDRGLYTIAQCCPELRRLEVSGCYNISNEAVFDVVSLCPNLEHLDVSGCSKVTCISLTREASIKLSPLHGKQISIRYLDMTDCFVLEDEGLHTIAAHCTQLTHLYLRRCVRLTDEGLRYLVIYCASIKELSVSDCRFVSDFGLREIAKLESRLRYLSIAHCGRVTDVGIRYVAKYCSKLRYLNARGCEGITDHGVEYLAKNCTKLKSLDIGKCPLVSDTGLECLALNCFNLKRLSLKSCESITGQGLQIVAANCFDLQTLNVQDCEVSVEALRFVKRHCKRCVIEHTNPAFF

SEQ ID NO: 173843 - protein, 491 aa, Artificial Sequence
  derived and/or modified sequence
MGANNGKQYGSEGKGSSSISSDVSSSTDHTPTKAQKNVATSEDSDLSMRTLSTPSPALICPPNLPGFQNGRGSSTSSSSITGETVAMVHSPPPTRLTHPLIRLASRPQKEQASIDRLPDHSMVQIFSFLPTNQLCRCARVCRRWYNLAWDPRLWRTIRLTGETINVDRALKVLTRRLCQDTPNVCLMLETVTVSGCRRLTDRGLYTIAQCCPELRRLEVSGCYNISNEAVFDVVSLCPNLEHLDVSGCSKVTCISLTREASIKLSPLHGKQISIRYLDMTDCFVLEDEGLHTIAAHCTQLTHLYLRRCVRLTDEGLRYLVIYCASIKELSVSDCRFVSDFGLREIAKLESRLRYLSIAHCGRVTDVGIRYVAKYCSKLRYLNARGCEGITDHGVEYLAKNCTKLKSLDIGKCPLVSDTGLECLALNCFNLKRLSLKSCESITGQGLQIVAANCFDLQTLNVQDCEVSVEALRFVKRHCKRCVIEHTNPAFF

SEQ ID NO: 173844 - DNA, 1440 bp, Artificial Sequence
  derived and/or modified sequence
ggcaaaggcagctcgagcatctcatctgacgtgagttcaagtacagatcacacgcccactaaagcccagaagaatgtggctaccagcgaagactccgacctgagcatgcgcacactgagcacgcccagcccagccctgatatgtccaccgaatctcccaggatttcagaatggaaggggctcgtccacctcctcgtcctccatcaccggggagacggtggccatggtgcactccccgcccccgacccgcctcacacacccgctcatccggctcgcctccagaccccagaaggagcaggccagcatagaccggctcccggaccactccatggtgcagatcttctccttcctgcccaccaaccagctgtgccgctgcgcgcgagtgtgccgccgctggtacaacctggcctgggacccgcggctctggaggactatccgcctgacgggcgagaccatcaacgtggaccgcgccctcaaggtgctgacccgcagactctgccaggacacccccaacgtgtgtctcatgctggaaaccgtaactgtcagtggctgcaggcggctcacagaccgagggctgtacaccatcgcccagtgctgccccgaactgaggcgactggaagtctcaggctgttacaatatctccaacgaggccgtctttgatgtggtgtccctctgccctaatctggagcacctggatgtgtcaggatgctccaaagtgacctgcatcagcttgacccgggaggcctccattaaactgtcacccttgcatggcaaacagatttccatccgctacctggacatgacggactgcttcgtgctggaggacgaaggcctgcacaccatcgcggcgcactgcacgcagctcacccacctctacctgcgccgctgcgtccgcctgaccgacgaaggcctgcgctacctggtgatctactgcgcctccatcaaggagctgagcgtcagcgactgccgcttcgtcagcgacttcggcctgcgggagatcgccaagctggagtcccgcctgcggtacctgagcatcgcgcactgcggccgggtcaccgacgtgggcatccgctacgtggccaagtactgcagcaagctgcgctacctcaacgcgaggggctgcgagggcatcacggaccacggtgtggagtacctcgccaagaactgcaccaaactcaaatccctggatatcggcaaatgccctttggtatccgacacgggcctggagtgcctggccctgaactgcttcaacctcaagcggctcagcctcaagtcctgcgagagcatcaccggccagggcttgcagatcgtggccgccaactgctttgacctccagacgctgaatgtccaggactgcgaggtctccgtggaggccctgcgctttgtcaaacgccactgcaagcgctgcgtcatcgagcacaccaacccggctttcttctga

SEQ ID NO: 173845 - DNA, 4562 bp, Artificial Sequence
  derived and/or modified sequence
tcactcgctccggggacccgcaacaagtggccgccgcgccctccccggggaagccgcgggcgcgcaggggcagccgaaggaggcggtcgagccgcggagcccaggggcctgcccggctcagcgcccaccggaggggatcggggcgggcggatggggacccggcggcggcggcgcggtgagcctctgggcggccccggggcgcgggctgtgcgcggcgctgcgcccgccggcccccagcgcggattgtaagtgctgcagctgtgcccggccccgcctggagccaccgggggtgccaggaggggacgcagcaccccctcccactggagtgcggggacctctccaggccggaggtcggccccggagcttgggggggatgtgcagctaacggtcccgtcgggcgggctttcctcgggccgagcgcgcaggacgtgcgccgcagctatggagtgtcccgggagacggcgggcatgacggctacaggatgggcgcgaacaatggcaaacagtacggcagtgagggcaaaggcagctcgagcatctcatctgacgtgagttcaagtacagatcacacgcccactaaagcccagaagaatgtggctaccagcgaagactccgacctgagcatgcgcacactgagcacgcccagcccagccctgatatgtccaccgaatctcccaggatttcagaatggaaggggctcgtccacctcctcgtcctccatcaccggggagacggtggccatggtgcactccccgcccccgacccgcctcacacacccgctcatccggctcgcctccagaccccagaaggagcaggccagcatagaccggctcccggaccactccatggtgcagatcttctccttcctgcccaccaaccagctgtgccgctgcgcgcgagtgtgccgccgctggtacaacctggcctgggacccgcggctctggaggactatccgcctgacgggcgagaccatcaacgtggaccgcgccctcaaggtgctgacccgcagactctgccaggacacccccaacgtgtgtctcatgctggaaaccgtaactgtcagtggctgcaggcggctcacagaccgagggctgtacaccatcgcccagtgctgccccgaactgaggcgactggaagtctcaggctgttacaatatctccaacgaggccgtctttgatgtggtgtccctctgccctaatctggagcacctggatgtgtcaggatgctccaaagtgacctgcatcagcttgacccgggaggcctccattaaactgtcacccttgcatggcaaacagatttccatccgctacctggacatgacggactgcttcgtgctggaggacgaaggcctgcacaccatcgcggcgcactgcacgcagctcacccacctctacctgcgccgctgcgtccgcctgaccgacgaaggcctgcgctacctggtgatctactgcgcctccatcaaggagctgagcgtcagcgactgccgcttcgtcagcgacttcggcctgcgggagatcgccaagctggagtcccgcctgcggtacctgagcatcgcgcactgcggccgggtcaccgacgtgggcatccgctacgtggccaagtactgcagcaagctgcgctacctcaacgcgaggggctgcgagggcatcacggaccacggtgtggagtacctcgccaagaactgcaccaaactcaaatccctggatatcggcaaatgccctttggtatccgacacgggcctggagtgcctggccctgaactgcttcaacctcaagcggctcagcctcaagtcctgcgagagcatcaccggccagggcttgcagatcgtggccgccaactgctttgacctccagacgctgaatgtccaggactgcgaggtctccgtggaggccctgcgctttgtcaaacgccactgcaagcgctgcgtcatcgagcacaccaacccggctttcttctgaagggacagagttcatccggcgttgtattcacacaaacctgaacaaagcaaatttttttaaaagcagcgtatgtaagcaccgacacccactcaaaacagctctttcttccgggaaggttattaggaatctggcctttatttttcctcatttctcatgggcaacagaggccaaagaaacgaagcaagacaaacagcaaacaggcattttggtcaggtcatttgtaggcagtttctcttctcacaaaagatgtacttaagcaggctgatcgctgttccttgagcaaggcgcttactctcctccgctcaggcccccaaggccgccctttccctcgcacacaggccccacccccacagttccacgccccccccccaaggccacaccctccctccctagagcagcagcgaggatccatcatcagaatcacagtgctctccagacctcctctctaaactgcttcattgacctaagtcactctcttcaatcccacacccatggacattcttgtcaactcaataccatagcactttgcataggcaaaatacttttcaggcctttttaaaaaattcattacagcaaacagctggggaaggacatgcagtcctcccccagctctgtcaatgactatgaccttggccaaagcacttcactgctctgggctgcagcttccagcactgaatcagaggccacacagcccaaagattagcttcatgtccattatagcattgagggagcagagatacccatacacagaagcaccttggcatagagcacccaggcatcgacctcttccaggagaactgattctgtggatggatgtgatttcaggagattgtgcagtgccagcatcagtgcataaagggtcctgtatgtcctttggctgcaaatcacccacttccctgtgtttcagtgggagaatttcctctcccacctcctcacatcctcttttgccaggctggatgctgtcgtctctgtacacaaatactttctgcattcccccctccacaccatcctagcgaggcaccagcacacctaatcacagcaaagcccagatccccccatcagttgcttttactcagtgttttcaaataggagtaaaggcccttgcaatttttaattaacaagcaaggcccaagggaacacatgtcctcaaaagtttttctgatccctcgccttgcacacctggcatgcatcaggcacatctgtcctacagctggcagagacagatgcctcggttctttgtcattcagattgcatttgacctcttctcatctatttatttctttatacatccagacttcatcacatgaagcctattggggttaagtttgtaagtgtttaattgtgcaaattgccaccctgtgtacctcctccatgtctgtctgcgtgttttccaccaaagaatgcaaagcagacttccaggtgtttaaattctgttcactcaacaatgccagatgaatggaagagggaacacactgagatgacttagactctggtccaccaaccagacccttggaaaggaatactaaaatcattacaaggtatggattttaaatggatgaaacttcaaattatcttatttggatagaagtctatattctagcctcatttgcatgaagtcagatagccagaagaaattccattgctggttttcacgaaattcacttgtcttttgctaataaacacatggccctttcccagattattctctagccaagccccacctttgttacgttgaaatccctcatttattttcttctcaaaatgcccattatccaaatgcagaacctctgcatctccaagccagttatgctgaatttgtcaaacttagacacccttgacaactgcactcctactgtaggctcctgtgcatactgtcgtcttctgtgggggatggagaggttagtgtgatgaggtggtgtctgcccaggaggtttctttcaaacatcatggcctcccatccaatcaacatcatcaaattacatgtgtaatcaaggctctgtgccatgggggaaatgaatcatttagctaggccaggatctagtgaaagccacagagtttaaaaccatgaaagaagttgaaggcagcattcctcagctctgtgacttgtgaccctatttgaagtttcaggatttgggtgtcacaaaggattgtccctaatccttggccctggggtcttccgagtgagctggtttaatactctgagaatgagcagggagatccagagaatgaatccctgaccgcatcacctaaactgtcttccaaacatgagacaaagctgactgttcacactgattgcccagcacataccgtcttgccagtttcttcttttctcccagtctcctgttcatccattctgttctcccttggggtgggaatctatgatggaggttactggggaaacagctcagcagatttttggagaccaaaccaaaggtctcactaggaaatttatctgttttaaaacattgcttccttcctggctctgctaaattgaatgctcattgtttgttgttgttgttttttaattctaatgttcaaatcactgcgtgctgtatgaatctagaaagccttaatttactaccaagaaataaagcaatatgttcgt

SEQ ID NO: 173846 - DNA, 1440 bp, Artificial Sequence
  derived and/or modified sequence
ggaaaggggtcctccagcatttcgagtgacgtcagctcttccaccgaccacacgccaactaaggcccaaaaaaacgtcgcaaccagcgaggacagcgacttatccatgcgtactctctctacaccctcgcccgcactcatttgcccaccgaatctgcccgggtttcagaacggcaggggctcctcaacttcaagctcatccatcaccggggagacagtggctatggtgcacagccctccacccactagattgacacacccactcattcggctcgcttcccgtcctcaaaaagaacaagctagcatcgaccgtctccctgaccactccatggtccagatattctccttcttaccaacaaatcagctgtgtcggtgcgctagggtctgtagaaggtggtacaatctggcttgggatcctagactctggaggacaatcagactcactggcgagaccatcaatgttgatcgcgcccttaaggtcctgacccggagactctgccaggatacacccaatgtctgcctcatgctggagactgtcaccgtcagcggatgtaggagattaactgaccgaggcctgtataccatagcacagtgctgccctgaactgaggaggctcgaagttagtggatgttataacatatcaaacgaggctgtattcgacgtggtttctctgtgccctaatctcgagcacctggatgtctcaggttgctctaaggtgacatgcatctctctgacacgcgaagcttccataaagcttagccccctgcatggaaagcagatatcaatccggtatctggatatgaccgattgtttcgtgttggaggacgaagggctgcatacgatcgccgctcattgtacccaactgacacatctgtatctacgtcgttgcgtccgcctgacagatgagggcctcagatacctggtgatttattgcgcaagtatcaaagagctgagtgtgtcagattgcagatttgtgtcggactttggcttgcgggagatcgccaaactggagtctcggttacggtacctgtctatcgcccattgcgggcgcgtcactgacgtgggcatccggtacgtggccaaatattgctcaaagcttcgctaccttaatgcccgcggttgtgaaggcattactgatcacggggttgagtaccttgcaaagaattgcacaaagctgaagagtcttgacattgggaagtgcccactggtgagtgacactggcctggagtgcctagccctcaattgcttcaacctcaagcggcttagtctgaaaagctgcgaatccattaccggacaaggattgcaaatcgtggctgcaaattgttttgatctccagaccttgaacgtgcaggactgtgaagtatcggtggaagccctaagattcgtgaagcgacattgcaaacgttgtgtcattgaacacacaaatccagcgttcttttag

SEQ ID NO: 173847 - DNA, 1476 bp, Artificial Sequence
  derived and/or modified sequence
atgggcgctaacaatgggaagcagtatgggtctgaaggaaaaggatcatcaagcattagcagtgacgtctcctcgtctacagaccatacacccaccaaggctcagaagaacgtagcaacttccgaagactcggacctgtcgatgcgaacgctctccacacccagccccgccctgatctgtccgcccaacctgccgggttttcagaacggacgcggatcctccactagttcgtcttctattacaggcgaaaccgtagcgatggtgcactccccgcctcccaccaggttaacgcaccccctcatccggctggcaagccgacctcagaaggagcaggctagtattgaccgtttacccgaccactccatggttcaaatcttctccttcttacccacaaatcagctgtgcagatgtgccagagtgtgtaggagatggtacaatctcgcatgggacccacggctgtggcgcacaattagactcaccggggaaactattaatgttgacagagctctgaaggtgctgactagacggctctgccaggacactcctaacgtctgtctgatgctggagaccgttaccgtttccggatgccgcaggttgacagatagagggttgtacacaatagctcagtgttgtcccgagttgaggagactggaggtttcaggctgctataatattagtaacgaagctgtgtttgacgtcgtttctctctgccccaatctcgagcacttggatgtgagcgggtgttccaaagtcacatgcatctctctgacccgggaggcttccattaaacttagcccactgcatgggaaacaaatcagtattcgatatttagacatgaccgattgtttcgttctggaagacgagggcttacacactattgctgcacactgtacccagctgacgcacctatatttaaggagatgcgttcgcctgactgacgaggggctgaggtatctcgtgatctattgcgcctctataaaagaactaagtgtgtccgattgtagattcgtatccgatttcggtctgcgggaaattgctaagctggagagtcgccttcgctatctgtcaatagcccactgtggtagggtgacagatgtgggaattcggtacgtcgcgaaatactgcagcaagctcaggtatctgaacgcccgagggtgtgagggaatcaccgatcacggcgtggagtacctggccaaaaattgcactaaactcaaaagcctggatattggcaagtgccctctcgtaagcgacacaggtttagaatgtctggccttgaactgtttcaacttgaagcggttgagcttgaagtcttgtgaatctattaccggccagggattacaaatagtcgctgctaactgtttcgacctgcagactctcaatgtacaggattgtgaagttagcgtggaggcgttgaggtttgtcaagcgccactgcaagcgctgcgtgattgagcataccaatcccgcctttttttag

SEQ ID NO: 173848 - DNA, 1440 bp, Artificial Sequence
  derived and/or modified sequence
gggaagggcagcagcagcatcagcagtgatgtgagcagcagcacagaccacacccccaccaaggcccagaagaatgtggccaccagcgaggacagcgacctgtccatgaggaccctgagcacccccagccctgccctgatctgcccccccaacctgcccggcttccagaatggccggggcagcagcaccagcagcagcagcatcactggagagaccgtggccatggtgcacagccccccacccacccggctgacccaccccctcatccggctggccagccggccccagaaggagcaggccagcattgaccggctgcctgaccacagcatggtgcagatcttctccttcctgcccaccaaccagctgtgccgctgtgcccgggtgtgccgccgctggtacaacctggcctgggacccccggctgtggaggaccatccggctgaccggggagaccatcaacgtggaccgggccctgaaggtgctgacccggcggctgtgccaggacaccccaaatgtgtgcctgatgctggagaccgtgacagtgtctggctgccggcggctgacagaccggggcctgtacaccatcgcccagtgctgcccagagctgcggcggctggaggtgtctggctgctacaacatcagcaatgaagctgtgtttgatgtggtgtccctgtgccccaacctggagcacctggatgtgtctggctgcagcaaggtgacctgcatcagcctgacccgggaggccagcatcaagctgagccccctgcacggcaagcagatcagcatccgctacctggacatgacagactgctttgtgctggaggatgagggcctgcacaccatcgccgcccactgcacccagctgacccacctgtacctgcggcgctgtgtgcggctgacagatgagggcctgcgctacctggtgatctactgtgccagcatcaaggagctgtctgtgtctgactgccgctttgtgtctgactttggcctgcgggagatcgccaagctggagagccggctgcgctacctgagcatcgcccactgcggccgggtgacagatgtgggcatccgctacgtggccaagtactgcagcaagctgcgctacctgaatgcccggggctgtgagggcatcacagaccacggcgtggagtacctggccaagaactgcaccaagctgaagagcctggacattggaaaatgtcccctggtgtctgacaccggcctggagtgcctggccctgaactgcttcaacctgaagaggctgagcctgaagagctgtgagagcatcaccggccagggcctgcagatcgtggccgccaactgctttgacctgcagaccctgaatgtgcaggactgtgaggtgtctgtggaggccctgcgctttgtgaagaggcactgcaagagatgtgtgattgagcacaccaacccagccttcttctag

SEQ ID NO: 173849 - DNA, 1476 bp, Artificial Sequence
  derived and/or modified sequence
atgggcgccaacaacgggaagcagtatggcagcgagggcaagggcagcagcagcatcagcagtgatgtgagcagcagcacagaccacacccccaccaaggcccagaagaatgtggccaccagcgaggacagcgacctgtccatgaggaccctgagcacccccagccctgccctgatctgcccccccaacctgcccggcttccagaatggccggggcagcagcaccagcagcagcagcatcactggagagaccgtggccatggtgcacagccccccacccacccggctgacccaccccctcatccggctggccagccggccccagaaggagcaggccagcattgaccggctgcctgaccacagcatggtgcagatcttctccttcctgcccaccaaccagctgtgccgctgtgcccgggtgtgccgccgctggtacaacctggcctgggacccccggctgtggaggaccatccggctgaccggggagaccatcaacgtggaccgggccctgaaggtgctgacccggcggctgtgccaggacaccccaaatgtgtgcctgatgctggagaccgtgacagtgtctggctgccggcggctgacagaccggggcctgtacaccatcgcccagtgctgcccagagctgcggcggctggaggtgtctggctgctacaacatcagcaatgaagctgtgtttgatgtggtgtccctgtgccccaacctggagcacctggatgtgtctggctgcagcaaggtgacctgcatcagcctgacccgggaggccagcatcaagctgagccccctgcacggcaagcagatcagcatccgctacctggacatgacagactgctttgtgctggaggatgagggcctgcacaccatcgccgcccactgcacccagctgacccacctgtacctgcggcgctgtgtgcggctgacagatgagggcctgcgctacctggtgatctactgtgccagcatcaaggagctgtctgtgtctgactgccgctttgtgtctgactttggcctgcgggagatcgccaagctggagagccggctgcgctacctgagcatcgcccactgcggccgggtgacagatgtgggcatccgctacgtggccaagtactgcagcaagctgcgctacctgaatgcccggggctgtgagggcatcacagaccacggcgtggagtacctggccaagaactgcaccaagctgaagagcctggacattggaaaatgtcccctggtgtctgacaccggcctggagtgcctggccctgaactgcttcaacctgaagaggctgagcctgaagagctgtgagagcatcaccggccagggcctgcagatcgtggccgccaactgctttgacctgcagaccctgaatgtgcaggactgtgaggtgtctgtggaggccctgcgctttgtgaagaggcactgcaagagatgtgtgattgagcacaccaacccagccttcttctag

SEQ ID NO: 173850 - DNA, 1440 bp, Artificial Sequence
  derived and/or modified sequence
ggcaagggcagcagcagcatcagcagcgacgtgagcagcagcaccgaccacacgcccaccaaggcacagaaaaatgtggccactagcgaggacagcgatctttctatgaggacattgtccactccgagtccagcgctcatctgtcctcccaatcttcccggatttcagaacggccgaggatcctctaccagtagctccagcattacgggcgagaccgtggccatggtacacagtccaccacccacacggctgacacaccctttgattcggttagcctcaagaccccagaaggagcaggcctccattgacagattgcccgaccactctatggtccagatcttctcctttcttcctacaaaccaattatgccggtgcgcccgcgtttgtcggcggtggtacaacttagcttgggatccccgactgtggcgcactattcggctgacaggggagacgattaacgttgaccgagctttaaaggtccttacgcgaagactctgccaagacacacccaatgtctgtctcatgcttgagactgttactgtgtctgggtgccgaaggctgactgaccgcggtctgtatacaatagcccagtgctgtccagagctgaggagactagaggtatctggttgctacaacatcagcaacgaagccgtctttgatgtagttagcctctgtcctaacctggagcacctagatgtttcagggtgctcaaaagtgacctgtatttcactgacacgggaagcatcaatcaagctttcccccctacacggtaagcagatctcgataaggtacctcgatatgacggattgttttgtgttagaagatgaaggcctgcacactatcgctgctcactgtacccaactgacccatctctacttgcgtcgttgcgtgaggttaactgatgagggcctgagataccttgtgatctattgcgcatctatcaaggagctgtccgtttcggactgccggtttgtgagcgactttggactgagggagatcgccaagctggagtctcgcctccggtatctgtccatagcccactgcggcagggtaacggacgtgggcatccgctacgtggccaaatattgcagtaaactccgatacttgaatgcccgcggttgtgagggaattaccgatcatggggtcgaatacctggccaagaattgtactaaactgaagtcattagacatcggaaagtgcccacttgtgtctgatacaggcttagagtgtttagctctcaattgttttaacctcaagcggctctcgctgaaatcatgtgaatcgataaccggacagggactgcagattgtggccgcgaactgctttgacctgcaaacattaaatgtgcaggattgcgaggtgtccgtggaggccttacgctttgtgaaacggcactgcaaaaggtgtgtaatcgaacatacaaatcccgcctttttttag

SEQ ID NO: 173851 - DNA, 1476 bp, Artificial Sequence
  derived and/or modified sequence
atgggcgccaacaacggcaagcagtacggcagcgagggcaagggctccagcagcatttcctctgacgtctcgtcctccactgaccatacaccgactaaggcccagaaaaacgttgcaacctccgaggattccgatttgagcatgcggacgctctccaccccatcccctgctctgatttgccctcctaatctacctggctttcaaaatggtcggggctcatccaccagctcgtcttccattactggagagaccgtggcaatggtacatagcccaccccctactagactcactcaccccctaattagactcgcttcccgccctcaaaaagagcaggcttctatagacaggctccctgaccacagcatggtccaaatcttctctttcctaccgacaaaccagctgtgccggtgtgccagagtttgccgtaggtggtacaacttagcatgggaccccagactctggcgcacaatccgcctaaccggtgagactataaacgttgaccgagctctcaaggtcctaacacgccgtctttgccaggacacccccaacgtgtgccttatgctagagacagtgaccgtgtccggatgccggagacttacagacaggggtctgtatacaattgcccagtgctgtcctgagctgagaaggcttgaggtctctggctgctacaacatcagtaacgaagctgtatttgacgttgtgtccctttgtccgaatctggaacatctggatgtttctgggtgtagtaaagtgacctgcatcagccttactcgggaggcttccatcaaactgagtccactccacggaaagcaaatctccatccggtatctggatatgactgattgctttgttctggaggacgaaggcctccacacaatcgccgcccactgtacccagctaactcatctgtacctgagacgatgcgttagactgactgatgaaggattgcggtacctggtcatttattgcgcctccatcaaagagctctctgtgtctgattgcagattcgtgagtgatttcggcctgagggaaattgccaagcttgagtcaaggctgcgctacctatccattgctcactgcggccgcgttaccgatgtgggcatccggtatgtcgccaagtactgctccaagttgcggtacctcaacgcgagggggtgtgaggggattacagatcacggcgtggagtaccttgcaaagaactgcacaaagctgaagtcattagacatcggcaagtgccctcttgtttctgacacagggctggagtgcctggctctgaactgttttaaccttaagagactgagcctgaagtcctgcgaaagcatcaccggacaaggcctgcagatcgttgctgccaattgctttgacctccagacccttaatgtacaggattgtgaagtgagcgtggaggccttgaggtttgttaagcgacactgtaaaaggtgtgtaatcgaacacaccaacccagcgtttttttag

SEQ ID NO: 173852 - DNA, 1440 bp, Artificial Sequence
  derived and/or modified sequence
gggaaggggtcctcgtctatctcttctgatgtgtcctcgtcaaccgatcatactccaacaaaagctcagaagaatgtggccacctccgaagattctgacctttccatgagaactctgagcacacctagtcctgctctcatatgcccacccaatttgccgggatttcagaatggcagaggatccagcactagctccagttcaatcacaggcgaaactgtggctatggtacatagtcccccacctactagactcacccaccccctgatccggctcgcttccagacctcaaaaggagcaagccagtatcgatcggctcccggatcactctatggtacagatttttagttttcttcctactaatcaattgtgccggtgcgcgagagtgtgccggagatggtacaatctggcctgggatcctcggttgtggagaaccatccgcctcactggagaaactattaatgtcgacagggctctgaaggtgctaaccagacggctttgccaggacacacccaatgtatgtctgatgctcgaaactgtgaccgtcagtggatgccggagactgaccgaccggggattgtataccattgcacagtgctgcccagaactgagacggttagaagtgtccgggtgctataacatttctaacgaagctgtcttcgatgtggtgtcactgtgccctaatctggagcacctggacgtctcaggttgctctaaagtcacctgtatttccctgacgcgtgaggcctccatcaaactgagccccctccacggcaaacaaatttcgatcagataccttgatatgacagattgtttcgtgctcgaagacgagggattacatacaatcgccgctcactgtacgcagctgacacacttgtatttgcggaggtgtgtccgacttaccgatgagggtttacgctacttggttatttactgtgcatccatcaaggagctgagtgtcagtgactgtagattcgtgagcgatttcgggttgagggagatcgctaaactcgagagtcggctaagatatttgtcgatagcccattgtggacgagtgacggacgtgggtatcaggtatgttgcaaagtattgttccaaactccggtatctcaacgctaggggttgtgaggggattaccgaccatggtgtagagtacctagccaagaattgcacgaaattgaaatcactggacatcggtaagtgtccgctggtcagcgatacaggtctagaatgccttgctctgaactgtttcaatctgaagagactgtctctgaaatcctgcgagagcattactggccaggggttacaaatcgtggccgctaactgtttcgatctccagacccttaatgtacaggattgtgaagtttcagtggaagccctacggtttgtgaagcgccactgcaaaagatgtgttatcgaacatacaaatcccgcatttttctag

SEQ ID NO: 173853 - DNA, 1476 bp, Artificial Sequence
  derived and/or modified sequence
atgggtgcaaataatggcaaacaatacggtagcgaagggaagggctccagctcgatcagctccgatgtgagtagcagcacagaccatactcccaccaaggctcaaaagaatgttgcaacgtccgaggactccgacttatccatgcgcacattgtccacacccagtccagctctgatctgtccgcctaatttacctggattccagaatggtaggggctcatcaacatccagttcatccatcaccggcgagacagttgcaatggtgcactctccccctcccacaagattaacccacccgctaattaggctcgcttctaggccacagaaggagcaagcaagtattgataggctccctgatcattctatggtgcagatcttctctttcctcccaaccaatcagctgtgtcgttgcgccagagtttgtagacgttggtataatctggcatgggatcctcgactctggcggaccattcgccttactggggaaactatcaacgtggatcgtgctctgaaagtgctaacaaggcgactgtgtcaggacacccctaatgtctgcttgatgctcgagactgttaccgttagtggttgtcgcaggttaaccgatagggggctatataccattgcacagtgctgtcctgagctgcgtagacttgaagtgagtggctgttataatatttccaatgaggcggtatttgacgttgtgtctctctgccccaaccttgaacatcttgacgtgagtggttgttcgaaggtgacatgtatctcactgacaagagaggcctctattaagctttcacccctacacggcaagcagatcagcatccgttacttggacatgaccgactgctttgtgctggaggacgagggcctgcataccatcgccgctcattgcacacaactgacacatctgtacctccgtcggtgtgtacgccttacggacgaaggtttgcgctacttggtgatctactgcgcctccattaaagagctctccgtaagcgattgtcgcttcgtttccgattttgggcttagagaaattgctaagctagaatcccgcctgcgatacctgagcatcgcacattgtggaagggtgaccgacgtgggaatcagatacgtagccaaatactgctcaaaactgcggtatttgaatgcacgtggatgcgaagggatcacagatcacggagtggagtatctagcaaaaaactgcacaaagctgaaatccctcgatatcggaaaatgccctctggtgtcagacaccgggctagaatgtttggcgctgaattgttttaatcttaagcggctcagtctcaaatcctgcgagtctataactggtcaaggactccagattgtcgccgcaaattgtttcgatctgcagacgcttaatgtgcaggattgtgaggtatctgtcgaggcgttaagattcgtcaaaagacactgtaagaggtgtgtgattgaacacacaaatcctgcattcttttag

SEQ ID NO: 173854 - DNA, 1440 bp, Artificial Sequence
  derived and/or modified sequence
ggcaagggcagcagcagcatcagcagcgacgtgagcagcagcaccgaccacacccccaccaaggcccagaagaacgtggccaccagcgaggacagcgacctgagcatgagaaccctgagcacccccagccccgccctgatctgcccccccaacctgcccggcttccagaacggcagaggcagcagcaccagcagcagcagcatcaccggcgagaccgtggccatggtgcacagccccccccccaccagactgacccaccccctgatcagactggccagcagaccccagaaggagcaggccagcatcgacagactgcccgaccacagcatggtgcagatcttcagcttcctgcccaccaaccagctgtgcagatgcgccagagtgtgcagaagatggtacaacctggcctgggaccccagactgtggagaaccatcagactgaccggcgagaccatcaacgtggacagagccctgaaggtgctgaccagaagactgtgccaggacacccccaacgtgtgcctgatgctggagaccgtgaccgtgagcggctgcagaagactgaccgacagaggcctgtacaccatcgcccagtgctgccccgagctgagaagactggaggtgagcggctgctacaacatcagcaacgaggccgtgttcgacgtggtgagcctgtgccccaacctggagcacctggacgtgagcggctgcagcaaggtgacctgcatcagcctgaccagagaggccagcatcaagctgagccccctgcacggcaagcagatcagcatcagatacctggacatgaccgactgcttcgtgctggaggacgagggcctgcacaccatcgccgcccactgcacccagctgacccacctgtacctgagaagatgcgtgagactgaccgacgagggcctgagatacctggtgatctactgcgccagcatcaaggagctgagcgtgagcgactgcagattcgtgagcgacttcggcctgagagagatcgccaagctggagagcagactgagatacctgagcatcgcccactgcggcagagtgaccgacgtgggcatcagatacgtggccaagtactgcagcaagctgagatacctgaacgccagaggctgcgagggcatcaccgaccacggcgtggagtacctggccaagaactgcaccaagctgaagagcctggacatcggcaagtgccccctggtgagcgacaccggcctggagtgcctggccctgaactgcttcaacctgaagagactgagcctgaagagctgcgagagcatcaccggccagggcctgcagatcgtggccgccaactgcttcgacctgcagaccctgaacgtgcaggactgcgaggtgagcgtggaggccctgagattcgtgaagagacactgcaagagatgcgtgatcgagcacaccaaccccgccttcttctag

SEQ ID NO: 173855 - DNA, 1476 bp, Artificial Sequence
  derived and/or modified sequence
atgggcgccaacaacggcaagcagtacggcagcgagggcaagggcagcagcagcatcagcagcgacgtgagcagcagcaccgaccacacccccaccaaggcccagaagaacgtggccaccagcgaggacagcgacctgagcatgagaaccctgagcacccccagccccgccctgatctgcccccccaacctgcccggcttccagaacggcagaggcagcagcaccagcagcagcagcatcaccggcgagaccgtggccatggtgcacagccccccccccaccagactgacccaccccctgatcagactggccagcagaccccagaaggagcaggccagcatcgacagactgcccgaccacagcatggtgcagatcttcagcttcctgcccaccaaccagctgtgcagatgcgccagagtgtgcagaagatggtacaacctggcctgggaccccagactgtggagaaccatcagactgaccggcgagaccatcaacgtggacagagccctgaaggtgctgaccagaagactgtgccaggacacccccaacgtgtgcctgatgctggagaccgtgaccgtgagcggctgcagaagactgaccgacagaggcctgtacaccatcgcccagtgctgccccgagctgagaagactggaggtgagcggctgctacaacatcagcaacgaggccgtgttcgacgtggtgagcctgtgccccaacctggagcacctggacgtgagcggctgcagcaaggtgacctgcatcagcctgaccagagaggccagcatcaagctgagccccctgcacggcaagcagatcagcatcagatacctggacatgaccgactgcttcgtgctggaggacgagggcctgcacaccatcgccgcccactgcacccagctgacccacctgtacctgagaagatgcgtgagactgaccgacgagggcctgagatacctggtgatctactgcgccagcatcaaggagctgagcgtgagcgactgcagattcgtgagcgacttcggcctgagagagatcgccaagctggagagcagactgagatacctgagcatcgcccactgcggcagagtgaccgacgtgggcatcagatacgtggccaagtactgcagcaagctgagatacctgaacgccagaggctgcgagggcatcaccgaccacggcgtggagtacctggccaagaactgcaccaagctgaagagcctggacatcggcaagtgccccctggtgagcgacaccggcctggagtgcctggccctgaactgcttcaacctgaagagactgagcctgaagagctgcgagagcatcaccggccagggcctgcagatcgtggccgccaactgcttcgacctgcagaccctgaacgtgcaggactgcgaggtgagcgtggaggccctgagattcgtgaagagacactgcaagagatgcgtgatcgagcacaccaaccccgccttcttctag

SEQ ID NO: 173856 - protein, 316 aa, Artificial Sequence
  derived and/or modified sequence
MTQGKLSVANKAPGTEGQQQVHGEKKEAPAVPSAPPSYEEATSGEGMKAGAFPPAPTAVPLHPSWAYVDPSSSSSYDNGFPTGDHELFTTFSWDDQKVRRVFVRKVYTILLIQLLVTLAVVALFTFCDPVKDYVQANPGWYWASYAVFFATYLTLACCSGPRRHFPWNLILLTVFTLSMAYLTGMLSSYYNTTSVLLCLGITALVCLSVTVFSFQTKFDFTSCQGVLFVLLMTLFFSGLILAILLPFQYVPWLHAVYAALGAGVFTLFLALDTQLLMGNRRHSLSPEEYIFGALNIYLDIIYIFTFFLQLFGTNRE

SEQ ID NO: 173857 - protein, 270 aa, Artificial Sequence
  derived and/or modified sequence
MKAGAFPPAPTAVPLHPSWAYVDPSSSSSYDNGFPTGDHELFTTFSWDDQKVRRVFVRKVYTILLIQLLVTLAVVALFTFCDPVKDYVQANPGWYWASYAVFFATYLTLACCSGPRRHFPWNLILLTVFTLSMAYLTGMLSSYYNTTSVLLCLGITALVCLSVTVFSFQTKFDFTSCQGVLFVLLMTLFFSGLILAILLPFQYVPWLHAVYAALGAGVFTLFLALDTQLLMGNRRHSLSPEEYIFGALNIYLDIIYIFTFFLQLFGTNRE

SEQ ID NO: 173858 - DNA, 4654 bp, Artificial Sequence
  derived and/or modified sequence
agaacccacgcggaggaaggaagagacgcaggcaggctgcggttacccaagcggccacccgggcctcagggaccccttccccgagagacggcaccatgacccagggaaagctctccgtggctaacaaggcccctgggaccgaggggcagcagcaggtgcatggcgagaagaaggaggctccagcagtgccctcagccccaccctcctatgaggaagccacctctggggaggggatgaaggcaggggccttccccccagcccccacagcggtgcctctccaccctagctgggcctatgtggaccccagcagcagctccagctatgacaacggtttccccaccggagaccatgagctcttcaccactttcagctgggatgaccagaaagttcgtcgagtctttgtcagaaaggtctacaccatcctgctgattcagctgctggtgaccttggctgtcgtggctctctttactttctgtgaccctgtcaaggactatgtccaggccaacccaggctggtactgggcatcctatgctgtgttctttgcaacctacctgaccctggcttgctgttctggacccaggaggcatttcccctggaacctgattctcctgaccgtctttaccctgtccatggcctacctcactgggatgctgtccagctactacaacaccacctccgtgctgctgtgcctgggcatcacggcccttgtctgcctctcagtcaccgtcttcagcttccagaccaagttcgacttcacctcctgccagggcgtgctcttcgtgcttctcatgactcttttcttcagcggactcatcctggccatcctcctacccttccaatatgtgccctggctccatgcagtttatgcagcactgggagcgggtgtatttacattgttcctggcacttgacacccagttgctgatgggtaaccgacgccactcgctgagccctgaggagtatatttttggagccctcaacatttacctagacatcatctatatcttcaccttcttcctgcagctttttggcactaaccgagaatgaggagccctccctgccccaccgtcctccagagaatgcgcccctcctggttccctgtccctcccctgcgctcctgcgagaccagatataaaactagctgccaacccagcctgtggccaggtcactgtctaccccagcccagcccagccctctgccgcttgtacatacgccatggggaccctgaggaactgaggccacgtcaatccctgtgccgccccattcgcccgttacatcttccaaactgggacggtcaaggctgaaggctcctctgggtttgagggtccaagggacaaggaggagaagcctagcaggatttcagatgcaggagagagacccaggaagcccggcagagccctgagccccactgcaattcctcctagggctgcacaatcatgtggccttagggcacactgtcctgcatccagtctgtgtcctcctgtctttctcatccaggtcaggcattgacactttgtaagaaagggggtaggggacacagctgggcaggtggagtgggtgggcaggatggctgtcccagtctgcccatcttctcttggctctgggaccagcggcttgttctagggatttggacctggaggccaagggcaataggagagggtctgaagcctgtgctgtctgctgcttgctgtgaatggccctcccgggtcatgacagagctcttttggggcaggaggtgagggcagggggccccgctccttggtaagggcctgccctggggctcccagggaagtgggagctggggagccaatccacccagacccgcgtccacctgggaggcatttggggttgcaggaccgagacccacatcctctcactcacttctccacccgccaggcagctgccacaggcctaaggctgagtgaggtgtgattgggccctccggctggatgttctgggggaggaggcaatcgctgtagctgccaggccagccccatctggaaggagtccctgctctgcctcagccctaacccgaggctgtgtgggagtcccttctgcacctcttatttcctaaacccttcctgtcagctgctgtttgctggctcgtccccagccaggcctcctgaggtcttcatagttggcacagtccacatctcttctagcttcactggccactcactcagcccagagtccctaagtgctcccccacttatctctgcatctctccaatttggaagccatccagctgatgctaacagccagggccagtccctccagctggtcccatgtaatgaggccagggctccttatcagcttccaggcggctgggatctcaggcagggtgtgcgtcagccctccaacccccagaggggcgcctgtggggagggaaccaggaggccacactgggggagcgtgcagccagcatgtgcagtggccaactccaggccagtggaaagttactgtgtggatacaggaaggctctgagtggctagcaggaccctcccttggcttcgccctcctcctcttctctctcccctgtgctgggagctccgtctgccttgggaagggagacgaggtgtgctgttccttcccagccccatccctccccacccttcctactcccagctttcaagaaacattgcagaagcatttgaagttttgttccatcttggatatttgaagagaaaaggagccaagaactggcgggtggtgtgtgtgcagcaaaggcattgggggcacgggtgagatgcccactgtgtgctggtctaaattaatccatcgcagtgatcctccagagacagcgctctgctcatgtccgtagcagagggaaaagccgaggtgctcagaaaggctcggtaatgagtcccaggtcatacggctagcgagtggcgggcctggggttcagacccacagctgcctcaagcaaacagggtatcacgcttgcccctgggcctgggtgggggccggaatgagaccacatgagagcgcagagaggtgggtggtcaggccctgatgtcctggggatttcttgtcctcagtgccacccggcctcccgtctttcctgaaacccctcgccagattttgcactctgaggtttctatcttccagacaagagctgggaggcaagatttctggtttctggttcctagcctcactgccagcgggctcctgctattaggtgagggtttcttgctgtctggaattcagtttttccatctgccacatggaagttcatagccaggatagggcgggagaggcaccagaacatttctctccactgactttctcacccggttcccaccctcctccacctcctctcctccgggcccctcagtttcctctcctcatctctggcctcagttccagagggttagccccagcaccccactctcctgccactgtcagatagccttggtcatgcttcctagaatctacttgtccaagttctcctctccctgggataagttactgcagaaactggggatttagaagcttattcagggctgagtgccaaaagcttgggggaggagggacaggtcctcggcaataaacagtgtcacacacgcatcacagccatttgagaaatggcttctttgcagagctggggaagccgggcagaagatgccgcagcctcctactctgggtcctgagggggggtggcaggtaccacagtgtaggcagcagggtcagggccaaagtctatgcgttccatctccaatccaggcagtgaggaatcctgaaacaccaggagaggcgtcagaagtaggaagggcaggggaacaggaatgcaagattaaggaaaccgcagctgagcaggtgtcacaagctgtaaaggaggaagggagtctgcaggcccttcacatttttggcctgggtggggctgggcccaggaaggggtgggctggattttgtaaagctggaggcagccaggaatctgactgtccggaatgtgagttgaggggtctcccactgaagtcctcttctggaagctgcagatgggggcccgggaggcacacacgagtctgggactcattcccgggcacacctatggctccttcggtatcacctggggaagccccggaatcttagttcttccattccctactcttccttccgagggagtcaggatgggacagacacccattttccaaaaggctccttgcctccttccctggcccacctgaagccaagtcccaggtgtcctggctgctctcctgggcggggtgggatttttgcataagcactttgctgccctccagtggctgcttgaggaaacgcagggcctggtttgggagagtcaccgagggcccatgtggctggaggttgggggcaggatctggcccgagctctcctcagacctccccagacctgtcttctcatcagccaccgctgttttcttttgccgaacgatggttgcatctctcggacacagtgtaccccctcccaagccctccctgagccgttctcctgagtccctgagggcagacacagctccagggacccaggccagctgccacacccccgacactcctgctgtccactggccttagctcctgcaagttccccagtgtccgcacctgttcccttccctgacctcaccttcctggggtctgtgactgactggagataaaaataaaagcaattgtgacacctga

SEQ ID NO: 173859 - DNA, 1256 bp, Artificial Sequence
  derived and/or modified sequence
ggccctgatgcccggctctggtttcacgcgggcagcgtcagctgcgtcctccgcagcatcttcccaggcccggccctctcctccccccgcgccgatggtacgcgccggctcgcctggcccggctgcagtggatgttgctagaacccacgcggaggaaggaagagacgcaggcaggctgcggttacccaagcggccacccgggcctcagggaccccttccccgagagacggcaccatgacccagggaaagctctccgtggctaacaaggcccctgggaccgaggggcagcagcaggtgcatggcgagaagaaggaggctccagcagtgccctcagccccaccctcctatgaggaagccacctctggggaggggatgaaggcaggggccttccccccagcccccacagcggtgcctctccaccctagctgggcctatgtggaccccagcagcagctccagctatgacaacggtttccccaccggagaccatgagctcttcaccactttcagctgggatgaccagaaagttcgtcgagtctttgtcagaaaggtctacaccatcctgctgattcagctgctggtgaccttggctgtcgtggctctctttactttctgtgaccctgtcaaggactatgtccaggccaacccaggctggtactgggcatcctatgctgtgttctttgcaacctacctgaccctggcttgctgttctggacccaggaggcatttcccctggaacctgattctcctgaccgtctttaccctgtccatggcctacctcactgggatgctgtccagctactacaacaccacctccgtgctgctgtgcctgggcatcacggcccttgtctgcctctcagtcaccgtcttcagcttccagaccaagttcgacttcacctcctgccagggcgtgctcttcgtgcttctcatgactcttttcttcagcggactcatcctggccatcctcctacccttccaatatgtgccctggctccatgcagtttatgcagcactgggagcgggtgtatttacattgttcctggcacttgacacccagttgctgatgggtaaccgacgccactcgctgagccctgaggagtatatttttggagccctcaacatttacctagacatcatctatatcttcaccttcttcctgcagctttttggcactaaccgagaatgaggagccctccctgccccaccgtcctccagagaatgcgcccctcctggttccctgtccctcccctgcgctcc

SEQ ID NO: 173860 - DNA, 2094 bp, Artificial Sequence
  derived and/or modified sequence
ctcagtggccctttaggtctaacacagtcttctgggaaccagacctaaatcccattttctgagagccgggctttttgttgctgtttcaatttcacaccaccccctccaccccagtctttccttctctggctgcctcattcaggccttcccagctcaaatcctctcaccaaagctaaacatgtccacgggtggggggcaggggacacatctgagtgtaaatggactcgcatttccaacctgccatggggacgtttccctttgagcctcagtttcctcatctgttcagtgacggaagagactcaactggatgtcttctgaggccccttccactgggtcactctgtgagtctgttctggtttaggggagaggctgagattcctacaggatgaggccagaacagacccttagcctggatcctcttgcccttcctccaccctgaaggcccttcttcttttctgttttctccctctcctcttccctttctgttgcccttctctctcccatctccattctccttgcatcacttccagcgcaacagaaggatcaatcccagtggatgatgcctaggccctgcctctcagtgggccacatgcagctctgtgaccttggatgaatcgctcttcctctgtgatcctcattctcctcattttaaagcaggggtcaaaatgcagctagcaagtctcaggaagattaaatgacataaccttttatttgtaacaatctactatgtgccaggctcttttctggaaccatagagaccctgcccctaccccagggacaatgacagtgacaaccaatggtggacactcctaagaattttctctttcctctgttcctatcccagctccaccatgtgccccagctagctctgacccctctggagcttagttctcttgtctataaaatagagacattcttgtctgcattcctggcttccaagtgcaggtaaggaaggaaccatgaaagttccaggaattgaagagttggtgaggaggaggagttggaaggctccctttccctggtgactatctctctctctgactctactccatagctctccgtggctaacaaggcccctgggaccgaggggcagcagcaggtgcatggcgagaagaaggaggctccagcagtgccctcagccccaccctcctatgaggaagccacctctggggaggggatgaaggcaggggccttccccccagcccccacagcggtgcctctccaccctagctgggcctatgtggaccccagcagcagctccagctatgacaacggtttccccaccggagaccatgagctcttcaccactttcagctgggatgaccagaaagttcgtcgagtctttgtcagaaaggtctacaccatcctgctgattcagctgctggtgaccttggctgtcgtggctctctttactttctgtgaccctgtcaaggactatgtccaggccaacccaggctggtactgggcatcctatgctgtgttctttgcaacctacctgaccctggcttgctgttctggacccaggaggcatttcccctggaacctgattctcctgaccgtctttaccctgtccatggcctacctcactgggatgctgtccagctactacaacaccacctccgtgctgctgtgcctgggcatcacggcccttgtctgcctctcagtcaccgtcttcagcttccagaccaagttcgacttcacctcctgccagggcgtgctcttcgtgcttctcatgactcttttcttcagcggactcatcctggccatcctcctacccttccaatatgtgccctggctccatgcagtttatgcagcactgggagcgggtgtatttacattgttcctggcacttgacacccagttgctgatgggtaaccgacgccactcgctgagccctgaggagtatatttttggagccctcaacatttacctagacatcatctatatcttcaccttcttcctgcagctttttggcactaaccgagaatgaggagccctccctgccccaccgtcctccagagaatgcgcccctcctggttccctgtccctcccctgcgctcctgcgagaccagatataaaactagctgccaaccc

SEQ ID NO: 173861 - DNA, 951 bp, Artificial Sequence
  derived and/or modified sequence
atgacccagggcaagctgagcgtggccaataaggccccgggcacggagggacagcagcaggttcacggcgagaagaaagaagcccccgccgtgcctagtgccccaccatcatacgaggaggcaacgtcaggggagggtatgaaagcaggcgcatttccacccgctccaaccgctgtgccactgcatccttcttgggcttatgttgatccaagctcttcctcctcatacgacaacggatttcctaccggagatcacgagctgttcaccaccttctcttgggacgatcagaaggtgcggcgtgtattcgtacgcaaagtgtacaccatcttattaatccagcttttggttaccttagccgtggttgcactgttcaccttctgcgacccagtgaaggactatgtgcaggctaaccctggttggtattgggccagctacgccgttttctttgcaacctatcttactctggcatgttgcagcggcccacgccgccattttccctggaatcttatcctcctgaccgtatttacgctcagtatggcttatcttaccgggatgctgtcctcatactacaatacaacatcagtgctgctctgcctcggcatcaccgcactggtctgcctctcagtcaccgtcttcagctttcaaaccaagttcgattttaccagctgtcagggcgtcctgtttgtgttattgatgacactgttcttcagtggactgatcctggccatactgctgccattccagtatgtcccttggctgcatgctgtatacgctgctcttggagctggcgtgtttacattgtttttagctctggacacccaactattgatgggaaacagacggcacagtttgagccctgaggagtacattttcggcgcactcaacatttatttagatatcatctatattttcacttttttcttgcaactctttggaactaaccgggagtag

SEQ ID NO: 173862 - DNA, 951 bp, Artificial Sequence
  derived and/or modified sequence
atgacacaggggaaactgtccgtcgcgaacaaagcccctggtaccgagggccaacaacaggtgcatggtgagaaaaaagaagcacccgccgtaccaagcgcgcccccatcctacgaggaggccacatctggcgagggcatgaaggccggtgcctttccccctgctccaactgctgtcccactgcaccccagttgggcctatgtcgatccttcaagctcgtcttcgtacgacaatggctttcccacaggcgaccatgagttatttaccacctttagttgggatgaccagaaggtccgccgcgtctttgttaggaaagtctatacgatcctcctgatccagttgttagtaaccctcgctgtggtcgctctgtttaccttttgcgatccagtaaaggactatgtgcaggcaaatccgggatggtattgggcttcttacgccgtgttctttgccacataccttaccctcgcatgttgctcaggccctcgacgtcactttccctggaacctcattctcctgaccgtcttcacactgagcatggcatacctgacgggtatgctttcatcttactacaacaccacctccgtactgctctgtctgggcattaccgccctggtgtgtctttctgttacagtgttcagtttccagaccaagttcgacttcactagctgccagggcgtgctgtttgtccttctcatgacactcttcttcagcggcctcatcctggccatcttgctgcccttccagtacgtgccctggttacatgccgtgtacgccgccctgggcgcgggcgtttttacacttttcctggcactcgacacccagcttctaatgggcaaccgccgccattccctgagccctgaagaatacatctttggcgccctgaatatctacctggacataatttacattttcacgttcttcctgcaactttttggtaccaatagagagtag

SEQ ID NO: 173863 - DNA, 813 bp, Artificial Sequence
  derived and/or modified sequence
atgaaagcaggtgctttcccccctgcccccactgccgtgcccctgcacccctcttgggcttatgttgatccctcctcatcaagttcttacgataatggctttcccacgggcgaccatgaactgttcactactttctcctgggacgatcagaaggttcgaagagtgttcgttcgaaaagtgtatacaattttgttgatccagctgctcgtgacactggccgtggtggccctgtttaccttttgtgatcctgtcaaggattatgtgcaggccaatcctggctggtactgggctagctacgccgtgttcttcgccacgtacctgactctggcatgttgctctggtcctcggcgtcatttcccttggaacttaatcttactcaccgtctttacattgtcaatggcatatcttactggtatgttatccagctactataatacgacttccgtgctgctgtgtttaggtattaccgctcttgtgtgcctctccgtgaccgtgttctcttttcagaccaagtttgacttcaccagctgccagggcgtcctattcgtgttgctgatgactctgttcttcagcggcctgattctggcaattttgttgcccttccaatacgtcccctggttgcacgcagtatacgctgctctgggcgccggagtgttcaccttgttcctggcgctagacacacagttgcttatgggtaataggagacacagtttgagccctgaggagtacatctttggtgcattaaatatatatctggacatcatctatatatttactttcttcttacaactgtttggcaccaaccgggagtag

SEQ ID NO: 173864 - DNA, 951 bp, Artificial Sequence
  derived and/or modified sequence
atgacccagggcaagctgtctgtggccaacaaggcccctggaacagagggccagcagcaggtgcacggggagaagaaggaggccccagctgtgcccagcgcccctccttcctatgaggaggccaccagcggggagggcatgaaggccggggccttccccccagcccccacagctgtgcccctgcaccccagctgggcctacgtggaccccagcagcagcagcagctatgacaatggcttccccaccggggaccacgagctgttcaccaccttctcctgggatgaccagaaggtgagaagagtgtttgtgaggaaggtgtacaccatcctgctgatccagctgctggtgaccctggccgtggtggccctcttcaccttctgtgaccctgtgaaggactatgtgcaggccaaccctggctggtactgggccagctatgctgtgttctttgccacctacctgaccctggcctgctgcagcggcccccggcggcacttcccctggaacctgatcctgctgactgtgttcaccctgtccatggcctacctgaccggcatgctgagcagctactacaacaccacctctgtgctgctgtgcctgggcatcacagccctggtgtgcctgtctgtgaccgtcttctccttccagaccaagtttgacttcaccagctgccagggcgtgctgtttgtgctgctgatgaccctcttcttcagcggcctcatcctggccatcctgctgcccttccagtatgtgccctggctgcatgctgtgtatgctgccctgggcgctggggtcttcaccctcttcctggccctggacacccagctgctgatgggcaacagaagacacagcctgagccctgaggagtacatctttggagccctgaacatctacctggacatcatctacatcttcaccttcttcctgcagctgtttggcaccaaccgggagtag

SEQ ID NO: 173865 - DNA, 813 bp, Artificial Sequence
  derived and/or modified sequence
atgaaggccggggccttccccccagcccccacagctgtgcccctgcaccccagctgggcctacgtggaccccagcagcagcagcagctatgacaatggcttccccaccggggaccacgagctgttcaccaccttctcctgggatgaccagaaggtgagaagagtgtttgtgaggaaggtgtacaccatcctgctgatccagctgctggtgaccctggccgtggtggccctcttcaccttctgtgaccctgtgaaggactatgtgcaggccaaccctggctggtactgggccagctatgctgtgttctttgccacctacctgaccctggcctgctgcagcggcccccggcggcacttcccctggaacctgatcctgctgactgtgttcaccctgtccatggcctacctgaccggcatgctgagcagctactacaacaccacctctgtgctgctgtgcctgggcatcacagccctggtgtgcctgtctgtgaccgtcttctccttccagaccaagtttgacttcaccagctgccagggcgtgctgtttgtgctgctgatgaccctcttcttcagcggcctcatcctggccatcctgctgcccttccagtatgtgccctggctgcatgctgtgtatgctgccctgggcgctggggtcttcaccctcttcctggccctggacacccagctgctgatgggcaacagaagacacagcctgagccctgaggagtacatctttggagccctgaacatctacctggacatcatctacatcttcaccttcttcctgcagctgtttggcaccaaccgggagtag

SEQ ID NO: 173866 - DNA, 951 bp, Artificial Sequence
  derived and/or modified sequence
atgacccagggcaagctgagcgtggccaacaaggcccccggcaccgaagggcagcagcaggtccacggagagaagaaggaggcgccagcagtgccttccgctcctccatcttatgaggaggcaacatcaggggaggggatgaaggctggcgccttccctcccgcccccactgcggtgccgctgcaccccagctgggcgtatgtggacccatctagctcaagttcttacgacaatgggtttccaacaggcgaccatgagctcttcactaccttcagttgggacgatcagaaggtgcgacgagtattcgtgaggaaggtttacactatcctgctgattcaactcttggtgacccttgcggttgtggccctttttacattttgtgatcctgtgaaggactatgttcaggctaatcccgggtggtattgggcaagttatgccgttttctttgccacatacctgacactcgcatgttgtagcggaccgcgccgacacttcccatggaatctaattctgcttacagtgttcactttgtcaatggcctacctcaccggcatgttatcatcatattacaacaccactagtgtcttattatgtctgggaatcaccgcactcgtctgcttgtccgtaactgtgttcagctttcagactaagttcgactttactagctgtcagggcgtgctctttgttcttctgatgacactttttttcagtggactaatactggccatcctgctccccttccagtacgtgccctggctgcatgctgtctacgcagcgctgggggcaggggtctttacccttttcctcgcgcttgatactcagttgcttatggggaatcgccgacatagtctgagtcctgaggaatacatcttcggtgccctgaatatctacctcgatattatatatatttttacgttttttctgcaattgtttggaactaacagggaatag

SEQ ID NO: 173867 - DNA, 951 bp, Artificial Sequence
  derived and/or modified sequence
atgacccagggcaagctgagcgtggccaacaaggcccccggcaccgagggacagcaacaggttcatggagaaaaaaaggaagcccctgccgtgccctctgcccccccgagctatgaggaggccacttccggcgaaggaatgaaagctggcgcttttccacctgcacccaccgctgtacccctccacccctcgtgggcctatgtggacccatcttcctctagctcttatgacaatggctttcctaccggcgatcacgagctgtttacaacattttcctgggatgatcaaaaagtgaggcgagtgtttgtgcgcaaggtctatactattctcctgatccagttgctcgtcaccctggccgtggtcgctctgtttaccttctgcgaccccgttaaggactatgtccaagccaaccccgggtggtattgggcgagctatgctgtgttttttgccacctacctgacactcgcttgctgctccgggccgcggcgacacttcccgtggaacctgatccttctcacagtcttcacactcagtatggcgtacctgaccggtatgctcagcagttattataacactacatcagttttgctttgtctcggcattaccgctttggtctgcctcagcgttaccgtgtttagcttccaaacaaaatttgacttcacctcctgtcaaggcgtgctgttcgttctgcttatgacccttttcttctctgggttaattcttgctattctgcttcctttccagtatgtgccctggttgcatgctgtctatgcagcattgggggccggcgtgtttacccttttcctcgctctggacacccagcttctgatgggaaaccggagacattcactgagccccgaggaatatatctttggcgctttaaatatatacttggatattatttatattttcactttcttcctccaactcttcggcaccaaccgcgaatag

SEQ ID NO: 173868 - DNA, 813 bp, Artificial Sequence
  derived and/or modified sequence
atgaaggccggcgccttcccccccgcccccaccgccgtgcccctgcatccatcctgggcctacgtagacccttcttcctcaagttcatacgacaatggcttccccaccggggaccacgaactctttacaacatttagctgggatgaccagaaggttcgccgcgtgttcgtgcgaaaagtgtacacaatccttcttattcagcttctggtcactcttgccgtcgtggccctgtttacattctgcgaccctgttaaagactatgtacaggcaaatcccggatggtattgggcgtcctatgccgtgttcttcgcaacatatcttactttagcatgctgttccggtcccagacggcactttccttggaatctcattctgctcaccgttttcaccctatccatggcatacctaaccggtatgttgagctcttattacaacacaacctccgtgctgctgtgtctggggatcacggctctcgtttgcctgtcggtgaccgtattctcttttcagaccaaatttgattttacttcatgccaaggcgtgcttttcgtgttgctgatgactctgtttttctccggcttaatcctggctatcctcttgccgtttcaatatgtgccttggctccatgccgtctacgccgcactaggggcaggcgttttcacactgttcctcgccctcgatacacagctgctcatgggcaatcgaaggcattctctgtcacccgaggaatatatcttcggcgccttgaatatttacctggacattatttacatttttacattcttcttgcagcttttcgggaccaaccgcgaatag

SEQ ID NO: 173869 - DNA, 951 bp, Artificial Sequence
  derived and/or modified sequence
atgactcagggaaagctgtctgttgctaacaaagcccctggcaccgagggccaacagcaggttcacggggaaaaaaaggaggcgcctgcagtccctagcgcacccccatcatatgaagaggccacttccggtgaaggcatgaaagccggagcgtttccacccgctcccactgcagttcccctgcatccaagctgggcctacgtggatccttcctcatcctcttcctacgacaatggattcccgaccggggatcacgagctcttcaccacgttttcctgggacgatcaaaaggtacggagggttttcgtgagaaaagtgtacacaatccttctgatacagttgctggtgacactggcggtagttgcattgttcaccttttgtgaccccgtcaaagattacgtgcaggctaatccagggtggtattgggcttcttacgctgtgttctttgctacatatctcactctggcttgttgttcagggccacgacgacactttccatggaatctcattctgctaactgtcttcaccctttcaatggcgtatttaactgggatgctctcctcttattataacaccacgtccgtgttgctgtgccttggcatcaccgctttggtgtgcctttccgttacagtgttttcgtttcaaacaaaattcgattttacttcctgccaaggcgtcttatttgtgttactgatgacactttttttctccgggctgatcctcgccattcttttgccgttccagtatgtcccttggctgcacgctgtgtatgcggctttgggagccggagtcttcacactattcttggctttagacactcagctgttgatgggcaatagaagacactccctttccccggaggagtacatctttggcgctcttaatatctacctcgatattatctatatttttaccttctttttgcagctgttcgggacgaaccgtgagtag

SEQ ID NO: 173870 - DNA, 951 bp, Artificial Sequence
  derived and/or modified sequence
atgacccagggcaaactctcagtggctaacaaagccccaggcaccgagggccagcagcaggtgcatggagagaagaaggaggctccagccgtgccctcagctcctccatcttatgaagaagctacttcgggcgaaggtatgaaggccggtgcgtttcccccagctcctacggccgtgcccctacacccctcctgggcctacgtagacccaagctccagctccagttacgacaacggtttccctaccggcgaccacgagctcttcaccacattttcctgggatgatcagaaagtaaggcgcgtgttcgtgagaaaggtctacacaatactactgattcaactcctcgtgacattggcagttgtcgccctgttcactttttgcgatcccgtcaaggattacgtccaagccaaccctggctggtactgggcttcttacgctgtcttctttgcgacatacttgaccctggcctgctgcagtggcccaagacggcactttccgtggaatcttattctgctaaccgtgtttacgctgtccatggcctaccttaccggtatgcttagcagctattacaataccacatccgtgctcctgtgcttggggatcacagctttagtctgcctgtcagtaaccgtcttctcttttcagactaagttcgatttcacctcctgtcagggagtgctgtttgtgctactgatgactctgttttttagcgggttaatactagctattcttctcccttttcagtacgtgccctggttacacgccgtgtacgccgctctgggtgctggcgtctttaccctgtttctggccttagatacccagctgctcatggggaaccgtaggcactccttatcgcccgaggagtatatctttggggcactgaacatctatctggatataatctacatcttcactttctttctacagctctttggcacaaaccgagagtag

SEQ ID NO: 173871 - DNA, 813 bp, Artificial Sequence
  derived and/or modified sequence
atgaaagccggtgcatttccgcctgcgcctactgctgttcctttgcacccatcttgggcctacgtcgatccaagctcttcttcgtcctacgacaacgggtttcccactggagaccacgagcttttcaccacgttctcttgggatgatcagaaagtgcggagggtgtttgttcgaaaagtgtacactatcctcctgatacagcttctcgtgacgctggcggtcgtcgcattattcaccttctgcgaccctgtgaaagactatgtgcaggctaatcccggttggtactgggcctcatatgccgttttctttgctacatatctgacactggcatgttgtagcgggccacgcagacattttccctggaatctaatacttctaactgtcttcaccctttcgatggcctacctgactggcatgctcagcagctattataataccaccagcgtcctcctttgtctgggaattactgccctggtctgtctctctgtcaccgtttttagcttccagacaaagtttgatttcacctcttgtcagggcgtgctgtttgtgctgctgatgaccctttttttcagtgggcttatccttgccattctgctgccatttcaatacgttccctggcttcatgccgtctatgccgctcttggagcgggtgtgtttacgctatttttggcccttgatacacagctcctaatggggaaccgcagacacagtctgtcacccgaggagtatatcttcggcgctctgaatatttatctggatattatttatatttttaccttttttctccagctgttcggtacaaaccgcgagtag

SEQ ID NO: 173872 - DNA, 951 bp, Artificial Sequence
  derived and/or modified sequence
atgacccagggcaagctgagcgtggccaacaaggcccccggcaccgagggccagcagcaggtgcacggcgagaagaaggaggcccccgccgtgcccagcgccccccccagctacgaggaggccaccagcggcgagggcatgaaggccggcgccttcccccccgcccccaccgccgtgcccctgcaccccagctgggcctacgtggaccccagcagcagcagcagctacgacaacggcttccccaccggcgaccacgagctgttcaccaccttcagctgggacgaccagaaggtgagaagagtgttcgtgagaaaggtgtacaccatcctgctgatccagctgctggtgaccctggccgtggtggccctgttcaccttctgcgaccccgtgaaggactacgtgcaggccaaccccggctggtactgggccagctacgccgtgttcttcgccacctacctgaccctggcctgctgcagcggccccagaagacacttcccctggaacctgatcctgctgaccgtgttcaccctgagcatggcctacctgaccggcatgctgagcagctactacaacaccaccagcgtgctgctgtgcctgggcatcaccgccctggtgtgcctgagcgtgaccgtgttcagcttccagaccaagttcgacttcaccagctgccagggcgtgctgttcgtgctgctgatgaccctgttcttcagcggcctgatcctggccatcctgctgcccttccagtacgtgccctggctgcacgccgtgtacgccgccctgggcgccggcgtgttcaccctgttcctggccctggacacccagctgctgatgggcaacagaagacacagcctgagccccgaggagtacatcttcggcgccctgaacatctacctggacatcatctacatcttcaccttcttcctgcagctgttcggcaccaacagagagtag

SEQ ID NO: 173873 - DNA, 813 bp, Artificial Sequence
  derived and/or modified sequence
atgaaggccggcgccttcccccccgcccccaccgccgtgcccctgcaccccagctgggcctacgtggaccccagcagcagcagcagctacgacaacggcttccccaccggcgaccacgagctgttcaccaccttcagctgggacgaccagaaggtgagaagagtgttcgtgagaaaggtgtacaccatcctgctgatccagctgctggtgaccctggccgtggtggccctgttcaccttctgcgaccccgtgaaggactacgtgcaggccaaccccggctggtactgggccagctacgccgtgttcttcgccacctacctgaccctggcctgctgcagcggccccagaagacacttcccctggaacctgatcctgctgaccgtgttcaccctgagcatggcctacctgaccggcatgctgagcagctactacaacaccaccagcgtgctgctgtgcctgggcatcaccgccctggtgtgcctgagcgtgaccgtgttcagcttccagaccaagttcgacttcaccagctgccagggcgtgctgttcgtgctgctgatgaccctgttcttcagcggcctgatcctggccatcctgctgcccttccagtacgtgccctggctgcacgccgtgtacgccgccctgggcgccggcgtgttcaccctgttcctggccctggacacccagctgctgatgggcaacagaagacacagcctgagccccgaggagtacatcttcggcgccctgaacatctacctggacatcatctacatcttcaccttcttcctgcagctgttcggcaccaacagagagtag

SEQ ID NO: 173874 - protein, 1087 aa, Artificial Sequence
  derived and/or modified sequence
MTTESGSDSESKPDQEAEPQEAAGAQGRAGAPVPEPPKEEQQQALEQFAAAAAHSTPVRREVTDKEQEFAARAAKQLEYQQLEDDKLSQKSSSSKLSRSPLKIVKKPKSMQCKVILLDGSEYTCDVEKRSRGQVLFDKVCEHLNLLEKDYFGLTYRDAENQKNWLDPAKEIKKQVRSGAWHFSFNVKFYPPDPAQLSEDITRYYLCLQLRDDIVSGRLPCSFVTLALLGSYTVQSELGDYDPDECGSDYISEFRFAPNHTKELEDKVIELHKSHRGMTPAEAEMHFLENAKKLSMYGVDLHHAKDSEGVEIMLGVCASGLLIYRDRLRINRFAWPKVLKISYKRNNFYIKIRPGEFEQFESTIGFKLPNHRAAKRLWKVCVEHHTFFRLLLPEAPPKKFLTLGSKFRYSGRTQAQTRRASALIDRPAPYFERSSSKRYTMSRSLDGEVGTGQYATTKGISQTNLITTVTPEKKAEEERDEEEDKRRKGEEVTPISAIRHEGKSPGLGTDSCPLSPPSTHCAPTSPTELRRRCKENDCKLPGYEPSRAEHLPGEPALDSDGPGRPYLGDQDVAFSYRQQTGKGTTLFSFSLQLPESFPSLLDDDGYLSFPNLSETNLLPQSLQHYLPIRSPSLVPCFLFIFFFLLSASFSVPYALTLSFPLALCLCYLEPKAASLSASLDNDPSDSSEEETDSERTDTAADGETTATESDQEEDAELKAQELEKTQDDLMKHQTNISELKRTFLETSTDTAVTNEWEKRLSTSPVRLAARQEDAPMIEPLVPEETKQSSGEKLMDGSEIFSLLESARKPTEFIGGVTSTSQSWVQKMETKTESSGIETEPTVHHLPLSTEKVVQETVLVEERRVVHASGDASYSAGDSGDAAAQPAFTGIKGKEGSALTEGAKEEGGEEVAKAVLEQEETAAASRERQEEQSAAIHISETLEQKPHFESSTVKTETISFGSVSPGGVKLEISTKEVPVVHTETKTITYESSQVDPGTDLEPGVLMSAQTITSETTSTTTTTHITKTVKGGISETRIEKRIVITGDADIDHDQALAQAIKEAKEQHPDMSVTKVVVHKETEITPEDGED

SEQ ID NO: 173875 - DNA, 3264 bp, Artificial Sequence
  derived and/or modified sequence
atgactaccgaatctggctcggattccgaatcgaaaccagaccaggaggcggaaccgcaagaggcagcgggagcccagggcagggctggggcgccagtcccggagcctcccaaggaggaacaacagcaggccctcgaacagttcgccgctgctgctgcccattcgacccccgttagacgggaggtgactgataaagaacaggaatttgcagcaagggctgccaagcaactcgaatatcagcagttagaagatgacaagctgagccagaagagctcatcctccaaactgtctcgttctcccctcaagattgtcaaaaagccaaagagcatgcaatgcaaggtaattcttctggatggctccgagtacacctgcgacgtggagaagcggtccaggggacaagtactttttgacaaggtatgtgagcacctcaacctgcttgagaaagactatttcggactgacttatagagacgccgaaaatcagaaaaattggctcgacccagccaaagaaatcaagaaacaggtgcgaagcggagcctggcactttagtttcaacgtgaagttttacccaccagacccagcgcagctcagcgaagacatcacacgctattatctatgtcttcaactgcgggatgacatcgtctccggtcgactgccctgcagcttcgtgactctcgccctcttggggtcctacactgtccagtccgagcttggggattatgatcctgatgagtgtggaagtgactacatctccgagttccgcttcgctccgaaccataccaaggagctagaagacaaggtcatcgaattgcacaagtctcaccgcggaatgacacctgccgaagctgaaatgcatttcttagagaacgccaagaagttaagtatgtatggcgttgacctgcaccatgctaaggattccgaaggggtggaaatcatgctcggcgtctgcgcttcaggtttactgatctacagggaccgcctcaggatcaacagattcgcctggcctaaagtgctgaagatcagctataagcgaaataacttttatattaagattcgtccaggggagttcgagcagtttgagtccaccattggtttcaaactgccaaaccacagagctgccaaacgactgtggaaggtttgtgtggagcatcacaccttcttccgcctgcttctgccggaggccccaccgaagaagttcctgaccctgggctctaagttcagatattctggccgtacccaggcccagactcggcgagccagcgcattaatagatcggccagctccttatttcgagaggagttcaagtaaaagatacactatgagtaggtcactagatggcgaggttggaaccggccagtacgctacaacaaaggggatttctcagaccaatctgattacaacagttacgccagagaaaaaggccgaggaggaaagagatgaagaagaggacaagagacgtaagggcgaagaagtgacgcctatttccgccatccgacatgaaggcaagagtcccggcttggggacagattcttgtcccttgtcccccccgtccacccactgtgctccaacaagccccacggagctgcgacgccgctgtaaggagaatgattgtaaattgcctgggtatgaaccctcgcgtgccgaacatctgcctggcgaacctgccctggactcagatggaccgggtcgcccttacttgggcgatcaggatgtggctttttcttaccgccagcagacaggtaagggcaccacactcttttctttttccttgcaattgcccgagtccttcccttcattgctggacgacgacggctaccttagctttcctaatctctccgagacaaacctgcttccccagagtttgcagcattatctcccaatcagaagcccgtccctcgttccatgctttctgtttatttttttcttcctcctttccgccagtttcagtgtgccctacgccctgacgctcagcttcccattggctctctgtctatgctacctggagcccaaagcagccagcctaagcgcgtccctggacaacgacccaagtgatagtagcgaggaggagaccgattcggaaagaactgataccgcagcagatggcgaaacgaccgcaaccgaatccgaccaagaggaggatgctgaacttaaagcacaagagctggagaaaacccaagacgatctcatgaagcaccagacaaacatttcagagctgaaacgtacattcctcgagacctccactgacacggccgtgacaaacgaatgggagaaacgactcagcactagcccggtccgcctggccgccaggcaagaagacgcccctatgatcgaacctctggtaccagaggagaccaagcagtcatcaggcgagaagctcatggacggctctgaaatcttctcattgcttgagtcggcaagaaaacctacagagtttataggcggggtcacgagcacctcccagtcctgggtgcagaaaatggaaaccaagacagagtcatccggcattgagaccgagcccaccgtgcaccatttgcctctgtccacggagaaggtggtgcaggagacggtgctggtggaggaaaggcgcgtggtgcatgcctcaggagatgcatcctactccgccggggacagtggtgacgccgctgctcagccggctttcaccggcattaaaggcaaggaaggcagcgcgttaacagaaggggccaaagaagaaggtggagaagaggtggccaaggccgttctcgaacaggaggagaccgcagccgccagccgcgagagacaagaagagcagagcgccgcaatacacataagcgagactttagagcaaaaaccccattttgagagtagcaccgtgaaaactgaaaccatctcttttggcagcgtttccccaggtggagtcaaacttgagatcagtaccaaggaggtgcccgtggttcatactgaaacaaagacaatcacatacgagtcaagtcaagtggatcctggaaccgacctagagccgggcgtgttgatgtcggcccaaacaataaccagcgagacaacaagcacaacaacaactacacacatcacaaagacagtcaagggtggaatcagtgaaacaagaattgagaagcgtatagttataaccggcgatgctgatatcgaccatgaccaggcactggcccaggccatcaaggaagctaaagaacagcacccggacatgagtgtgaccaaagtagtcgttcacaaggagacggagatcactccagaagatggtgaagactag

SEQ ID NO: 173876 - DNA, 3264 bp, Artificial Sequence
  derived and/or modified sequence
atgacaactgaaagtggtagcgactccgagtcaaaacccgatcaggaggccgagcctcaagaggccgcaggtgcccagggaagagccggggcccctgtgccagagcctcccaaggaggagcagcagcaagctctggaacagttcgctgctgcagcagcacatagtactccagttaggcgagaggtcaccgataaagagcaggaatttgcggcgcgagcagccaagcagctggaataccagcaactggaggacgacaagctaagccagaagtccagctcaagcaaactctcgagaagcccacttaaaattgtgaaaaagcccaagtcaatgcagtgcaaggtgattctactggatggcagcgagtacacctgtgatgtcgagaaaagaagcaggggccaagtgctgttcgataaggtgtgtgagcacctgaatcttctggagaaggactactttgggctcacatacagagatgccgagaaccagaagaattggctggatcccgccaaggagattaagaaacaggttagatcgggggcttggcatttctcgttcaatgttaagttctaccctccagaccccgcacagctgagtgaagacattacacgctactacctttgtctccaactccgcgacgatatcgtgagtggtcggctgccttgttcttttgttaccctggccctgctcggtagttacacggttcaatccgaattgggcgactatgatccagatgagtgtggctctgactacattagcgagtttagatttgccccaaatcacaccaaagagttggaagacaaggtgattgaactgcataaaagccacaggggaatgacacctgccgaagcagaaatgcacttcttagaaaatgccaagaaactcagtatgtacggagttgacttacaccacgccaaggactctgaaggtgtcgaaattatgctaggcgtgtgcgcaagcggactcctgatatatcgcgatcgactccgcatcaaccggttcgcctggcccaaagttctgaaaatttcctacaagaggaacaacttttacatcaagattcgccccggagaattcgagcagttcgaatctaccatcggatttaaattgccaaaccacagagcggccaaacgcctgtggaaggtttgcgttgagcatcatacttttttcagattgctcctgcccgaagctccgccaaagaaatttctgacgctgggctccaaattcaggtactccgggagaacccaagcccaaactcgtcgcgcatctgcgctaattgatcgtcccgccccatatttcgaacggtctagtagtaaacgatacaccatgagcagatctctggatggggaggtgggaacaggccagtacgccactactaaaggcatcagccagaccaacctgattactactgtgaccccagaaaagaaagcagaggaggagagagacgaagaagaggacaagaggaggaagggcgaagaggtgacacccatcagtgctatcagacatgagggcaaaagccctggcttgggcaccgattcatgtcccctttcacccccaagtactcactgcgcccccacgtctcccaccgagctgagaagacgctgtaaggagaacgactgtaaactgcccggctatgagcccagtcgagctgagcacctgccaggcgaaccagcactagattcggacgggcccggtcgcccgtatttgggggatcaggatgttgctttttcctataggcagcaaacggggaaaggaacaacattgttttctttttctcttcagctccctgaatcgttcccatcgcttctcgatgacgatggatacctgtcctttccaaatctttctgagactaaccttctacctcagtcattgcagcactatttgccaattcgaagcccttccttagttccctgttttttgtttatcttcttctttcttctgagtgcaagtttcagcgtcccatatgcacttacactttcattccctctcgcactttgtctatgttacctcgagcccaaggcagcaagcttaagcgcgagcctggataatgaccctagtgattcttctgaggaggagaccgattctgaaaggacggacaccgccgccgacggggaaactaccgcaactgagtctgaccaggaagaggacgccgagctgaaagcccaggagttagagaaaacacaggatgacttgatgaaacatcagaccaatatctccgagctcaaacgaaccttcctggagacatccacagatacagccgtgacaaatgaatgggagaagcgtctcagcacgagtcctgttcggttggccgccaggcaagaggacgcccctatgatcgaacctctcgtcccagaggagaccaagcagtcttctggggagaagctgatggatgggagcgagatctttagtctgctcgagtcggcccgcaagcctactgagtttattggcggtgtgaccagcacgtctcagtcttgggtgcagaaaatggaaacaaaaaccgagtcttccggtatcgagacagaacccacggtgcaccacctaccgttgtctaccgagaaagtagtccaagagacagtgctggtggaagagcgcagagtcgtgcatgcgagtggtgatgccagctactccgccggtgattccggagacgcggcagcacagccggcatttacggggatcaagggtaaggagggtagcgcccttaccgaaggcgccaaagaggagggtggagaagaggtagcaaaggccgtactggaacaggaggagacagctgcagctagcagagagcgacaggaggagcagtctgcagccatccacattagcgagaccctggaacagaagcctcactttgaatccagcacagtgaaaactgagacaatatccttcggatcagtcagcccaggtggagtcaaactggagatcagtacaaaagaggtgcccgttgttcacaccgagaccaaaactatcacatatgagtcatcacaggtcgatcctggcaccgatctcgaaccaggagtgctgatgagtgcccaaactatcaccagcgagacaaccagtacaaccacgactactcacattacgaaaaccgttaagggcggaatttccgaaacccgcatcgagaaaaggattgtaataaccggagacgccgatatcgaccacgaccaggccctcgcgcaggccatcaaagaagcaaaagaacagcatccagatatgtctgtgactaaggtcgtggttcacaaggagactgagattacgcctgaggatggcgaagattag

SEQ ID NO: 173877 - DNA, 3264 bp, Artificial Sequence
  derived and/or modified sequence
atgaccacagaaagtggcagtgacagcgagagcaagccagaccaggaggccgagccccaggaggccgccggggcccagggccgggccggggcccctgtgcctgagccccccaaggaggagcagcagcaggccctggagcagtttgctgctgctgctgcccacagcacccctgtgagaagagaggtgacagacaaggagcaggagtttgctgcccgggccgccaagcagctggagtaccagcagctggaggatgacaagctgagccagaagagcagcagcagcaagctgagccgcagccccctgaagatcgtgaagaagcccaagtccatgcagtgcaaggtgatcctgctggatggcagcgagtacacctgtgatgtggagaagaggagccggggccaggtgctgtttgacaaggtgtgtgagcacctgaacctgctggagaaggactacttcggcctgacctacagagatgctgagaaccagaagaactggctggaccctgccaaggagatcaagaagcaggtgcgcagcggggcctggcacttctccttcaacgtgaagttctaccccccagaccctgcccagctgtctgaggacatcacccgctactacctgtgcctgcagctgagagatgacatcgtgtctggccgcctgccctgcagctttgtgaccctggccctgctgggcagctacacagtgcagagcgagctgggggactatgaccctgatgaatgtggcagtgactacatcagcgagttccgctttgcccccaaccacaccaaggagctggaggacaaggtgattgagctgcacaagagccaccggggcatgaccccagctgaggccgagatgcacttcctggagaatgccaagaagctgtccatgtatggagtggacctgcaccacgccaaggacagcgagggcgtggagatcatgctgggcgtgtgtgccagcggcctgctgatctacagagaccggctgcgcatcaacagatttgcctggcccaaggtgctgaagatctcctacaagaggaacaacttctacatcaagatccggcctggagaatttgagcagtttgagagcaccatcggcttcaagctgcccaaccaccgggccgccaagaggctgtggaaggtgtgtgtggagcaccacaccttcttccggctgctgctgcctgaggccccacccaagaagttcctgaccctgggcagcaagttccgctacagcggccgcacccaggcccagacccggcgggccagcgccctgattgacaggcctgccccctactttgagaggagcagcagcaagcgctacaccatgagccgcagcctggatggagaggtgggcaccggccagtatgccaccaccaagggcatcagccagaccaacctgatcaccaccgtgaccccagagaagaaggccgaggaggagagagatgaggaggaggacaagagaagaaaaggagaggaggtgacccccatcagcgccatcagacatgagggcaagagccctggcctgggcacagacagctgccccctgagcccccccagcacccactgtgcccccaccagccccacagagctgcggcggcgctgcaaggaaaatgactgcaagctgcccggctatgagcccagcagagctgagcacctgcctggagagcccgccctggacagtgatggccctggccggccctacctgggggaccaggatgtggccttctcctaccggcagcagacaggcaagggcaccaccctcttctccttcagcctgcagctgcctgagagcttccccagcctgctggatgatgatggctacctgtccttccccaacctgtctgagaccaacctgctgccccagagcctgcagcactacctgcccatccgcagccccagcctggtgccctgcttcctgttcatcttcttcttcctgctgagcgccagcttctctgtgccctatgccctgaccctgtccttccccctggccctgtgcctgtgctacctggagcccaaggccgccagcctgagcgccagcctggacaatgaccccagcgacagcagcgaggaggagacagacagcgagaggacagacacagctgctgatggagagaccacagccacagaaagtgaccaggaggaggatgctgagctgaaggcccaggagctggagaagacccaggatgacctgatgaagcaccagaccaacatcagcgagctgaagaggaccttcctggagaccagcacagacacagctgtgaccaatgagtgggagaagaggctgagcaccagccctgtgcggctggccgcccggcaggaggatgcccccatgattgagcccctggtgcctgaggagaccaagcagagcagcggggagaagctgatggatggcagcgagatcttcagcctgctggagagcgccaggaagcccacagagttcatcggcggcgtgaccagcaccagccagagctgggtgcagaagatggagaccaagacagagagcagcggcattgaaacagagcccaccgtgcaccacctgcccctgagcacagagaaggtggtgcaggagaccgtgctggtggaggagaggagagtggtgcacgccagcggagatgccagctacagcgctggggacagcggagatgctgctgcccagcctgccttcaccggcatcaagggcaaggagggcagcgccctgacagagggcgccaaggaggagggcggggaggaggtggccaaggctgtgctggagcaggaggagacagctgctgccagccgggagcggcaggaggagcagagcgctgccatccacatcagcgagaccctggagcagaagccccactttgagagcagcacagtgaagacagagaccatcagctttggatctgtgtccccaggaggagtgaagctggagatcagcaccaaggaggtgcctgtggtgcacacagagaccaagaccatcacctatgagagcagccaggtggaccccggcacagacctggagcccggggtgctgatgtctgcccagaccatcaccagcgagaccaccagcaccaccaccaccacccacatcaccaagacagtgaagggcggcatcagcgagaccagaattgagaagagaattgtcatcactggagatgctgacatcgaccatgaccaggccctggcccaggccatcaaggaggccaaggagcagcacccagacatgtctgtgaccaaggtggtggtgcacaaggagacagagatcaccccagaagatggagaggactag

SEQ ID NO: 173878 - DNA, 3264 bp, Artificial Sequence
  derived and/or modified sequence
atgaccaccgagagcggcagcgacagcgagagcaagcccgaccaggaggctgagccccaagaagcggcaggagcacaggggcgggccggggctccggtgccagaaccacctaaggaggaacaacagcaggccctcgagcagtttgccgctgctgcagcacactccactccggtgaggcgggaggtgacagacaaagagcaggagttcgccgcgagggcggcaaaacagctggagtatcagcagctcgaggacgacaagttgtctcagaagagctcttcctctaagctcagccggtctccgctgaaaatcgtgaaaaagcccaagtcaatgcagtgtaaggtgatccttcttgacggttctgagtatacttgtgacgtggagaaacgcagcaggggacaagtgctgttcgataaggtctgtgagcatctgaacctcttggaaaaggattatttcggcctgacctatcgagacgccgagaatcagaagaattggctggatcccgctaaagagattaagaagcaggttaggtccggggcctggcacttttccttcaacgttaagttttatccacctgatccggcccagctgtcagaagatataaccagatattacctgtgtctgcagctcagagatgacatcgtttcgggaagactgccgtgttccttcgtgaccctcgcattgctagggagctacaccgttcagtcagagctgggcgattacgatcccgacgagtgcggatctgactatatctctgaatttcgtttcgccccgaaccacaccaaggaactcgaagacaaggtgattgagctccacaaatctcatcgtggcatgacaccggccgaggcagagatgcactttctggaaaacgccaagaagctctctatgtacggcgtcgatctccaccatgccaaagactccgagggtgttgagatcatgttaggcgtctgtgcttctggacttctgatctatcgcgacagattacgaattaatcgatttgcctggccaaaggtcctgaagatcagttataaaaggaataatttttatattaagataagacccggcgagttcgaacagtttgaatcaacgattggctttaagctccctaatcacagagccgctaagcggctgtggaaggtgtgcgtggagcatcacaccttttttcgcctcctgctcccagaagctcctcccaagaagttcctgacacttggatctaagtttcgctactccggcaggactcaagctcagacaaggagggcatccgcactaatcgacagaccagctccatattttgagcggtcctcttcgaagcggtatacaatgtcccgctcccttgatggcgaagttggtaccggccagtatgccactactaaaggcatctcccaaacaaacctgatcacaaccgtgactccggagaaaaaggctgaggaggagcgcgatgaggaagaagacaaaagacgaaagggtgaggaggtcaccccgatctctgcgatccggcatgaaggtaagtccccaggcctcggaacagatagctgtccactgagcccaccctctacacactgcgcacctacctctccaacagagctgaggcgcaggtgcaaggagaatgattgcaagttgcccggctacgagccgtctcgggccgaacacctgcctggagagccagcattggattcggatgggccagggcggccatatttaggggaccaggacgtggcattttcatatagacaacagactggaaaaggcacgacattgttctccttcagcctacagttgccagagtcttttccgtctctgctggacgacgatgggtatctttcttttccaaacctcagcgagacgaatctgctgcctcaatccctacagcactacttacctatccgaagccctagcctcgtcccctgcttcctgttcatatttttctttctgttgtcagcctcattcagcgtgccctacgcccttactctgagcttccccctggcactgtgcctctgttacctggaacctaaggccgccagtctcagtgcttccctcgataacgatccatccgactctagcgaggaggagacagattctgagcggaccgacaccgccgctgacggtgaaaccacggccactgagtcagaccaggaagaagatgctgagctaaaggctcaagagttagaaaagactcaagatgacttgatgaagcaccagacaaatatcagtgagttgaagaggaccttcctggagacctccacggatactgccgttaccaacgagtgggagaagcgcctcagtacaagcccggtgaggctcgccgctaggcaagaagacgccccaatgatcgagcctttggttcctgaagagaccaaacagagctcaggggaaaaattgatggacggttctgaaatattctctttgctcgagtccgcacgcaagccaaccgagtttatcggaggagtcacaagcactagtcagagctgggtccaaaagatggaaaccaagaccgagtcctctggaatagaaacagaacctacagtgcaccacctgccgctcagcacagaaaaggtagtgcaagagacagttctggtggaggagaggagggtggtgcacgcttccggagacgcctcatatagcgctggggacagcggtgatgccgccgctcagcctgcttttacaggcattaaggggaaagagggcagcgcccttacggagggtgcgaaggaggagggaggggaagaagtggccaaagctgtgcttgaacaggaggagacagctgccgccagtcgcgagcggcaggaggagcagagcgccgcaattcacatctctgagacactggagcagaagcctcatttcgagtcaagtactgtcaagactgagacgatttcttttggttcggtgtcccctggaggcgtgaagctggagatttcaacaaaggaagtgcccgttgttcataccgaaaccaagaccatcacgtatgagagctcacaggtggatccgggcaccgacctggagccaggagtcctgatgagcgctcagacaatcacatcggagaccacctctacgacaactactactcacattaccaagacagtgaagggaggtatctccgaaactcggatagaaaaacgaatcgtgatcacaggggatgccgacattgatcacgaccaggccctcgctcaggcgatcaaagaggctaaggagcagcatcccgacatgtcagtcactaaggtggtggttcacaaggagaccgagatcactcccgaagacggggaggactag

SEQ ID NO: 173879 - DNA, 3264 bp, Artificial Sequence
  derived and/or modified sequence
atgaccaccgagagcggcagcgacagcgagagcaagcccgaccaggaagctgagcctcaagaggcagccggcgcgcagggccgcgctggcgctcctgtccccgaaccccctaaagaagagcagcaacaggcactcgagcagtttgcggcagctgcagcccattccacgcctgtgcgtcgcgaggtgaccgacaaggagcaggaattcgcggcaagggccgcaaagcagctcgagtatcaacagttagaagacgataaactgtcccagaaaagctccagctctaaactctcccggtcacccttgaagattgttaagaagccgaagtctatgcaatgtaaggtgattcttctcgatggtagcgaatacacctgcgacgtggagaagcggagccggggccaggtcctgttcgacaaagtgtgcgaacatttaaatctcctcgagaaggactactttggcttgacgtatagagatgccgagaaccagaagaactggctggatccagccaaggaaattaaaaagcaagtcagatcaggagcatggcatttcagctttaatgtgaaattctatccacccgaccccgcacaactgtccgaagatatcacacggtattacctctgtttacagctgcgcgacgacattgtcagcggtagactcccctgctcttttgtaacattagccctcctaggtagttataccgttcagtctgagctcggtgattatgatcctgacgaatgtggatcagattatatctccgagtttagatttgctccaaaccacaccaaggagctggaagacaaggtgattgagctccacaagagccaccggggtatgactcccgccgaagctgaaatgcacttcctggagaacgctaaaaaattatctatgtacggcgtggacctccaccatgctaaggacagtgaaggagttgaaattatgctcggggtctgtgctagtgggctccttatctatagagatagacttagaataaaccgtttcgcttggcccaaagtgcttaagataagctataagcggaacaacttttacattaagattcggcccggcgagttcgaacagttcgagtctaccattggtttcaaactgcccaatcatcgagctgccaagaggctgtggaaggtctgtgtcgagcaccacaccttcttcaggcttctactgccggaggcccccccaaagaagtttctgaccctgggaagcaaattccgttactcagggcgcacccaggcccagacccggagagctagcgcacttattgatcggcctgctccatatttcgaacgctcgtcatctaagagatataccatgagtagaagtctcgacggagaggtggggactgggcagtacgcgaccacgaagggcataagtcagaccaacttgatcactacagtcactccggagaagaaggccgaagaggagagagacgaagaggaggataaacggagaaaaggcgaggaagtaaccccaattagtgctatcaggcatgagggaaaaagccctggcctcgggactgattcatgccctctttctcctccttctacacactgcgcgcccacaagtccaacagagctccgcagaagatgtaaagagaacgactgcaaactgcccggctatgagccctcacgtgcagagcaccttcccggagagcctgccttggatagcgacggccccggcaggccctatctgggggaccaggatgttgctttcagttaccgccagcagacaggtaaaggtaccacactcttctcttttagcttgcagctgccagagagttttccatctctcctcgacgacgacggataccttagtttccctaatttgtccgagacgaacctgctgccacaatccctccagcattacctgccaattagatccccttctttggtgccctgctttctgtttatcttcttttttctcctgagcgcatcttttagtgtcccttacgccttgactctgtcattcccgctggctctgtgcctttgctacctcgaaccaaaagcagcctccctgtcagccagtctcgacaacgatccttctgattcctctgaggaagagacagacagcgagagaacggacactgctgccgacggcgagacaacagctaccgaaagtgatcaagaggaggacgccgagctcaaagcacaggagctggagaagacccaggacgatctgatgaagcatcaaacaaacatctcagaacttaagaggacctttctggagacaagtaccgacactgctgtcacaaacgagtgggaaaaacggctttccactagccctgtcaggttggctgcccgacaggaggacgctcctatgattgagccgctggttcctgaagaaaccaaacagtccagtggtgaaaaactcatggatggctcagagatcttcagcctgcttgaatccgcgcggaagccaacggagtttatcggtggcgtgacaagtaccagtcagtcatgggtacaaaagatggagacaaagactgagtcttccgggatcgagaccgagcccacagtgcaccatttgcctctcagcacggagaaggtcgtgcaggagacagtgctggtggaggagaggagagtggtccatgcctctggtgacgcaagctatagcgcaggcgatagtggcgacgccgccgctcaacccgccttcaccggtatcaaaggaaaggaggggagtgccctgacagagggggccaaggaggagggaggagaagaggtggctaaggccgttttggagcaagaggaaactgctgccgcttctagggaacgacaggaggaacagagcgccgccatccacatatcagagacactggagcagaagccgcacttcgaaagctcgaccgtcaaaactgaaaccataagtttcggctccgtgagccctggaggtgtgaagttggagatctcaactaaggaggtacctgttgtgcacacagagacgaaaactatcacttacgagagctcacaggtagatcccggaactgatcttgagccaggagtcctcatgtctgctcaaactatcacatctgaaactacttcaacaacgaccacaacacatatcaccaaaactgtaaagggtggtatttctgaaacgaggatcgagaaaaggattgtgatcaccggggacgctgacatcgatcacgatcaggccttagcccaggccattaaagaagctaaggaacagcatcccgatatgtccgtaacaaaagtggtcgttcacaaggaaacagaaataaccccagaggacggagaggactag

SEQ ID NO: 173880 - DNA, 3264 bp, Artificial Sequence
  derived and/or modified sequence
atgaccacagaatctggatccgactccgaatccaagccagaccaggaggccgaacctcaggaggctgccggagcacaggggagggctggagcacccgtgccagagccgccaaaggaagagcagcaacaggctcttgagcagttcgcagcagctgcggcacatagcacgcccgtacgccgagaggtgactgataaggagcaggagtttgcagctcgggctgccaagcaactagagtatcaacagttggaggatgataagctatcccaaaaatcatcttccagcaaactgagcagatcacctctcaagattgtgaaaaagcctaagagcatgcagtgtaaggtgattctcttggacggttcagaatatacatgtgatgtggagaagcgatctcgtggacaggtgctgtttgacaaggtgtgcgaacacctgaacttgcttgaaaaggactatttcggactgacttaccgagacgctgagaaccagaagaattggctagatcctgccaaagaaattaagaagcaggtccgcagcggtgcttggcattttagcttcaatgtgaagttctaccccccagatccagcccagctgtctgaagatattacaagatattacctttgtctgcagctgcgagacgatattgtatctgggagactgccatgctctttcgttacccttgcgctgctcggtagctacactgtacagagcgaactaggagactacgaccccgacgaatgtggcagtgactatatttccgaatttcgcttcgccccaaatcatactaaggagcttgaggacaaagtaatagaactccacaagagtcacagaggcatgacaccagctgaagcagaaatgcatttcctggagaatgccaagaaattatctatgtacggagtggatctgcatcatgcgaaggattcagaaggggttgagattatgctgggcgtgtgcgcctcaggtctgctgatctacagggacagactgagaatcaaccgcttcgcctggcccaaggttctgaagataagctacaagcggaataacttctacattaaaatccgccctggggagttcgagcagttcgagtccacaatcggcttcaagctccctaatcaccgggcagccaaaagactgtggaaggtgtgtgtcgagcaccatacattcttcagactgcttctgccggaggctcccccaaagaagtttctgaccttaggctcgaagtttcggtatagcgggagaacacaggctcagaccaggcgcgcttcagctctgatcgaccgacccgctccctattttgagagatcgagcagcaagcgctacactatgtcccgcagtctggatggggaggtcgggactgggcagtatgcgactaccaaaggtatttcccaaacaaatttaattacaaccgtcacgcctgagaaaaaggcggaggaggagcgagacgaggaagaagacaaaagacgcaagggggaagaggtgacacccattagtgctatccggcacgaaggtaaatctcctggcttaggcactgattcatgtcctctgtcaccaccgtccacgcactgcgctccgacgagcccgacagagctccgacgaagatgtaaagagaatgactgcaagttacccggatacgagccatcccgggcagaacacctccctggcgaacctgcgctggactctgatggcccaggccgtccttacctgggcgaccaggatgtggccttctcatacaggcagcagactgggaaaggtacaacacttttctcattcagcctgcagctacccgagtcatttccttcgctgctagacgacgacggttaccttagttttcccaatctgtcagaaacaaatttgcttccccaatctctgcagcactacctcccaatccggtccccctctctcgtcccatgttttctgtttatattcttttttctcctcagtgcctcgttcagcgttccctatgccctgacactctctttccccctggccctttgtttgtgctacctcgaacctaaagcagcttcactctcagccagcctagataacgatccaagcgattcgtcagaggaagaaaccgacagcgagcgcaccgataccgccgcagacggcgaaactactgcgacggagtctgaccaggaggaagacgcagaactgaaagcgcaggaattagagaaaacacaggacgacctcatgaaacatcaaactaacattagcgagttgaagcggaccttcctcgagacaagcacagacaccgcggtgaccaacgagtgggagaaacggttgtctacatcacctgtgcgcctggctgccaggcaggaagacgcaccgatgatcgagcccttggtgcccgaagagacgaagcagtccagtggggagaagttgatggacgggtctgagatcttttctttactggaatcagccaggaaacccacagaattcatcggcggagtgactagcacatctcaatcatgggtgcagaagatggaaacaaagaccgaatctagcggtatcgagaccgaacccaccgtgcatcatctcccactgtcaactgagaaagtggtgcaagagaccgtcctggtagaggagcggagagtcgttcacgccagcggtgacgccagctactcagctggagattcaggtgacgccgcagcccagccagcattcactggtattaaaggaaaagaaggatccgcgctaacagaaggagctaaagaggagggtggcgaggaggttgcaaaagccgtgctggagcaggaggagaccgcagcggcatcaagggaacgccaagaggagcaaagcgccgctatccatatatccgagaccctagagcagaaaccgcattttgagtcatctacagtaaagacggaaacaattagctttgggagtgtcagccctggcggtgtcaagctggagatcagcaccaaagaggtgccagtcgttcatactgaaaccaagaccattacctacgagtcttctcaggtagaccctgggacagacctggaaccaggcgtccttatgtccgcacagactatcacgagcgaaacaacaagtaccacaacaacaactcatatcactaagactgttaagggtgggatctctgagacccgaatagagaagcgcatcgtgataacgggagacgccgacatcgaccacgaccaggctctggcccaagccattaaagaggcaaaggaacagcaccccgatatgtctgtcaccaaggttgtggtgcacaaggagactgaaatcacacctgaagacggcgaggactag

SEQ ID NO: 173881 - DNA, 3264 bp, Artificial Sequence
  derived and/or modified sequence
atgacaaccgaatccggaagcgactccgaatccaagccagatcaagaagctgagccccaggaggccgcaggtgcacagggtcgagccggtgcaccagtgcccgagcctcccaaggaagagcagcagcaggcgctggagcagttcgccgcagcggctgcccacagcacccccgtcaggcgcgaggtgacggacaaagaacaagagtttgccgcaagggccgcaaagcagctcgagtatcagcagttggaggatgacaagctgagtcagaagagctcatccagtaaactatcccgtagccccctgaagatcgtgaagaagcccaaatccatgcagtgcaaggtgattttgctagatggaagtgaatatacctgtgatgttgagaaaagaagccggggtcaggtcttatttgataaggtttgtgagcatttgaacctattagagaaagactacttcgggctgacctacagggacgcagagaaccaaaagaattggctggatcccgctaaagagattaaaaaacaggtgcgctcaggagcttggcacttctctttcaatgtgaagttttacccaccagaccccgctcagttaagcgaggacatcacacgatattatctatgcctgcagctaagggacgacatcgtgtcgggacgactaccctgctcattcgtgacactggctctgctaggctcatacaccgtgcagtccgagttgggtgactatgatcctgacgagtgcggctcagattatatcagcgagtttaggtttgcccctaatcacacaaaagaattggaggacaaggtgatagaacttcataagtcacacagaggaatgaccccagccgaggccgaaatgcacttcctcgagaatgccaagaaactgagcatgtatggggtcgatctccaccacgcaaaagacagcgagggcgtggagataatgttaggggtctgtgccagcggtctcttgatctatagagaccgattgagaatcaatcggtttgcctggcctaaggtcctcaagatcagctataagcggaacaacttctacatcaaaattcgccctggggagtttgaacaatttgaatccacaatcggcttcaagctgccaaatcacagagctgccaaacgactatggaaggtgtgcgtggagcaccatacgttctttaggttactcctgcctgaagccccacccaaaaagtttctgactctaggatctaagtttcgttactcgggtagaacacaagctcagaccaggcgcgcatctgctctgatagaccgaccagccccttactttgaaaggtccagctccaaacgatataccatgtccaggtcgttggatggtgaggttgggaccgggcagtatgcgaccactaagggaatatctcaaacaaatctgattaccactgtcactcctgaaaagaaggcagaagaagaacgtgatgaagaggaggacaaacggcgaaaaggcgaagaggtcacccctatctccgcaattaggcatgaaggcaagtcccctggtcttggcacagacagttgcccattatctccccctagcacacactgcgcccctacgtctccaaccgagcttcgccgtcgatgcaaagagaacgactgtaagctcccgggttacgaaccatctagggctgaacacctgcccggtgaacctgcactcgattcggatggcccagggcgaccctacctcggcgatcaggacgtagccttttcttatcgccagcagactggaaaaggcacaaccctgttctccttttcactccagctgcctgagtctttccctagcctcctcgatgacgacggctatctatccttcccgaacctgtccgaaactaacctgctgcctcagtctttgcagcattacttgcctattcgtagccccagtctcgtcccttgctttctttttatctttttcttcctactctctgcctccttctcagtcccttacgccttgactttatctttccccttagccctgtgcctgtgctatttggaacccaaggctgccagtctgagcgccagcttggacaacgacccttctgactcttctgaggaggagactgacagtgagaggacagatacagcggcagacggcgagactacagccaccgaatcagatcaggaggaagacgccgagcttaaggctcaggagcttgagaaaacccaggatgacttaatgaaacatcagactaatatttccgagcttaaacggacctttttggaaacatctacggacaccgctgttaccaacgaatgggagaagaggttgtcaaccagcccagtccgccttgcagctcggcaggaggacgccccaatgatcgagccactggtacctgaggagactaagcagagttctggagagaagctcatggatggctccgaaatcttttctttgctggagtctgcacgtaagccgactgaatttatcgggggagtcacctcgacaagtcagagttgggtccagaagatggaaacaaaaactgaatcatctggcatagagacagagcccacagtgcaccatctcccactctccaccgagaaagttgttcaggagaccgtgctcgtggaggagcgcagggtagtgcatgccagtggggatgcttcatacagcgcaggagacagcggtgacgctgccgcacaacccgctttcacaggaatcaaaggcaaggaagggagcgcactgacggagggtgccaaggaggaaggaggcgaagaggtggcaaaggctgtcttggaacaggaagagaccgcagcagctagtcgggaaaggcaggaggagcagagcgctgcgattcatatcagcgagactctcgaacagaagcctcattttgagagctccacagtgaagaccgagacaataagctttggctccgtgtcccctggcggagtgaagctggaaattagtactaaggaagtgccagttgtgcacactgaaaccaaaaccatcacgtatgagagtagccaggtcgatccgggtactgatttggaaccgggtgtgctgatgtcagcacagaccataacatccgaaacaaccagcacaaccactactacccacataacaaagaccgtgaagggcggaatttcggaaactcggatcgaaaagcgaattgtcatcactggagatgccgatatcgatcatgaccaagccttggcccaggctataaaggaggccaaagaacagcaccccgatatgagcgtgaccaaggttgtagtgcacaaggaaacagagataacccctgaggacggagaagactag

SEQ ID NO: 173882 - DNA, 3264 bp, Artificial Sequence
  derived and/or modified sequence
atgaccaccgagagcggcagcgacagcgagagcaagcccgaccaggaggccgagccccaggaggccgccggcgcccagggcagagccggcgcccccgtgcccgagccccccaaggaggagcagcagcaggccctggagcagttcgccgccgccgccgcccacagcacccccgtgagaagagaggtgaccgacaaggagcaggagttcgccgccagagccgccaagcagctggagtaccagcagctggaggacgacaagctgagccagaagagcagcagcagcaagctgagcagaagccccctgaagatcgtgaagaagcccaagagcatgcagtgcaaggtgatcctgctggacggcagcgagtacacctgcgacgtggagaagagaagcagaggccaggtgctgttcgacaaggtgtgcgagcacctgaacctgctggagaaggactacttcggcctgacctacagagacgccgagaaccagaagaactggctggaccccgccaaggagatcaagaagcaggtgagaagcggcgcctggcacttcagcttcaacgtgaagttctacccccccgaccccgcccagctgagcgaggacatcaccagatactacctgtgcctgcagctgagagacgacatcgtgagcggcagactgccctgcagcttcgtgaccctggccctgctgggcagctacaccgtgcagagcgagctgggcgactacgaccccgacgagtgcggcagcgactacatcagcgagttcagattcgcccccaaccacaccaaggagctggaggacaaggtgatcgagctgcacaagagccacagaggcatgacccccgccgaggccgagatgcacttcctggagaacgccaagaagctgagcatgtacggcgtggacctgcaccacgccaaggacagcgagggcgtggagatcatgctgggcgtgtgcgccagcggcctgctgatctacagagacagactgagaatcaacagattcgcctggcccaaggtgctgaagatcagctacaagagaaacaacttctacatcaagatcagacccggcgagttcgagcagttcgagagcaccatcggcttcaagctgcccaaccacagagccgccaagagactgtggaaggtgtgcgtggagcaccacaccttcttcagactgctgctgcccgaggccccccccaagaagttcctgaccctgggcagcaagttcagatacagcggcagaacccaggcccagaccagaagagccagcgccctgatcgacagacccgccccctacttcgagagaagcagcagcaagagatacaccatgagcagaagcctggacggcgaggtgggcaccggccagtacgccaccaccaagggcatcagccagaccaacctgatcaccaccgtgacccccgagaagaaggccgaggaggagagagacgaggaggaggacaagagaagaaagggcgaggaggtgacccccatcagcgccatcagacacgagggcaagagccccggcctgggcaccgacagctgccccctgagcccccccagcacccactgcgcccccaccagccccaccgagctgagaagaagatgcaaggagaacgactgcaagctgcccggctacgagcccagcagagccgagcacctgcccggcgagcccgccctggacagcgacggccccggcagaccctacctgggcgaccaggacgtggccttcagctacagacagcagaccggcaagggcaccaccctgttcagcttcagcctgcagctgcccgagagcttccccagcctgctggacgacgacggctacctgagcttccccaacctgagcgagaccaacctgctgccccagagcctgcagcactacctgcccatcagaagccccagcctggtgccctgcttcctgttcatcttcttcttcctgctgagcgccagcttcagcgtgccctacgccctgaccctgagcttccccctggccctgtgcctgtgctacctggagcccaaggccgccagcctgagcgccagcctggacaacgaccccagcgacagcagcgaggaggagaccgacagcgagagaaccgacaccgccgccgacggcgagaccaccgccaccgagagcgaccaggaggaggacgccgagctgaaggcccaggagctggagaagacccaggacgacctgatgaagcaccagaccaacatcagcgagctgaagagaaccttcctggagaccagcaccgacaccgccgtgaccaacgagtgggagaagagactgagcaccagccccgtgagactggccgccagacaggaggacgcccccatgatcgagcccctggtgcccgaggagaccaagcagagcagcggcgagaagctgatggacggcagcgagatcttcagcctgctggagagcgccagaaagcccaccgagttcatcggcggcgtgaccagcaccagccagagctgggtgcagaagatggagaccaagaccgagagcagcggcatcgagaccgagcccaccgtgcaccacctgcccctgagcaccgagaaggtggtgcaggagaccgtgctggtggaggagagaagagtggtgcacgccagcggcgacgccagctacagcgccggcgacagcggcgacgccgccgcccagcccgccttcaccggcatcaagggcaaggagggcagcgccctgaccgagggcgccaaggaggagggcggcgaggaggtggccaaggccgtgctggagcaggaggagaccgccgccgccagcagagagagacaggaggagcagagcgccgccatccacatcagcgagaccctggagcagaagccccacttcgagagcagcaccgtgaagaccgagaccatcagcttcggcagcgtgagccccggcggcgtgaagctggagatcagcaccaaggaggtgcccgtggtgcacaccgagaccaagaccatcacctacgagagcagccaggtggaccccggcaccgacctggagcccggcgtgctgatgagcgcccagaccatcaccagcgagaccaccagcaccaccaccaccacccacatcaccaagaccgtgaagggcggcatcagcgagaccagaatcgagaagagaatcgtgatcaccggcgacgccgacatcgaccacgaccaggccctggcccaggccatcaaggaggccaaggagcagcaccccgacatgagcgtgaccaaggtggtggtgcacaaggagaccgagatcacccccgaggacggcgaggactag

SEQ ID NO: 173883 - DNA, 4706 bp, Artificial Sequence
  derived and/or modified sequence
cgtcgtccgcggagcctgaccctgcgccaggacggaggaggctgtgcccatgtaactgtcctgaagtactgcggtggccccctcccccgcggctgggagggcaggcaggacgaggttggctttcctcgcacggtctctgggcgtgggcccccgccgcagctccgcggagcctcggtgtctcctgcaacagggggcggggggaacagcggcgagcagccctgggctgcggcttcctccccacgcccgagtctcctgcgcaccgccgccgaggacgcgcgcccgagcctagtccccacgccgcggcgcgcccgggctccctgctgatcccagaacaatcaaccatgacgaccgaatctggatcagactcggaatccaagccggaccaggaggccgagccccaggaggcggcgggggcgcaggggcgcgcgggggcgcccgtgccggagccgcccaaggaggagcagcagcaggccctggagcagttcgccgccgctgcagcgcacagcaccccggtgcggagggaggtcactgacaaggaacaggagtttgctgccagggctgcaaaacagctcgaatatcagcaattagaagacgataaactttctcagaaatcatctagcagtaaactctctcggtctccattaaagattgtcaaaaagcctaaaagcatgcagtgcaaagtgatacttctcgatggatcagaatatacctgtgatgtagagaaacgctccagaggacaagtgctgtttgataaagtgtgtgaacacttgaacttgctagagaaagactactttgggcttacgtatcgagatgctgaaaaccagaagaattggttggaccctgctaaggaaataaaaaaacaggttcgaagtggtgcttggcacttttcatttaatgtgaaattttatccaccagaccctgcccaactatctgaagatatcaccaggtactacctctgcttgcagttgcgagatgacatcgtgtccggaaggctgccctgctcctttgttaccctggccttgctgggctcctacactgtccagtcagagctcggagactatgacccagatgaatgtgggagcgattacattagtgagttccgctttgcaccaaaccacactaaagaactggaagacaaagtgatcgagctgcacaagagccacagaggaatgacgccagcagaagcagagatgcatttcttggaaaatgccaaaaaattatcaatgtatggggtagatttacatcatgctaaggactcagaaggggtagaaattatgttaggagtttgtgcaagtggtctgttgatatatcgcgaccggctgcgaataaacagatttgcctggcccaaggttctaaagatttcatacaaacggaacaacttttacattaagatccggccgggagagtttgaacaatttgaaagcaccattgggtttaagctgccaaaccatcgagctgccaagcgtttatggaaagtatgtgttgagcatcatacatttttcagactactgttaccagaagcacctcccaagaaattcctaaccttgggttccaagtttcgttatagtggcaggacacaagcgcaaacgagaagagccagtgcgttgatagatcgcccagcaccttactttgaacgctcatccagcaaacgttataccatgtctcgcagcttggatggagaggttggtactggccagtacgccacaacaaaaggcatctctcagaccaacttgatcaccactgtgactccggagaagaaggctgaggaggagcgggacgaggaagaggacaaacggaggaagggggaagaagtcacgcccatctcggccatccggcacgagggaaagtcacctgggcttggcactgactcatgtcccttgtcacccccatccacccattgtgcccccacatctcccacagagctccgtaggaggtgtaaggagaatgactgcaaactgccaggttatgagccgtccagagctgagcacctgcctggagagcccgccttggactctgatggcccagggaggccttacctaggggatcaagatgtggcttttagctacagacagcaaactggcaaggggaccaccctgttctccttctccttgcagctccctgagtcattcccctccctcctagatgatgatggatacctctctttccccaacctttctgaaaccaacctcctgccccagagcttgcagcattacctcccgatccgctcaccgtcccttgtgccctgtttcctcttcatctttttctttctgctgtctgcctccttctcagtgccatacgctctcactctctccttccctctggctctgtgcctctgctacctggagcccaaggcggcctccttgagcgcctccctagacaatgacccgagtgacagttcagaggaagagactgacagtgagcgcacggacaccgcagccgacggggagaccactgccactgagtcggaccaggaggaagatgcagagctcaaggcacaggagctagaaaaaactcaagatgacctgatgaaacatcaaaccaacattagcgagctgaaaagaaccttcttagaaacctcaacagacactgccgtaacgaatgaatgggagaagaggctttccacctcccccgtgcgactggccgccaggcaggaggatgcccccatgatcgaaccacttgtccctgaagagactaagcagtcttctggggaaaagctcatggatggctctgaaatcttcagtttattagagtctgcgcgaaaaccaacagaattcataggaggggttacttctacttctcaaagctgggttcagaaaatggaaaccaagacggagtccagtggaatagagacggaacccaccgtgcaccacctgccgcttagcactgagaaggtggtgcaggagaccgtgttggtggaggagcggcgtgtggtgcacgcgagtggggatgcttcttactcggcgggagacagcggggatgctgcagcacagcccgcattcacaggcattaaagggaaagagggctctgccttgacggagggggctaaagaggaaggaggggaggaggtcgctaaagctgtcctggaacaggaagagacagccgctgcttcccgtgagcgacaagaggagcagagtgcagccatccacatttcagaaactttggaacaaaaacctcattttgagtcctcaacggtgaagacggaaaccatcagttttggcagtgtttcaccgggaggagtaaagctagaaatttccacgaaggaagtgccagtagttcacaccgaaaccaaaaccatcacatatgaatcatcacaggtcgatccaggcacagatctggagccaggcgtgctgatgagtgcacagacgatcacatctgaaaccaccagtaccaccaccactacgcacatcaccaaaactgtgaaagggggcatttcagagacaagaattgagaagcgaatagtcatcacgggggatgcagacattgaccatgaccaggcgctggctcaggcaattaaagaggccaaagagcagcaccctgacatgtcagtgaccaaagtagtggtccataaagagacagagatcacaccagaagatggagaggattgaccagaggaataacttagcttgcacatgaatgcagtcatgcaaaccgttaggaaaaccagagcctatatggagttccctcttctaacccaactgacttgtatctgtccgtggaaaatttcagtccagaagaattgaccttgaccattaataaagacactggcagagagatcttcccataataaagcaatctgattcagcatcactaaaccgataatgcatgaagcaacgataaaattacaaaagagcagcatttttaattttcacaaaatgtctcagttttcagctatacctgcacgttcataaccaacaatataaaccgtggtctcatgtaacacataaacaattcatgcctttcatagtttattattattaaagtctaaacaaaattgcaatttcttaggtaaccttatatttacaataaatgaagattaccctcaaatgctagaagctgtctaggtccgtccggtgtgtcagattttcctcagattagatgtgccaataaccaagtttattcagtaaacaacttgtacttgtttcatctggttttattactctcacccataaacagtaatgactctctgaccctctggaaatatgtaatgcttccaatcttgctttgtgtatctcatttaatttgttataaggtagtactgattttagcatattaatgcgatttcttccttgttgtttgctttggtctgtgttcaatccagagagcttaaattgtcattattttgggaagaaaacctgtatttttgttagtttacaatattatgaaatttcacttcaggagaaactgctgggcttcctgtggctttgttttcttagttactttttccgtgccgtgtattttttaattgatttttcttcttttacttgaaaagaaagtgttttattttcaaatctggtccatatttacattctagttcagagccaagccttaaactgtacagaatttccactgtaattaaaactatttagtgttagttataaatagccttcaaaaagagagattctccattacacgatcacctgcatcacagcccatggtgaatgtatgtttctgcatagcgaaataaaaatggcaaatgcactgaaagc

SEQ ID NO: 173884 - DNA, 3492 bp, Artificial Sequence
  derived and/or modified sequence
gttatttgatttgccttggctgtggggaattctgtgctcagaagcaaggactggagcagtgaagtcattgtcctgcctggtgttgtgacatcactatggctcaaaggaaacaagggtggggcaggcaaaaccagaccatctgaagcatcttgctggctttaaaactttgcctgatcaatcaatgagactcctttctcaagttgaactgcattgcgagaacaatcaaccatgacgaccgaatctggatcagactcggaatccaagccggaccaggaggccgagccccaggaggcggcgggggcgcaggggcgcgcgggggcgcccgtgccggagccgcccaaggaggagcagcagcaggccctggagcagttcgccgccgctgcagcgcacagcaccccggtgcggagggaggtcactgacaaggaacaggagtttgctgccagggctgcaaaacagctcgaatatcagcaattagaagacgataaactttctcagaaatcatctagcagtaaactctctcggtctccattaaagattgtcaaaaagcctaaaagcatgcagtgcaaagtgatacttctcgatggatcagaatatacctgtgatgtagagaaacgctccagaggacaagtgctgtttgataaagtgtgtgaacacttgaacttgctagagaaagactactttgggcttacgtatcgagatgctgaaaaccagaagaattggttggaccctgctaaggaaataaaaaaacaggttcgaagtggtgcttggcacttttcatttaatgtgaaattttatccaccagaccctgcccaactatctgaagatatcaccaggtactacctctgcttgcagttgcgagatgacatcgtgtccggaaggctgccctgctcctttgttaccctggccttgctgggctcctacactgtccagtcagagctcggagactatgacccagatgaatgtgggagcgattacattagtgagttccgctttgcaccaaaccacactaaagaactggaagacaaagtgatcgagctgcacaagagccacagaggaatgacgccagcagaagcagagatgcatttcttggaaaatgccaaaaaattatcaatgtatggggtagatttacatcatgctaaggactcagaaggggtagaaattatgttaggagtttgtgcaagtggtctgttgatatatcgcgaccggctgcgaataaacagatttgcctggcccaaggttctaaagatttcatacaaacggaacaacttttacattaagatccggccgggagagtttgaacaatttgaaagcaccattgggtttaagctgccaaaccatcgagctgccaagcgtttatggaaagtatgtgttgagcatcatacatttttcagactactgttaccagaagcacctcccaagaaattcctaaccttgggttccaagtttcgttatagtggcaggacacaagcgcaaacgagaagagccagtgcgttgatagatcgcccagcaccttactttgaacgctcatccagcaaacgttataccatgtctcgcagcttggatggagaggttggtactggccagtacgccacaacaaaaggcatctctcagaccaacttgatcaccactgtgactccggagaagaaggctgaggaggagcgggacgaggaagaggacaaacggaggaagggggaagaagtcacgcccatctcggccatccggcacgagggaaagtcacctgggcttggcactgactcatgtcccttgtcacccccatccacccattgtgcccccacatctcccacagagctccgtaggaggtgtaaggagaatgactgcaaactgccaggttatgagccgtccagagctgagcacctgcctggagagcccgccttggactctgatggcccagggaggccttacctaggggatcaagatgtggcttttagctacagacagcaaactggcaaggggaccaccctgttctccttctccttgcagctccctgagtcattcccctccctcctagatgatgatggatacctctctttccccaacctttctgaaaccaacctcctgccccagagcttgcagcattacctcccgatccgctcaccgtcccttgtgccctgtttcctcttcatctttttctttctgctgtctgcctccttctcagtgccatacgctctcactctctccttccctctggctctgtgcctctgctacctggagcccaaggcggcctccttgagcgcctccctagacaatgacccgagtgacagttcagaggaagagactgacagtgagcgcacggacaccgcagccgacggggagaccactgccactgagtcggaccaggaggaagatgcagagctcaaggcacaggagctagaaaaaactcaagatgacctgatgaaacatcaaaccaacattagcgagctgaaaagaaccttcttagaaacctcaacagacactgccgtaacgaatgaatgggagaagaggctttccacctcccccgtgcgactggccgccaggcaggaggatgcccccatgatcgaaccacttgtccctgaagagactaagcagtcttctggggaaaagctcatggatggctctgaaatcttcagtttattagagtctgcgcgaaaaccaacagaattcataggaggggttacttctacttctcaaagctgggttcagaaaatggaaaccaagacggagtccagtggaatagagacggaacccaccgtgcaccacctgccgcttagcactgagaaggtggtgcaggagaccgtgttggtggaggagcggcgtgtggtgcacgcgagtggggatgcttcttactcggcgggagacagcggggatgctgcagcacagcccgcattcacaggcattaaagggaaagagggctctgccttgacggagggggctaaagaggaaggaggggaggaggtcgctaaagctgtcctggaacaggaagagacagccgctgcttcccgtgagcgacaagaggagcagagtgcagccatccacatttcagaaactttggaacaaaaacctcattttgagtcctcaacggtgaagacggaaaccatcagttttggcagtgtttcaccgggaggagtaaagctagaaatttccacgaaggaagtgccagtagttcacaccgaaaccaaaaccatcacatatgaatcatcacaggtcgatccaggcacagatctggagccaggcgtgctgatgagtgcacagacgatcacatctgaaaccaccagtaccaccaccactacgcacatcaccaaaactgtgaaagggggcatttcagagacaagaattgagaagcgaatagtcatcacgggggatgcagacattgaccatgaccaggcgctggctcaggcaattaaagaggccaaagagcagcaccctgacatgtcagtgaccaaagtagtggtccataaagagacagagatcacaccagaagatggagaggattga

SEQ ID NO: 173885 - protein, 782 aa, Artificial Sequence
  derived and/or modified sequence
MEPEEERIRYSQRLRGTMRRRYEDDGISDDEIEGKRTFDLEEKLHTNKYNANFVTFMEGKDFNVEYIQRGGLRDPLIFKNSDGLGIKMPDPDFTVNDVKMCVGSRRMVDVMDVNTQKGIEMTMAQWTRYYETPEEEREKLYNVISLEFSHTRLENMVQRPSTVDFIDWVDNMWPRHLKESQTESTNAILEMQYPKVQKYCLMSVRGCYTDFHVDFGGTSVWYHIHQGGKVFWLIPPTAHNLELYENWLLSGKQGDIFLGDRVSDCQRIELKQGYTFVIPSGWIHAVYTPTDTLVFGGNFLHSFNIPMQLKIYNIEDRTRVPNKFRYPFYYEMCWYVLERYVYCITNRSHLTKEFQKESLSMDLELNGLESGNGDEEAVDREPRRLSSRRSVLTSPVANGVNLDYDGLGKTCRSLPSLKKTLAGDSSSDCSRGSHNGQVWDPQCAPRKDRQVHLTHFELEGLRCLVDKLESLPLHKKCVPTGIEDEDALIADVKILLEELANSDPKLALTGVPIVQWPKRDKLKFPTRPKVRVPTIPITKPHTMKPAPRLTPVRPAAASPIVSGARRRRVRCRKCKACVQGECGVCHYCRDMKKFGGPGRMKQSCVLRQCLAPRLPHSVTCSLCGEVDQNEETQDFEKKLMECCICNEIVHPGCLQMDGEGLLNEELPNCWECPKCYQEDSSEKAQKRKMEESDEEAVQAKVLRPLRSCDEPLTPPPHSPTSMLQLIHDPVSPRGMVTRSSPGAGPSDHHSASRDERFKRRQLLRLQATERTMVLRQETLDKN

SEQ ID NO: 173886 - protein, 1162 aa, Artificial Sequence
  derived and/or modified sequence
MEPEEERIRYSQRLRGTMRRRYEDDGISDDEIEGKRTFDLEEKLHTNKYNANFVTFMEGKDFNVEYIQRGGLRDPLIFKNSDGLGIKMPDPDFTVNDVKMCVGSRRMVDVMDVNTQKGIEMTMAQWTRYYETPEEEREKLYNVISLEFSHTRLENMVQRPSTVDFIDWVDNMWPRHLKESQTESTNAILEMQYPKVQKYCLMSVRGCYTDFHVDFGGTSVWYHIHQGGKVFWLIPPTAHNLELYENWLLSGKQGDIFLGDRVSDCQRIELKQGYTFVIPSGWIHAVYTPTDTLVFGGNFLHSFNIPMQLKIYNIEDRTRVPNKFRYPFYYEMCWYVLERYVYCITNRSHLTKEFQKESLSMDLELNGLESGNGDEEAVDREPRRLSSRRSVLTSPVANGVNLDYDGLGKTCRSLPSLKKTLAGDSSSDCSRGSHNGQVWDPQCAPRKDRQVHLTHFELEGLRCLVDKLESLPLHKKCVPTGIEDEDALIADVKILLEELANSDPKLALTGVPIVQWPKRDKLKFPTRPKVRVPTIPITKPHTMKPAPRLTPVRPAAASPIVSGARRRRVRCRKCKACVQGECGVCHYCRDMKKFGGPGRMKQSCVLRQCLAPRLPHSVTCSLCGEVDQNEETQDFEKKLMECCICNEIVHPGCLQMDGEGLLNEELPNCWECPKCYQEDSSEKAQKRKMEESDEEAVQAKVLRPLRSCDEPLTPPPHSPTSMLQLIHDPVSPRGMVTRSSPGAGPSDHHSASRDERFKRRQLLRLQATERTMVREKENNPSGKKELSEVEKAKIRGSYLTVTLQRPTKELHGTSIVPKLQAITASSANLRHSPRVLVQHCPARTPQRGDEEGLGGEEEEEEEEEEEDDSAEEGGAARLNGRGSWAQDGDESWMQREVWMSVFRYLSRRELCECMRVCKTWYKWCCDKRLWTKIDLSRCKAIVPQALSGIIKRQPVSLDLSWTNISKKQLTWLVNRLPGLKDLLLAGCSWSAVSALSTSSCPLLRTLDLRWAVGIKDPQIRDLLTPPADKPGQDNRSKLRNMTDFRLAGLDITDATLRLIIRHMPLLSRLDLSHCSHLTDQSSNLLTAVGSSTRYSLTELNMAGCNKLTDQTLIYLRRIANVTLIDLRGCKQITRKACEHFISDLSINSLYCLSDEKLIQKIS

SEQ ID NO: 173887 - DNA, 6511 bp, Artificial Sequence
  derived and/or modified sequence
gagtctgacgggttcaaaatggcggcggctgcttcagcggctcctcctgtgtgagggaaacaacacccctccccggcagcggcggcggcggcggcggctctcggagcaccttcccagcggctgggcccgtggccgctctgtctttcctgggcaggggacgctccgggaggaggggcaacgccagggggcccatcccccggaatccctcttctgcgactggggagtagccggggggctcgtcccgcagcgcggagccagacctgagggggagacgcgaggggagccagggcccccatcccggcgcgccgcgccgctcccgccctgtccgccccccggggccggggcccgcgttccggggggccggggcggcgcggggagcctcgggccggccggtctcagctgatcggccgctgctcccgcaggcgaccagcccctgctggccgagggcacggcgaggagggcgctccctgcggccggggccggcccggggctcgggcccgggctgctgaccgctggcctgggggaggcgggggcgccccgggctcggcgccgaggggtcgcgctcctctctcctgacgcctccgactcccggtctccaaagccagaagagaaggtttgattcagcaactgtttgctcccttttcctggtcgctctgaccctctctggatactgggttgatccacggaaaaaccgaagacgacgtttgggatttaattattcctctcagctttggaatcttttacttctcacttggacaagaactcaagagcagaatctccgtgttgcaatctggttcctaaggaggaagaggaaggcagccctggagtggtttctttacagtaatttcaacagaagagtgagagatggaacccgaagaagaaaggattcgttacagccagagattgcgtggtaccatgcgacgacgctatgaagatgatggcatttcagatgatgaaattgaaggaaaaagaacttttgacttggaagagaaactgcacaccaacaaatataatgccaattttgttacttttatggaaggaaaagattttaatgtagagtatattcagcggggtggcttgagagatcctctgattttcaagaattctgatggactcggaataaaaatgccggatccagacttcactgtgaatgatgtcaaaatgtgtgtggggagtcgtcgcatggtggatgtcatggacgtgaacacacagaaaggcattgaaatgaccatggctcagtggacacgctactatgagaccccagaggaggagcgagagaaactctataatgtcatcagcctcgagtttagccacaccaggctggagaatatggtgcagaggccctccacggtggatttcattgactgggtagacaacatgtggccaaggcacttgaaggaaagccagactgaatcaacaaatgccatcttggagatgcagtaccctaaagtgcagaagtactgtctaatgagtgttcgaggctgctatactgacttccatgtggactttggtggtacctctgtttggtatcacatccatcaagggggaaaggtcttctggctcatcccccctacagcccacaacctggagctgtacgagaattggctgctgtcagggaaacagggagacatctttctgggtgaccgggtatcagattgtcagcgcattgagctcaagcagggctataccttcgtcattccctcaggctggattcatgctgtgtatactcctacagacacattagtgtttgggggcaattttttgcatagcttcaacatccctatgcagttaaaaatatacaacattgaagatcggacacgggttccaaataagtttcgctatccattctactatgagatgtgttggtatgtgttggagcgctatgtgtactgcataaccaaccgttcccacctaactaaggaatttcagaaagagtccctcagcatggatttggagttaaatgggttggagtctgggaatggggatgaggaagcagtggatcgagaaccccgacgcttgagcagcaggcgttctgtcctcactagccctgtagcgaatggagtcaacctggattatgatggactgggcaaaacctgccgaagtcttccaagtctgaagaaaactttggctggggactcatcttctgactgtagccggggctcccacaatggacaagtgtgggatccccagtgtgctccccgaaaggacaggcaagtgcatctgacccattttgagcttgaaggccttcgctgccttgtagataagttggagtctctgccactgcacaagaaatgtgtccccacagggatagaagatgaagatgctctcattgctgatgtaaagattttgctggaggagcttgccaacagcgatcccaagttagccctcactggagttcctatagtacagtggccaaaaagggataagcttaaattccccactcggccaaaggtgcgggttcctaccatccccattacgaagcctcacactatgaaaccagctccacggttaacacctgtgaggccagctgctgcctccccgattgtgtcaggagccagacggagacgagtgcgatgtcgaaaatgcaaagcctgtgtgcaaggagagtgtggtgtttgccactactgcagagacatgaagaagtttggggggcctggacgcatgaagcagtcctgtgtcctccgacagtgcttggcacccagactgcctcactcagtcacatgttccctctgtggagaggtggatcagaatgaagagacacaagactttgagaagaaactcatggaatgctgtatctgcaatgagattgttcatcctggctgcctccagatggacggagaggggttgcttaacgaagaattgccaaattgctgggaatgtccaaagtgctaccaggaggacagctcggagaaagcccagaagcggaaaatggaagagagtgacgaagaagctgtgcaagccaaagtcctgcggcccctgcggagctgcgatgagcctctcacgcccccgcctcattcacccacttccatgctgcagctcatccatgacccggtttccccccggggtatggtgactcggtcatcccctggggctggccccagcgaccaccacagtgccagccgcgatgagcgcttcaaacggcggcagttgctgcggctgcaggccacagagcgcaccatggtgctgcgacaagagactttggacaaaaattgacttgagtaggtgtaaggccattgtgccccaggccctcagtggcatcatcaagaggcagccagtcagccttgacctcagttggaccaacatctctaaaaagcaactgacatggctcgtcaataggctgccaggactgaaagacctcctcctagcaggctgctcctggtctgcagtctctgccctcagcacctccagctgcccccttctcaggacccttgatcttcggtgggcagtaggaatcaaggaccctcaaattcgggacttgcttactccaccggctgataaaccaggtcaggacaatcgcagcaagctccggaacatgaccgacttccggctggcaggccttgacatcacagatgccacgcttcgcctcataattcgccacatgcccctcctgtctcgactcgacctcagtcactgcagccaccttacagatcagtcctccaatctactcactgctgtcgggtcttccactcgctactctctcacagagctcaatatggcaggttgcaataaattgacagaccagaccctgatctacctacggcgcattgccaacgtcaccttgatcgaccttcgaggatgcaagcagatcactcgaaaagcctgcgagcacttcatctcagacttgtccatcaacagcctctactgcctgtctgacgagaagctgatacagaagatcagctaagacacacccagcccagattcaacaggaaaccgatcttcccctgactccccaccgaggagagcctctcctcgaccctgcacgggctctgaggccagcgtcacactccctctctgctctcctgtcccttgagcccttcctctacaggtggggcagagagggtggtggacaccaggcttatctgcctgctcctctccctcctaaggaaaagggagtagcagattgatctgaggggaaagcacaggctgtgctgtcgaggcgcctgctcgcttactcgcctgccaggaggccgggctctcagtttggggtgtttgtgcaaccttcatctgcactgggccctgtgcccctcctccccatccatggtccccagcagtgcctggttctgagcaaactcccagggaagaaaacggccctgtctccatggccaggttcttgtggtgtccagtgcgcgtctctcctccatcacactctcccggcttgcgcaggaggggccagcagccccaggagtcccagacccgtgccgatcacactggtgctgttgagatctcccaaacctcacgtccttaactgtgctctccctcctttcctctcccttgagcttggttctgcccagcactcgtgcttgttcacataattaggtttcccaccccagcctacccgacttacttgctagtctctatgaggtccttattgcacttattggggttgaagctcttcagaggagctggaactgtctaccccagggacacacccatttcgttgctacccaagtggattctgagacaggcaccatctccttgttccccctctctcttttgcctcccactgactgcccttttccatgtgtcttcattctgcctgaagaaggctttcccaggatgcacgtcctcagagggagcagcctatctcccccaagctggaggcggcagaggactgggccaagccccaacctgcctcccagccaggctcctccaggcctctggtttagcggagccccctgagcccaggcctgtgtctagccccagtggctcactgaactttcagggcagtcagggggtcctgcttagaagccagtcaccagccctctgcctgcagccatggaagggggtgtgcacgtgcctctgtgtgtgtggctgagtgtattctgcgcgtgtgtgtggagggagggagggaggggagcatggtgtctcccgctccaccgccctttgttgagccccatcagctgcccccttttactttgcattgaacggcctgtccaaagatcctctctctagggcagcagagagctttttgcactttaaaaaaaaaaagaaagaaagaaaggtcggaatttcttttgggtcaatatttttaagtgtgtgaggagatgctcagtagcagcagcctatggcaagagcttataaatgattgatgcaaatttgcactctgctccccctctgtaaggatactgatagcacaacctcttccccccaccccgccccgccttttggtcgtccatccctgtccctttctggccctcttcctgtagcccagtctcaggctttcctcttcctgaagccctacagagttagggaatggagcccaggcaccaggggtctaaagtgtgagccactgagaagagagacgccaactgcacccttgccacttccaaagcaatagaggcagagtggtcccctctttgccacctaggccagttttgaccctggcattaactggccttagaagaaactggatcctggtagggggtggcattttgtttgtttcttccaatctgctgaatcttttgactgcaccttacaaacagcagtctgctcccatgaccctctgcccacttccattggtctccaggccccaataatctggggttgaaactttgaggaaatgccagtgacttattccagagtgcctcagttaggggaacttctctgtaaagaaccctgggtattgagcaaaaaccttattatcgttaatgacctataattggaagcttcctgcctttttctttggttgctcctgtggaaaatactgaaaagattactttgttttattttgttgtctttttataaaaggggaggtggagagaccccttcagagcagggattgtgccgggagagtgcctctgactttgggacatttcatccacagaaatttccaagccaatggtttcttttgggttttggtttttatgtttgttttttggggtttggaaaaacatgcatttttaccgtgcacgtaaattggtcagcagaaaagggagcccagaaaaggcagcagatggaccatgcccttgctgggttttccttttctttgggactgtgaggggaaatggtttttagaggtgagggttggtccatgtggaggaaagaagtgtctctgttgggggacagaggaacctggggagtccatcgcatgtcctacaatctgctcttagacacggccttgccaggagagcctgccctcagactgcaggaccagaacccctgcctccatctttccaagcaccggggcgaaaaaccacaaaggaaaggaagaaaatttatatatatataatataaaatcacttggtgattaaaaaaataactgctccataaataaaactcctaaagtcactta

SEQ ID NO: 173888 - DNA, 5253 bp, Artificial Sequence
  derived and/or modified sequence
gcaggcgaccagcccctgctggccgagggcacggcgaggagggcgctccctgcggccggggccggcccggggctcgggcccgggctgctgaccgctggcctgggggaggcgggggcgccccgggctcggcgccgaggggtcgcgctcctctctcctgacgcctccgactcccggtctccaaagccagaagagaaggtttgattcagcaactgtttgctcccttttcctggtcgctctgaccctctctggatactgggttgatccacggaaaaaccgaagacgacgtttgggatttaattattcctctcagctttggaatcttttacttctcacttggacaagaactcaagagcagaatctccgtgttgcaatctggttcctaaggaggaagaggaaggcagccctggagtggtttctttacagtaatttcaacagaagagtgagagatggaacccgaagaagaaaggattcgttacagccagagattgcgtggtaccatgcgacgacgctatgaagatgatggcatttcagatgatgaaattgaaggaaaaagaacttttgacttggaagagaaactgcacaccaacaaatataatgccaattttgttacttttatggaaggaaaagattttaatgtagagtatattcagcggggtggcttgagagatcctctgattttcaagaattctgatggactcggaataaaaatgccggatccagacttcactgtgaatgatgtcaaaatgtgtgtggggagtcgtcgcatggtggatgtcatggacgtgaacacacagaaaggcattgaaatgaccatggctcagtggacacgctactatgagaccccagaggaggagcgagagaaactctataatgtcatcagcctcgagtttagccacaccaggctggagaatatggtgcagaggccctccacggtggatttcattgactgggtagacaacatgtggccaaggcacttgaaggaaagccagactgaatcaacaaatgccatcttggagatgcagtaccctaaagtgcagaagtactgtctaatgagtgttcgaggctgctatactgacttccatgtggactttggtggtacctctgtttggtatcacatccatcaagggggaaaggtcttctggctcatcccccctacagcccacaacctggagctgtacgagaattggctgctgtcagggaaacagggagacatctttctgggtgaccgggtatcagattgtcagcgcattgagctcaagcagggctataccttcgtcattccctcaggctggattcatgctgtgtatactcctacagacacattagtgtttgggggcaattttttgcatagcttcaacatccctatgcagttaaaaatatacaacattgaagatcggacacgggttccaaataagtttcgctatccattctactatgagatgtgttggtatgtgttggagcgctatgtgtactgcataaccaaccgttcccacctaactaaggaatttcagaaagagtccctcagcatggatttggagttaaatgggttggagtctgggaatggggatgaggaagcagtggatcgagaaccccgacgcttgagcagcaggcgttctgtcctcactagccctgtagcgaatggagtcaacctggattatgatggactgggcaaaacctgccgaagtcttccaagtctgaagaaaactttggctggggactcatcttctgactgtagccggggctcccacaatggacaagtgtgggatccccagtgtgctccccgaaaggacaggcaagtgcatctgacccattttgagcttgaaggccttcgctgccttgtagataagttggagtctctgccactgcacaagaaatgtgtccccacagggatagaagatgaagatgctctcattgctgatgtaaagattttgctggaggagcttgccaacagcgatcccaagttagccctcactggagttcctatagtacagtggccaaaaagggataagcttaaattccccactcggccaaaggtgcgggttcctaccatccccattacgaagcctcacactatgaaaccagctccacggttaacacctgtgaggccagctgctgcctccccgattgtgtcaggagccagacggagacgagtgcgatgtcgaaaatgcaaagcctgtgtgcaaggagagtgtggtgtttgccactactgcagagacatgaagaagtttggggggcctggacgcatgaagcagtcctgtgtcctccgacagtgcttggcacccagactgcctcactcagtcacatgttccctctgtggagaggtggatcagaatgaagagacacaagactttgagaagaaactcatggaatgctgtatctgcaatgagattgttcatcctggctgcctccagatggacggagaggggttgcttaacgaagaattgccaaattgctgggaatgtccaaagtgctaccaggaggacagctcggagaaagcccagaagcggaaaatggaagagagtgacgaagaagctgtgcaagccaaagtcctgcggcccctgcggagctgcgatgagcctctcacgcccccgcctcattcacccacttccatgctgcagctcatccatgacccggtttccccccggggtatggtgactcggtcatcccctggggctggccccagcgaccaccacagtgccagccgcgatgagcgcttcaaacggcggcagttgctgcggctgcaggccacagagcgcaccatggtacgggaaaaggagaacaatcccagcggcaaaaaggagctgtctgaagttgagaaagccaagatccggggatcgtacctcactgtcacgctacagaggcccaccaaagagctccacgggacatccattgtgcccaagctgcaggccatcacggcctcctctgccaaccttcgccattccccccgtgtgctagtgcagcactgcccagcccgaaccccccagcgtggggatgaggaggggctggggggagaggaggaggaagaggaggaggaggaggaggaagatgacagtgcagaggaggggggtgcagccaggctgaatggccggggcagttgggctcaggatggagacgaaagctggatgcagcgggaggtctggatgtctgtcttccgctacctcagccgcagagaactttgtgaatgtatgcgagtgtgcaagacgtggtataaatggtgctgcgacaagagactttggacaaaaattgacttgagtaggtgtaaggccattgtgccccaggccctcagtggcatcatcaagaggcagccagtcagccttgacctcagttggaccaacatctctaaaaagcaactgacatggctcgtcaataggctgccaggactgaaagacctcctcctagcaggctgctcctggtctgcagtctctgccctcagcacctccagctgcccccttctcaggacccttgatcttcggtgggcagtaggaatcaaggaccctcaaattcgggacttgcttactccaccggctgataaaccaggtcaggacaatcgcagcaagctccggaacatgaccgacttccggctggcaggccttgacatcacagatgccacgcttcgcctcataattcgccacatgcccctcctgtctcgactcgacctcagtcactgcagccaccttacagatcagtcctccaatctactcactgctgtcgggtcttccactcgctactctctcacagagctcaatatggcaggttgcaataaattgacagaccagaccctgatctacctacggcgcattgccaacgtcaccttgatcgaccttcgaggatgcaagcagatcactcgaaaagcctgcgagcacttcatctcagacttgtccatcaacagcctctactgcctgtctgacgagaagctgatacagaagatcagctaagacacacccagcccagattcaacaggaaaccgatcttcccctgactccccaccgaggagagcctctcctcgaccctgcacgggctctgaggccagcgtcacactccctctctgctctcctgtcccttgagcccttcctctacaggtggggcagagagggtggtggacaccaggcttatctgcctgctcctctccctcctaaggaaaagggagtagcagattgatctgaggggaaagcacaggctgtgctgtcgaggcgcctgctcgcttactcgcctgccaggaggccgggctctcagtttggggtgtttgtgcaaccttcatctgcactgggccctgtgcccctcctccccatccatggtccccagcagtgcctggttctgagcaaactcccagggaagaaaacggccctgtctccatggccaggttcttgtggtgtccagtgcgcgtctctcctccatcacactctcccggcttgcgcaggaggggccagcagccccaggagtcccagacccgtgccgatcacactggtgctgttgagatctcccaaacctcacgtccttaactgtgctctccctcctttcctctcccttgagcttggttctgcccagcactcgtgcttgttcacataattaggtttcccaccccagcctacccgacttacttgctagtctctatgaggtccttattgcacttattggggttgaagctcttcagaggagctggaactgtctaccccagggacacacccatttcgttgctacccaagtggattctgagacaggcaccatctccttgttccccctctctcttttgcctcccactgactgcccttttccatgtgtcttcattctgcctgaagaaggctttcccaggatgcacgtcctcagagggagcagcctatctcccccaagctggaggcggcagaggactgggccaagccccaacctgcctcccagccaggctcctccaggcctctggtttagcggagccccctgagcccaggcctgtgtctagccccagtggctcactgaactttcagggcagtcagggggtcctgcttagaagccagtcaccagccctctgcctgcagccatggaagggggtgtgcacgtgcctctgtgtgtgtggctgagtgtattctgcgcgtgtgtgtggagggagggagggaggggagcatggtgtctcccgctccaccgccctttgttgagccccatcagctgcccccttttactttgcattgaacggcctgtccaaagatcctctctctagggcagcagagagctttttgcactttaaaaaaaaaaagaaagaaagaa

SEQ ID NO: 173889 - DNA, 2349 bp, Artificial Sequence
  derived and/or modified sequence
atggagccggaggaggagcgaatcaggtattcccagcggcttcgggggaccatgcgaaggcggtacgaggacgacggaatttccgatgacgaaatcgaggggaagagaacatttgatctcgaggaaaagctacacaccaacaagtataatgccaatttcgtgacatttatggagggaaaggatttcaacgttgaatacattcaaagaggaggcctacgggatccattaatattcaaaaacagcgacggactagggataaagatgcccgaccctgattttacagtcaatgacgtgaagatgtgcgtcggaagccgccgcatggtcgacgtaatggacgttaacactcagaaagggatcgagatgaccatggctcagtggactcgctattacgagacaccggaagaggagcgagaaaaattatacaacgtcatcagcttggagttctcccacaccaggttggaaaacatggtgcagaggccttccacagtggattttattgattgggtggataacatgtggccacgccacctcaaggagtcccaaacagagagcactaacgcaattctcgagatgcagtatcccaaggttcaaaagtactgcctcatgtccgtacgggggtgttataccgattttcatgtagatttcggtgggacttctgtgtggtatcacatacaccaaggtggcaaagttttctggctgatccctccaaccgcccataatctggaactctatgagaactggctcctctcaggcaaacagggggatatctttctgggagaccgagtgtcggattgtcaacgtattgaactgaagcagggatacacttttgttatcccatccggctggatccacgctgtatatactcctaccgacactctggttttcggcggtaacttcctccactcctttaacatccccatgcagctgaagatttacaacatcgaggatcggacccgtgtccctaataagttcaggtaccctttctactacgaaatgtgctggtatgttttggagcgttatgtctactgtattaccaaccgaagccacctcacaaaagaattccagaaagaatctttatctatggacttagagctgaacggactggaaagtggcaacggtgatgaggaggccgttgacagggaacccagacggctctcatccaggagatctgtgctgacaagtcccgtggcaaatggggtgaatctggattatgacggccttggaaagacgtgccggagtctgccttcacttaaaaaaaccctggctggcgactcatcctccgattgttccagaggctctcacaatgggcaggtttgggatccccagtgcgcccctcgaaaagatcgccaggtccatcttacacactttgaactagagggtctccgatgtctggtggataagctggagagcttacccctccacaaaaaatgtgtgcctactgggatcgaggatgaggatgccttaattgccgatgttaaaattctcctggaagaattggctaactcagatccaaagctggctttaacgggggtgcctattgtacaatggccaaagagggataagttgaaattccctaccaggcccaaagtccgcgtacctaccatccccataactaagccacacactatgaaacctgcgcctcgtctaactccagtgagaccagcagctgcaagcccgatcgtcagcggcgccagacgtaggcgggtgcggtgcaggaagtgcaaagcatgcgtgcagggcgaatgtggggtgtgccactattgtcgagatatgaagaagtttggaggaccggggaggatgaaacagagttgcgttctgaggcaatgcttggcaccacgactaccgcattctgttacctgtagcctttgcggtgaggttgaccagaatgaggaaacccaagacttcgagaaaaaactgatggaatgctgtatctgcaacgagattgtccacccaggttgtctgcagatggacggtgaaggactcctaaacgaggaactccctaactgctgggagtgccccaagtgctaccaggaggacagcagcgaaaaggcccagaagcgaaagatggaagagtccgatgaggaagctgtgcaggccaaggtgttgcgcccccttcgctcttgcgacgagcccctaactcccccacctcacagtcccacaagtatgctgcagcttatccacgaccccgtctctccacggggaatggtgaccagaagtagccccggagcaggccccagcgatcaccactcagcaagcagagacgaacggttcaagagaaggcagcttttacgtttacaggctactgaacgtaccatggttctcagacaggaaactctggataagaactag

SEQ ID NO: 173890 - DNA, 3489 bp, Artificial Sequence
  derived and/or modified sequence
atggaacccgaagaagagcggattcgctacagccagcgattgcgtggtactatgagacgaagatatgaggacgacggaatctcagacgacgaaatcgagggtaaacggaccttcgatcttgaggagaaattgcacactaataaatataacgctaactttgttacttttatggagggcaaagactttaatgtcgaatacatccaaagagggggactgcgcgacccattaatctttaaaaattccgatgggctcggtataaagatgccagacccagatttcactgtgaacgacgtcaagatgtgtgtgggatcaaggcgcatggtggacgtaatggacgtgaatacacaaaaaggaatcgagatgacgatggctcagtggacgcgttattacgagactcctgaagaggaacgcgagaagttgtacaatgtaatcagcctggagttttcccatacccggctcgaaaatatggtgcagagacctagcaccgtggacttcattgactgggtcgacaacatgtggcctcggcaccttaaggaatctcagacagagtcaacaaacgctattttagaaatgcagtatcccaaggtccagaaatactgcttaatgagcgtaaggggatgctacacagactttcatgtggactttgggggtactagcgtttggtaccacattcaccaagggggtaaggttttctggttgatccccccaactgctcataatctcgagctgtacgagaactggctactctccggcaaacagggagatatttttctgggtgaccgcgtttccgactgtcagcgtatcgagttgaagcagggctacacttttgttatcccatctggttggattcatgcggtttacacacccactgacactctggtgttcggaggaaatttcttgcattcatttaatattccaatgcaacttaagatctataatatcgaggaccggacccgcgtgccaaacaagtttcgataccccttctactatgagatgtgctggtatgtgctggagagatacgtgtattgtatcactaatcgatcccacttgactaaggaatttcagaaggagagcctttctatggacctcgaactgaatggactggagagtggcaatggagatgaagaggccgtcgaccgggagccaaggaggctttcttcaagaaggtcggttttgacctctccagtggctaacggcgtgaatctcgactatgatggactgggaaagacatgtaggagcttacccagcctgaaaaagaccctcgccggagacagttcatctgattgcagtcgaggctcccacaacgggcaggtgtgggatccacagtgcgccccccgaaaggataggcaggtgcacctgacacacttcgaactcgagggtctgcggtgcttggtggataaacttgagtcactccctctacacaagaaatgtgtgcctaccggtatcgaggacgaagacgcccttatagctgatgttaagattctcctagaagagttagccaatagtgatccaaaattggcgcttaccggcgttcctatagtgcaatggcccaaacgggacaagttgaagttcccgacacggcctaaagtaagggttccgactattcccattacgaagcctcatacaatgaaacccgcacctaggttgacccctgtcaggccagcagctgcgtcaccaattgtgagcggcgctcgaaggcgcagggttcggtgccgaaagtgcaaggcctgcgttcagggcgagtgtggagtctgccactattgccgcgacatgaaaaagtttgggggtcccggacgcatgaagcagtcttgcgtgctgcgacagtgtttagctccgcgcttgccacatagcgtcacctgctctctatgcggagaagtggaccaaaatgaagaaactcaggatttcgagaagaaactcatggagtgctgtatctgcaatgagatcgtgcaccctggatgtctgcagatggacggggagggcctgttaaacgaagaactgccaaactgctgggagtgccctaaatgctatcaggaagactccagtgagaaggcacagaagcggaagatggaggagtctgatgaggaggcagtgcaggccaaagtgctgcgcccccttaggagctgcgacgagccactgaccccacctccacacagtcctaccagcatgctgcagctgatccacgatcccgtcagcccgcgcggcatggtgactcgcagcagccccggagcaggacctagcgatcatcattccgccagccgggatgaaaggttcaaacggcgtcagttacttaggctgcaggccaccgaacgcaccatggtgagagagaaggagaacaatccttctgggaagaaggaactgagcgaggtcgaaaaagcaaaaataagagggagttatctgaccgtaactctgcagcgacctacaaaagagttgcatggaacatctattgttcccaagctgcaggctataaccgctagctcagccaacctgagacactcgcctcgcgtgttagtgcagcattgtcccgctaggaccccacaaagaggggatgaagaaggccttgggggggaggaggaggaggaagaagaggaggaagaagaagatgactccgccgaggagggcggtgctgcccggcttaacgggaggggctcctgggcccaggacggagacgaatcttggatgcagagggaggtatggatgagcgtgttccgatacctgagccgcagagaactgtgcgagtgcatgagggtctgtaagacatggtataaatggtgttgtgacaagcggctgtggaccaaaatagatcttagcagatgtaaagctatcgtgccacaggccctgagcggtataattaagaggcagcctgtttccctcgatctctcctggactaacataagtaagaaacagctaacctggctcgtgaacagattgccaggtctcaaggacctgctgttggccgggtgcagctggtcagccgtgagcgcattatctacatcatcctgcccgctgctccggacactagatctgaggtgggctgtgggtatcaaggaccctcaaatccgggacctgctaacgccacccgccgataaaccggggcaagacaatcggtcaaagcttcgcaatatgaccgattttcgacttgccggactggacattaccgatgctacacttcggctgatcattcggcacatgccactgctatctaggttagacttgtcccactgctcccatcttaccgaccagagcagcaatctccttacagctgtaggttcctccacacgctactcactgacagagctgaacatggccggatgcaacaagcttacggatcagacgttgatctatctgcggcgcattgctaatgtgacacttatcgatctgcggggttgtaaacaaataaccaggaaagcctgtgagcactttatttccgacctcagcataaattcactgtattgtctcagtgatgaaaagctgattcagaaaatctcctag

SEQ ID NO: 173891 - DNA, 2349 bp, Artificial Sequence
  derived and/or modified sequence
atggagcctgaggaggagcgcatccgctacagccagaggctgcggggcaccatgagaagaagatatgaagatgatggcatcagtgatgatgaaattgagggcaagaggacctttgacctggaggagaagctgcacaccaacaagtacaatgccaactttgtgaccttcatggagggcaaggacttcaacgtggagtacatccagaggggcggcctgcgggaccccctcatcttcaagaacagtgatggcctgggcatcaagatgccagaccctgacttcaccgtgaatgatgtgaagatgtgtgtgggcagcaggaggatggtggatgtgatggatgtgaacacccagaagggcatcgagatgaccatggcccagtggacccgctactatgagaccccagaggaggagcgggagaagctgtacaacgtcatcagcctggagttcagccacacccggctggagaacatggtgcagaggcccagcacagtggacttcatcgactgggtggacaacatgtggcccaggcacctgaaggagagccagacagagagcaccaatgccatcctggagatgcagtaccccaaggtgcagaagtactgcctgatgtctgtgcggggctgctacacagacttccacgtggactttggaggcacctctgtgtggtaccacatccaccagggcggcaaggtgttctggctgatccccccaacagcccacaacctggagctgtatgagaactggctgctgagcggcaagcagggcgacatcttcctgggggacagagtgtctgactgccagagaattgagctgaagcagggctacaccttcgtcatccccagcggctggattcatgctgtgtacacccccacagacaccctggtgtttggaggcaacttcctgcacagcttcaacatccccatgcagctgaagatctacaacatcgaggacaggaccagggtgcccaacaagttccgctaccccttctactatgagatgtgctggtacgtgctggagcgctacgtgtactgcatcaccaacagaagccacctgaccaaggagttccagaaggagagcctgtccatggacctggagctgaatggcctggagagcggaaatggagatgaggaggccgtggaccgggagccccggcggctgagcagccgccgctctgtgctgaccagccctgtggccaacggggtgaacctggactatgatggcctgggcaagacctgccgcagcctgcccagcctgaagaagaccctggccggggacagcagcagtgactgcagccggggcagccacaacggccaggtgtgggacccccagtgtgcccccaggaaggaccggcaggtgcacctgacccactttgagctggagggcctgcgctgcctggtggacaagctggagagcctgcccctgcacaagaagtgtgtgcccaccggcattgaagatgaagatgccctgattgctgatgtgaagatcctgctggaggagctggccaacagcgaccccaagctggccctgactggagtgcccatcgtgcagtggcccaagagggacaagctgaagttccccacccggcccaaggtgcgggtgcccaccatccccatcaccaagccccacaccatgaagccagccccccggctgacccctgtgcggcctgctgctgccagccccatcgtgtctggggccaggagaagaagagtgcgctgcaggaagtgcaaggcctgtgtgcagggagaatgtggggtgtgccactactgccgggacatgaagaagtttggaggccctggccgcatgaagcagagctgtgtgctgcggcagtgcctggccccccggctgccccacagcgtgacctgcagcctgtgtggggaggtggaccagaatgaggagacccaggactttgagaagaagctgatggagtgctgcatctgcaatgagatcgtgcaccctggctgcctgcagatggatggagagggcctgctgaatgaggagctgcccaactgctgggagtgccccaagtgctaccaggaggacagcagcgagaaggcccagaagaggaagatggaggagagtgatgaggaggccgtgcaggccaaggtgctgcggcccctgcggagctgtgatgagcccctgaccccaccaccccacagccccacctccatgctgcagctgattcatgaccctgtgagcccccggggcatggtgaccaggagcagccctggagctggccccagcgaccaccacagcgccagcagagatgagcgcttcaagaggcggcagctgctgcggctgcaggccacagagaggaccatggtgctgcggcaggagaccctggacaagaactag

SEQ ID NO: 173892 - DNA, 3489 bp, Artificial Sequence
  derived and/or modified sequence
atggagcctgaggaggagcgcatccgctacagccagaggctgcggggcaccatgagaagaagatatgaagatgatggcatcagtgatgatgaaattgagggcaagaggacctttgacctggaggagaagctgcacaccaacaagtacaatgccaactttgtgaccttcatggagggcaaggacttcaacgtggagtacatccagaggggcggcctgcgggaccccctcatcttcaagaacagtgatggcctgggcatcaagatgccagaccctgacttcaccgtgaatgatgtgaagatgtgtgtgggcagcaggaggatggtggatgtgatggatgtgaacacccagaagggcatcgagatgaccatggcccagtggacccgctactatgagaccccagaggaggagcgggagaagctgtacaacgtcatcagcctggagttcagccacacccggctggagaacatggtgcagaggcccagcacagtggacttcatcgactgggtggacaacatgtggcccaggcacctgaaggagagccagacagagagcaccaatgccatcctggagatgcagtaccccaaggtgcagaagtactgcctgatgtctgtgcggggctgctacacagacttccacgtggactttggaggcacctctgtgtggtaccacatccaccagggcggcaaggtgttctggctgatccccccaacagcccacaacctggagctgtatgagaactggctgctgagcggcaagcagggcgacatcttcctgggggacagagtgtctgactgccagagaattgagctgaagcagggctacaccttcgtcatccccagcggctggattcatgctgtgtacacccccacagacaccctggtgtttggaggcaacttcctgcacagcttcaacatccccatgcagctgaagatctacaacatcgaggacaggaccagggtgcccaacaagttccgctaccccttctactatgagatgtgctggtacgtgctggagcgctacgtgtactgcatcaccaacagaagccacctgaccaaggagttccagaaggagagcctgtccatggacctggagctgaatggcctggagagcggaaatggagatgaggaggccgtggaccgggagccccggcggctgagcagccgccgctctgtgctgaccagccctgtggccaacggggtgaacctggactatgatggcctgggcaagacctgccgcagcctgcccagcctgaagaagaccctggccggggacagcagcagtgactgcagccggggcagccacaacggccaggtgtgggacccccagtgtgcccccaggaaggaccggcaggtgcacctgacccactttgagctggagggcctgcgctgcctggtggacaagctggagagcctgcccctgcacaagaagtgtgtgcccaccggcattgaagatgaagatgccctgattgctgatgtgaagatcctgctggaggagctggccaacagcgaccccaagctggccctgactggagtgcccatcgtgcagtggcccaagagggacaagctgaagttccccacccggcccaaggtgcgggtgcccaccatccccatcaccaagccccacaccatgaagccagccccccggctgacccctgtgcggcctgctgctgccagccccatcgtgtctggggccaggagaagaagagtgcgctgcaggaagtgcaaggcctgtgtgcagggagaatgtggggtgtgccactactgccgggacatgaagaagtttggaggccctggccgcatgaagcagagctgtgtgctgcggcagtgcctggccccccggctgccccacagcgtgacctgcagcctgtgtggggaggtggaccagaatgaggagacccaggactttgagaagaagctgatggagtgctgcatctgcaatgagatcgtgcaccctggctgcctgcagatggatggagagggcctgctgaatgaggagctgcccaactgctgggagtgccccaagtgctaccaggaggacagcagcgagaaggcccagaagaggaagatggaggagagtgatgaggaggccgtgcaggccaaggtgctgcggcccctgcggagctgtgatgagcccctgaccccaccaccccacagccccacctccatgctgcagctgattcatgaccctgtgagcccccggggcatggtgaccaggagcagccctggagctggccccagcgaccaccacagcgccagcagagatgagcgcttcaagaggcggcagctgctgcggctgcaggccacagagaggaccatggtgcgggagaaggagaacaaccccagcggcaagaaggagctgtctgaggtggagaaggccaagatccggggcagctacctgactgtgaccctgcagaggcccaccaaggagctgcacggcaccagcatcgtgcccaagctgcaggccatcacagccagcagcgccaacctgcggcacagcccccgggtgctggtgcagcactgcccagcccggaccccccagagaggagatgaggagggcctgggcggggaggaggaggaggaggaggaggaggaggaggaggatgattctgctgaggagggcggggccgcccggctgaatggccggggctcctgggcccaggatggagatgagagctggatgcagcgggaggtgtggatgtctgtgttccgctacctgagcagaagagagctgtgtgagtgcatgagggtgtgcaagacctggtacaagtggtgctgtgacaagaggctgtggaccaagattgacctgagccgctgcaaggccatcgtgccccaggccctgagcggcatcatcaagaggcagcctgtgtccctggacctgtcctggaccaacatcagcaagaagcagctgacctggctggtgaaccggctgcccggcctgaaggacctgctgctggccggctgctcctggagcgctgtgtctgccctgagcaccagcagctgccccctgctgcggaccctggacctgcgctgggccgtgggcatcaaggacccccagatccgggacctgctgaccccacctgctgacaagccaggccaggacaacagaagcaagctgaggaacatgacagacttccggctggccggcctggacatcacagatgccaccctgcggctcatcatccgccacatgcccctgctgagccggctggacctgagccactgcagccacctgacagaccagagcagcaacctgctgacagctgtgggcagcagcacccgctacagcctgacagagctgaacatggccggctgcaacaagctgacagaccagaccctcatctacctgcggcgcatcgccaacgtgaccctgattgacctgcggggctgcaagcagatcaccaggaaggcctgtgagcacttcatcagtgacctgagcatcaacagcctgtactgcctgagtgatgagaagctgatccagaagatctcctag

SEQ ID NO: 173893 - DNA, 2349 bp, Artificial Sequence
  derived and/or modified sequence
atggagcccgaggaggagcggatccggtacagccagcggctgcggggcaccatgaggagacgatacgaggatgatgggatctcagatgatgagattgaagggaaaaggacctttgacctcgaggagaagctccataccaacaaatacaacgccaactttgtgacctttatggagggaaaggattttaatgtcgagtatatacagagaggcggactcagggatcccctgattttcaagaattcagatggattagggatcaaaatgcccgacccagattttacagtgaacgacgtgaaaatgtgcgtaggctccagacgtatggtcgacgtaatggacgtcaacacacagaaggggattgagatgacaatggctcagtggacacgatattacgaaacccctgaggaggaaagggagaaactttacaatgtgatctctctggagttctcacacaccaggctggagaacatggttcagcggccttccaccgtggattttattgactgggttgataatatgtggcctcgacacttaaaagaaagtcagactgaatcaactaatgctatactggagatgcagtatcccaaggtccagaaatactgtctgatgtcagtacgaggctgctacactgacttccatgtggactttgggggcaccagcgtctggtaccacattcatcagggcggaaaagtcttttggttgattccccctaccgcccacaatctcgagctttatgagaattggctcctgagtggcaagcagggagacatattcctcggtgaccgcgtgtcggattgtcaaagaatcgagctgaagcagggatacacctttgtcattccttcagggtggatccatgccgtgtataccccaaccgatactttagtcttcggaggcaattttttgcactctttcaacatccccatgcagttgaaaatctacaatattgaagaccgcacccgtgtaccaaataagtttcggtatcctttctattacgaaatgtgttggtacgtgctggaaagatacgtgtattgcatcaccaatcgatctcatttaactaaagagttccaaaaagaatcactcagcatggacctggagctgaatggcctagagtcaggtaatggtgatgaagaggccgttgatcgcgaaccacgaagactttcatcccgaaggtcggtacttacatcaccagtagcaaacggggttaatctcgattacgacggactgggcaagacatgccgttctctcccgagtctgaaaaaaacgctggcgggtgacagctccagtgactgcagcaggggttcgcacaacgggcaagtgtgggacccccagtgcgcacccagaaaagatcggcaggttcacctcacccacttcgaactcgaaggcttacggtgcctggtggacaagttagaatctctgcctcttcacaagaaatgcgtgccaactggtattgaggatgaggatgccctcattgccgacgtgaagatactgttggaggaacttgcaaatagcgaccccaaactagccttgaccggcgtgcccatcgtccaatggccaaagagagataagcttaaattcccaacgaggccaaaagtccgggtccccacaatccctatcaccaaacctcacactatgaagcctgcgcccaggttaaccccagtgagaccagccgcagccagtccaatcgtctctggcgctagaagacggcgagtcaggtgccgaaaatgcaaagcttgcgttcagggagaatgcggagtttgtcattactgcagagacatgaagaagtttggcggccctggacggatgaaacaatcatgtgttcttaggcagtgccttgcacctcgcctcccgcactcagtgacttgttcattatgtggcgaggtcgatcagaacgaagagactcaggattttgagaagaaactgatggagtgctgcatttgcaacgagatagtccacccagggtgcctgcaaatggatggtgaaggcttgctgaacgaagaactcccgaactgttgggaatgcccgaagtgctatcaagaagacagctctgaaaaggcacagaagaggaaaatggaggagagcgacgaggaggcagtgcaagcgaaggtacttcgcccgcttcggagctgcgacgagcccctcacaccccctccccatagccccactagcatgctccagcttatccacgatcccgtgagtccgcgggggatggttacccggtccagtcctggcgctggcccgagcgatcaccattctgcaagcagggacgaaaggttcaaacgacggcagttgctgaggctacaggccacagaacggaccatggtcctacgacaggaaacactcgataaaaattag

SEQ ID NO: 173894 - DNA, 3489 bp, Artificial Sequence
  derived and/or modified sequence
atggagcccgaggaggagcggatccggtacagccagcggctgcggggaacaatgcgacggagatacgaggacgacggcattagcgatgacgaaattgaaggcaaaagaacattcgatctggaagagaaattacatactaacaagtacaacgcaaactttgtcactttcatggaggggaaggattttaatgtcgagtatatacagcggggcgggctaagggaccccctcatctttaaaaactcggacggtctgggtatcaaaatgcctgatcctgacttcactgtaaacgacgtgaagatgtgcgtggggtcccggcgtatggtggacgttatggacgtcaatacccaaaagggaattgagatgactatggcccaatggacgcggtactatgaaacgcccgaagaggagcgagagaaactgtataatgtaatttctctggagttttcacatacgaggttggagaacatggtacagcgcccctccaccgtcgattttattgattgggtcgacaatatgtggccaaggcatctcaaggaatcccagacagagagcaccaacgctatcctcgagatgcaatacccaaaggtgcagaagtattgtttgatgtctgtgaggggatgttacaccgactttcacgtggactttggggggactagcgtgtggtatcatatacatcaggggggcaaggtcttttggctaattccaccaactgctcacaatctggagctctacgagaactggttgctatctggaaagcagggcgatatcttcctgggtgatcgcgtgtccgattgccaaagaatcgaattgaagcaaggttatacctttgttattccttctggttggatccatgcggtatatacacccaccgatacgctcgtgttcgggggcaacttccttcacagttttaatatcccaatgcagctcaagatctataatatcgaagatcggaccagggtccccaacaagtttcgctatcccttctactatgagatgtgctggtacgtcctagagagatacgtgtattgcatcacaaatcgaagccacctgactaaggaatttcagaaggagtctctgagcatggacttggaactgaatgggctcgaatctggaaatggagacgaggaggccgtggacagggagccaaggaggctctccagccgcagatccgtccttacaagccccgtcgccaacggcgttaatctggactacgacggtctgggtaagacatgcagaagtctgccttccttaaaaaaaactttggcaggggacagttcctccgattgtagtagaggatcccacaatggccaggtatgggacccccagtgcgccccccgcaaagatcggcaagtccacctgactcattttgaattagaaggcctgcggtgtctggtggacaaattagaatctctaccactgcacaaaaagtgcgtgcctacaggaatcgaggatgaggatgctctgattgcagatgtaaagatcctactcgaggaactggctaacagtgatcccaaactggctctgacgggagtgccaatcgtccaatggcctaaacgcgacaagctgaagtttccaactcgccctaaagtaagggtccctactatccccattacgaaaccccacacaatgaaaccagcccctaggttgacaccagtgagaccggctgcagcatctccaatcgtgagcggggctcgacgaagaagggtgcgctgtaggaagtgtaaggcttgcgtgcagggcgaatgcggagtatgtcactattgtcgtgacatgaagaagtttggtggccctggtaggatgaaacagagctgtgttttgagacaatgtctcgcaccccgtcttccacactctgtcacctgttcactatgcggagaggtggaccagaacgaagaaacccaagacttcgaaaagaagctgatggagtgctgcatttgtaatgaaatcgttcaccccggatgcctgcagatggatggtgagggtctgctcaatgaggagctgcccaactgttgggagtgtccaaagtgttatcaagaggattccagtgaaaaggctcagaaacgcaagatggaagagagcgatgaagaggcagttcaagcaaaggttctgcgacccttacggagctgcgatgagccgttgactcctccccctcactcacctacatctatgctgcagctaatccacgacccggtgtctccccgagggatggtgaccaggtcatctccaggtgcaggcccttcagaccatcactcagcctccagggacgagaggttcaagcgccgacaactcctcaggctgcaggcaaccgaaaggactatggtaagagagaaggagaacaacccctccggaaagaaagagttaagtgaggtggaaaaagcaaaaatcagagggtcctatcttacagtgaccctgcagcggcccaccaaggagcttcatggtacctccattgttcctaagctgcaggcaatcaccgctagttcagcgaaccttcgtcattctccccgggttttggtgcagcattgcccagcccggaccccccagcggggtgacgaggagggattgggaggcgaagaagaagaggaggaggaagaggaggaggaggacgattcagccgaggagggcggcgccgcgaggctgaacggccgcggctcctgggctcaggatggggatgagtcctggatgcagagagaggtgtggatgtcggtttttagatacttgtcccgtcgagaattgtgcgaatgcatgagagtctgtaaaacatggtacaagtggtgttgcgacaagagactatggacaaagattgatctgtcaagatgcaaagccatagtgcctcaggccttgtctggaattattaaacgtcagccagtctctcttgacctgagctggactaacatctccaaaaaacagttgacttggcttgtgaatcgtctgcctgggctgaaagatctgctgctagccggttgttcctggagcgccgtctccgcactttccacctcctcctgcccactgctccgtaccctggaccttaggtgggccgtgggcattaaggacccacaaatccgagacctattgacacctcctgccgacaagcctggccaggacaatcgttctaaactgcgcaacatgactgatttccgtcttgccggcctggacatcacagacgccacccttcgcctgattattagacacatgcccttgctttctaggctcgacctgtcacactgctctcatctcaccgaccagagttccaacctgctgaccgccgtcggcagctccacacgctactctctgacagagcttaacatggcaggatgcaataagctgacagaccaaactctgatttacttacggagaatagccaacgtgacactaatcgatttgcggggttgcaagcagataacaagaaaagcttgtgagcacttcatttccgacttgtccatcaactccctctattgtctaagcgatgagaagttgatacagaagatatcttag

SEQ ID NO: 173895 - DNA, 2349 bp, Artificial Sequence
  derived and/or modified sequence
atggagcctgaggaggaacgaatcaggtacagccaacgactgaggggaaccatgaggcggaggtacgaggacgatgggattagcgacgatgaaatagaggggaagaggacctttgacctggaagagaaattgcacaccaacaagtataacgcgaacttcgtgaccttcatggagggtaaagattttaatgtggaatatatccagagggggggtctacgtgacccacttatatttaaaaactccgacggcttggggatcaagatgcccgatccggacttcaccgtcaacgatgtgaagatgtgcgtgggctcacgcagaatggttgacgtgatggacgtgaatacccagaagggcatagagatgaccatggcacaatggacccggtactacgaaacgccagaggaggagagagagaagctgtataatgtgataagtctcgagttctctcacaccagattggaaaatatggtccagaggccatcaactgtggactttatagactgggtggacaatatgtggcctcgccatttgaaagagagtcaaaccgaatctacaaatgctatcttggagatgcaatatccgaaggtgcaaaaatattgtctgatgagcgtgagaggctgttatacagatttccatgtcgattttggtggcacatcagtgtggtatcatattcaccaaggcggtaaagtgttctggctaatccccccaacggcgcataacctggagctgtatgaaaattggctgctttccggaaaacaaggagacatattcctgggagacagagtaagcgattgtcagcgcatcgagcttaagcaggggtacaccttcgtgattccgtcaggttggatccacgccgtttacacccctaccgacactctcgtatttggcggaaatttcctgcatagctttaacatccctatgcaattaaagatctacaacatcgaagaccgcacacgggtcccaaacaagttccggtatcctttctattatgaaatgtgctggtacgtcctggagagatacgtatactgtatcaccaataggagtcatctcactaaagaatttcaaaaggaatcattgtccatggatttggagcttaacggcctggagagcggtaacggcgacgaagaggcagtagacagagagccacgtcgcttaagtagccggaggagcgtgttgactagccccgtggccaacggagttaacctcgattatgacggactgggtaagacgtgcagatccctgccttctctgaaaaagactctagcgggagattcctcttcagattgcagtcgaggctcccacaatggccaggtctgggatccccagtgcgctcccaggaaagaccggcaggtgcatctgacacattttgagctggaaggccttaggtgtctggtagacaagctcgaaagtcttcctttgcacaagaagtgcgtgcctacgggtattgaggatgaggatgccctaatcgccgacgtcaaaattctgctggaggagctcgctaacagcgaccccaaactggctctgaccggtgttccgatcgtccaatggcccaagcgcgacaaactcaaattcccaacaaggcctaaagtaagggtacccacaatcccaattaccaagccgcacacaatgaagccagccccaagactgactccagtgagacccgctgcagcaagtcccatcgtgagtggcgcacgccgtaggcgtgtgcggtgtagaaagtgtaaagcctgcgtccaaggcgagtgtggtgtctgccactattgtagggacatgaagaaatttggcggtccgggaaggatgaaacaaagttgtgtgctgcgtcagtgtctggcccctcggctaccccattctgtgacttgcagtttatgcggcgaagtggatcagaacgaggaaacccaggactttgagaagaaactgatggagtgctgcatctgtaacgaaatcgtccatccgggttgcctgcagatggatggtgaggggctgctgaacgaagagttgcccaattgctgggagtgtcctaagtgctatcaggaagacagttctgagaaagctcagaagcggaagatggaagagagcgatgaagaggccgtgcaggctaaagttttgcgaccccttaggagttgcgacgagccgctgactcctccccctcatagccctactagcatgctgcaactgatccatgatcctgtgtctcctcgcggaatggtgacccgtagctcccctggggcagggccaagcgatcatcacagcgcctcacgtgacgagcgctttaagcgcaggcagctcctcaggttgcaggcgaccgagcggaccatggtcctgcggcaggaaaccctcgataagaattag

SEQ ID NO: 173896 - DNA, 3489 bp, Artificial Sequence
  derived and/or modified sequence
atggagccagaggaggaacggatccgctacagtcagcgtctcaggggaacgatgcggcgtcgctacgaagatgatggtatatccgacgacgagattgagggcaaaagaacttttgacctcgaggagaagctgcatacaaacaaatacaatgctaacttcgtgacttttatggagggcaaggattttaacgtggagtacatccagaggggcggacttcgtgaccctctaatttttaaaaattctgatggactgggaattaagatgccagacccagacttcaccgtaaacgacgtgaagatgtgcgtcggaagccggaggatggtcgatgtcatggacgtcaacacgcagaaagggattgaaatgacgatggctcaatggacccgatactacgaaactccagaggaggaacgagagaagttgtacaacgtgattagtctggaattctcacacactagattggaaaacatggtgcagaggccctccacagtggatttcattgactgggtagacaacatgtggccgagacacctgaaggaaagccaaacggagtctacaaatgcaattctagagatgcagtatccaaaagtgcaaaagtattgtctgatgagcgtacgcggatgttataccgacttccatgtggatttcggagggacctccgtgtggtatcacattcatcagggaggcaaggttttctggttgatacctcctacagcccataatctcgagctgtacgaaaattggcttctgagtggtaaacagggcgatatattcctgggcgatagagttagcgactgtcagcgtatagagctgaaacagggatataccttcgtcatccctagtggatggattcatgcagtgtacactccaaccgatacattggttttcggcggaaattttctgcacagctttaatattccaatgcagctaaaaatatataacatcgaagaccggacccgggtccccaacaaatttagatatcccttctactacgaaatgtgctggtacgtcctggagcgctacgtgtactgtatcacaaataggtcgcaccttaccaaggagtttcagaaggagtctctcagtatggatcttgaattgaacggccttgaaagcggcaatggcgacgaagaagccgtagatcgggaacctaggcggcttagctctcggagaagcgttttgacgtccccggtggccaatggcgtgaatcttgactacgacggtctcggaaagacctgccggtctctgccctccctcaagaaaacattagcgggtgattcttcgagcgactgcagcagaggctcacataatgggcaggtctgggaccctcagtgtgcccctcggaaggacaggcaggtacaccttacgcattttgaactggaaggcctcagatgtctggtggataagctggagtctttaccactacacaagaaatgcgttccaactggaattgaagacgaggacgcattaatcgctgatgtgaaaatactgctggaggagctggccaactccgacccaaaacttgctctgacaggcgttccaatcgtgcagtggccaaagcgcgataaactgaaattccctactaggcctaaggtgcgtgtaccgacgattcccattacgaagcctcacaccatgaagcccgctcccagattgacacccgtccgccctgctgcagcatctcctatcgtgagcggcgctcggcgtcggagggtgagatgcaggaaatgtaaagcctgtgtgcagggggagtgtggcgtgtgccactattgccgggatatgaagaagttcggtggcccaggcaggatgaagcagtcatgcgtgctgcgccagtgccttgcacctcgcctgccccattcggtgacctgttctctgtgcggggaggtggaccagaacgaggagacacaggactttgagaaaaagctgatggagtgttgcatttgcaacgaaattgttcatcctggctgccttcagatggatggcgagggtttacttaacgaggagcttcctaactgttgggagtgtcctaagtgctatcaggaagatagctcagagaaagctcagaagcgcaagatggaggaaagcgacgaagaggccgtccaggccaaggtgcttcgccctttaagaagttgcgatgagcctttaaccccgccaccgcactcacctacttctatgttgcagctgatccacgacccggtgtctccaagaggaatggtgacccgtagctcccccggtgcaggaccatcagaccaccactcagcgtcgagggacgagcgcttcaaacgtcgacagctgctccgccttcaggccacggagcgcaccatggtccgagaaaaagagaacaatccgtctggaaagaaggaactgagcgaggtcgaaaaggcaaaaatcagaggcagttacttgacagtgaccttgcaacgaccgacaaaagaactgcacgggactagcatcgttcccaagctccaggccatcactgcaagttcagcgaacctcaggcactctccgagagtactggttcaacactgtccagctcgtacccctcagaggggagacgaggagggactggggggagaggaagaagaggaggaagaagaggaagaagaggatgactccgccgaagaggggggtgcagcccgtctgaacgggagaggctcctgggcccaggacggagacgagagttggatgcagcgagaagtttggatgagtgtgttccgctacctgagccggagagagttgtgtgaatgtatgagagtctgtaagacatggtacaaatggtgctgcgataagagactgtggacaaaaatagacctctccagatgcaaggctattgtcccacaggctttgagtggtattattaaaaggcaacccgtttcactcgacctttcttggacaaatattagcaagaagcagctgacatggctggtgaatcgcttgccaggcttgaaagacctgttactggctggctgcagttggagcgccgtctctgcgctgagcacttcatcatgtcccctgctgcggacactggatctgcggtgggccgttggaatcaaggatcctcagatccgcgatttactgacaccacctgccgataaacctgggcaggataatagatccaaattacgaaacatgactgatttcagactggctggcctcgacatcactgacgccacactgaggctaatcatcaggcacatgcccctgttatcgcgcctcgacttatcccactgtagtcacttgaccgatcagtcatccaatctactgaccgcagtaggaagtagtacaagatattctctcactgagctcaacatggccggttgtaacaagcttaccgatcaaaccctaatctacctgcgaagaattgcaaacgtcactctgatcgatctgcgaggatgcaagcagatcacccggaaggcatgtgaacatttcatcagtgacctgtccatcaacagcttgtactgtctgagcgatgaaaagctgatccagaagatctcttag

SEQ ID NO: 173897 - DNA, 2349 bp, Artificial Sequence
  derived and/or modified sequence
atggagcccgaggaggagagaatcagatacagccagagactgagaggcaccatgagaagaagatacgaggacgacggcatcagcgacgacgagatcgagggcaagagaaccttcgacctggaggagaagctgcacaccaacaagtacaacgccaacttcgtgaccttcatggagggcaaggacttcaacgtggagtacatccagagaggcggcctgagagaccccctgatcttcaagaacagcgacggcctgggcatcaagatgcccgaccccgacttcaccgtgaacgacgtgaagatgtgcgtgggcagcagaagaatggtggacgtgatggacgtgaacacccagaagggcatcgagatgaccatggcccagtggaccagatactacgagacccccgaggaggagagagagaagctgtacaacgtgatcagcctggagttcagccacaccagactggagaacatggtgcagagacccagcaccgtggacttcatcgactgggtggacaacatgtggcccagacacctgaaggagagccagaccgagagcaccaacgccatcctggagatgcagtaccccaaggtgcagaagtactgcctgatgagcgtgagaggctgctacaccgacttccacgtggacttcggcggcaccagcgtgtggtaccacatccaccagggcggcaaggtgttctggctgatcccccccaccgcccacaacctggagctgtacgagaactggctgctgagcggcaagcagggcgacatcttcctgggcgacagagtgagcgactgccagagaatcgagctgaagcagggctacaccttcgtgatccccagcggctggatccacgccgtgtacacccccaccgacaccctggtgttcggcggcaacttcctgcacagcttcaacatccccatgcagctgaagatctacaacatcgaggacagaaccagagtgcccaacaagttcagataccccttctactacgagatgtgctggtacgtgctggagagatacgtgtactgcatcaccaacagaagccacctgaccaaggagttccagaaggagagcctgagcatggacctggagctgaacggcctggagagcggcaacggcgacgaggaggccgtggacagagagcccagaagactgagcagcagaagaagcgtgctgaccagccccgtggccaacggcgtgaacctggactacgacggcctgggcaagacctgcagaagcctgcccagcctgaagaagaccctggccggcgacagcagcagcgactgcagcagaggcagccacaacggccaggtgtgggacccccagtgcgcccccagaaaggacagacaggtgcacctgacccacttcgagctggagggcctgagatgcctggtggacaagctggagagcctgcccctgcacaagaagtgcgtgcccaccggcatcgaggacgaggacgccctgatcgccgacgtgaagatcctgctggaggagctggccaacagcgaccccaagctggccctgaccggcgtgcccatcgtgcagtggcccaagagagacaagctgaagttccccaccagacccaaggtgagagtgcccaccatccccatcaccaagccccacaccatgaagcccgcccccagactgacccccgtgagacccgccgccgccagccccatcgtgagcggcgccagaagaagaagagtgagatgcagaaagtgcaaggcctgcgtgcagggcgagtgcggcgtgtgccactactgcagagacatgaagaagttcggcggccccggcagaatgaagcagagctgcgtgctgagacagtgcctggcccccagactgccccacagcgtgacctgcagcctgtgcggcgaggtggaccagaacgaggagacccaggacttcgagaagaagctgatggagtgctgcatctgcaacgagatcgtgcaccccggctgcctgcagatggacggcgagggcctgctgaacgaggagctgcccaactgctgggagtgccccaagtgctaccaggaggacagcagcgagaaggcccagaagagaaagatggaggagagcgacgaggaggccgtgcaggccaaggtgctgagacccctgagaagctgcgacgagcccctgaccccccccccccacagccccaccagcatgctgcagctgatccacgaccccgtgagccccagaggcatggtgaccagaagcagccccggcgccggccccagcgaccaccacagcgccagcagagacgagagattcaagagaagacagctgctgagactgcaggccaccgagagaaccatggtgctgagacaggagaccctggacaagaactag

SEQ ID NO: 173898 - DNA, 3489 bp, Artificial Sequence
  derived and/or modified sequence
atggagcccgaggaggagagaatcagatacagccagagactgagaggcaccatgagaagaagatacgaggacgacggcatcagcgacgacgagatcgagggcaagagaaccttcgacctggaggagaagctgcacaccaacaagtacaacgccaacttcgtgaccttcatggagggcaaggacttcaacgtggagtacatccagagaggcggcctgagagaccccctgatcttcaagaacagcgacggcctgggcatcaagatgcccgaccccgacttcaccgtgaacgacgtgaagatgtgcgtgggcagcagaagaatggtggacgtgatggacgtgaacacccagaagggcatcgagatgaccatggcccagtggaccagatactacgagacccccgaggaggagagagagaagctgtacaacgtgatcagcctggagttcagccacaccagactggagaacatggtgcagagacccagcaccgtggacttcatcgactgggtggacaacatgtggcccagacacctgaaggagagccagaccgagagcaccaacgccatcctggagatgcagtaccccaaggtgcagaagtactgcctgatgagcgtgagaggctgctacaccgacttccacgtggacttcggcggcaccagcgtgtggtaccacatccaccagggcggcaaggtgttctggctgatcccccccaccgcccacaacctggagctgtacgagaactggctgctgagcggcaagcagggcgacatcttcctgggcgacagagtgagcgactgccagagaatcgagctgaagcagggctacaccttcgtgatccccagcggctggatccacgccgtgtacacccccaccgacaccctggtgttcggcggcaacttcctgcacagcttcaacatccccatgcagctgaagatctacaacatcgaggacagaaccagagtgcccaacaagttcagataccccttctactacgagatgtgctggtacgtgctggagagatacgtgtactgcatcaccaacagaagccacctgaccaaggagttccagaaggagagcctgagcatggacctggagctgaacggcctggagagcggcaacggcgacgaggaggccgtggacagagagcccagaagactgagcagcagaagaagcgtgctgaccagccccgtggccaacggcgtgaacctggactacgacggcctgggcaagacctgcagaagcctgcccagcctgaagaagaccctggccggcgacagcagcagcgactgcagcagaggcagccacaacggccaggtgtgggacccccagtgcgcccccagaaaggacagacaggtgcacctgacccacttcgagctggagggcctgagatgcctggtggacaagctggagagcctgcccctgcacaagaagtgcgtgcccaccggcatcgaggacgaggacgccctgatcgccgacgtgaagatcctgctggaggagctggccaacagcgaccccaagctggccctgaccggcgtgcccatcgtgcagtggcccaagagagacaagctgaagttccccaccagacccaaggtgagagtgcccaccatccccatcaccaagccccacaccatgaagcccgcccccagactgacccccgtgagacccgccgccgccagccccatcgtgagcggcgccagaagaagaagagtgagatgcagaaagtgcaaggcctgcgtgcagggcgagtgcggcgtgtgccactactgcagagacatgaagaagttcggcggccccggcagaatgaagcagagctgcgtgctgagacagtgcctggcccccagactgccccacagcgtgacctgcagcctgtgcggcgaggtggaccagaacgaggagacccaggacttcgagaagaagctgatggagtgctgcatctgcaacgagatcgtgcaccccggctgcctgcagatggacggcgagggcctgctgaacgaggagctgcccaactgctgggagtgccccaagtgctaccaggaggacagcagcgagaaggcccagaagagaaagatggaggagagcgacgaggaggccgtgcaggccaaggtgctgagacccctgagaagctgcgacgagcccctgaccccccccccccacagccccaccagcatgctgcagctgatccacgaccccgtgagccccagaggcatggtgaccagaagcagccccggcgccggccccagcgaccaccacagcgccagcagagacgagagattcaagagaagacagctgctgagactgcaggccaccgagagaaccatggtgagagagaaggagaacaaccccagcggcaagaaggagctgagcgaggtggagaaggccaagatcagaggcagctacctgaccgtgaccctgcagagacccaccaaggagctgcacggcaccagcatcgtgcccaagctgcaggccatcaccgccagcagcgccaacctgagacacagccccagagtgctggtgcagcactgccccgccagaaccccccagagaggcgacgaggagggcctgggcggcgaggaggaggaggaggaggaggaggaggaggaggacgacagcgccgaggagggcggcgccgccagactgaacggcagaggcagctgggcccaggacggcgacgagagctggatgcagagagaggtgtggatgagcgtgttcagatacctgagcagaagagagctgtgcgagtgcatgagagtgtgcaagacctggtacaagtggtgctgcgacaagagactgtggaccaagatcgacctgagcagatgcaaggccatcgtgccccaggccctgagcggcatcatcaagagacagcccgtgagcctggacctgagctggaccaacatcagcaagaagcagctgacctggctggtgaacagactgcccggcctgaaggacctgctgctggccggctgcagctggagcgccgtgagcgccctgagcaccagcagctgccccctgctgagaaccctggacctgagatgggccgtgggcatcaaggacccccagatcagagacctgctgaccccccccgccgacaagcccggccaggacaacagaagcaagctgagaaacatgaccgacttcagactggccggcctggacatcaccgacgccaccctgagactgatcatcagacacatgcccctgctgagcagactggacctgagccactgcagccacctgaccgaccagagcagcaacctgctgaccgccgtgggcagcagcaccagatacagcctgaccgagctgaacatggccggctgcaacaagctgaccgaccagaccctgatctacctgagaagaatcgccaacgtgaccctgatcgacctgagaggctgcaagcagatcaccagaaaggcctgcgagcacttcatcagcgacctgagcatcaacagcctgtactgcctgagcgacgagaagctgatccagaagatcagctag

SEQ ID NO: 173899 - protein, 1397 aa, Artificial Sequence
  derived and/or modified sequence
MPSKPEGAAKTIGSYVPGPRSRSPSLNRLGGAGEDGKRPQPLWHVGSPFALGANKDSLSAFEYPGPKRKLYSAVPGRLFVAVKPYQPQVDGEIPLHRGDRVKVLSIGEGGFWEGSARGHIGWFPAECVEEVQCKPRDSQAETRADRSKKLFRHYTVGSYDSFDTSSDCIIEEKTVVLQKKDNEGFGFVLRGAKADTPIEEFTPTPAFPALQYLESVDEGGVAWQAGLRTGDFLIEVNNENVVKVGHRQVVNMIRQGGNHLVLKVVTVTRNLDPDDTARKKAPPPPKRAPTTALTLRSKSMTSELEELVDKASVRKKKDKPEEIVPASKPSRAAENMAVEPRVATIKQRPSSRCFPAGSDMNSVYERQGIAVMTPTVPGSPKAPFLGIPRGTMRRQKSIDSRIFLSGITEEERQFLAPPMLKFTRSLSMPDTSEDIPPPPQSVPPSPPPPSPTTYNCPKSPTPRVYGTIKPAFNQNSAAKVSPATRSDTVATMMREKGMYFRRELDRYSLDSEDLYSRNAGPQANFRNKRGQMPENPYSEVGKIASKAVYVPAKPARRKGMLVKQSNVEDSPEKTCSIPIPTIIVKEPSTSSSGKSSQGSSMEIDPQAPEPPSQLRPDESLTVSSPFAAAIAGAVRDREKRLEARRNSPAFLSTDLGDEDVGLGPPAPRTRPSMFPEEGDFADEDSAEQLSSPMPSATPREPENHFVGGAEASAPGEAGRPLNSTSKAQGPESSPAVPSASSGTAGPGNYVHPLTGRLLDPSSPLALALSARDRAMKESQQGPKGEAPKADLNKPLYIDTKMRPSLDAGFPTVTRQNTRGPLRRQETENKYETDLGRDRKGDDKKNMLIDIMDTSQQKSAGLLMVHTVDATKLDNALQEEDEKAEVEMKPDSSPSEVPEGVSETEGALQISAAPEPTTVPGRTIVAVGSMEEAVILPFRIPPPPLASVDLDEDFIFTEPLPPPLEFANSFDIPDDRAASVPALSDLVKQKKSDTPQSPSLNSSQPTNSADSKKPASLSNCLPASFLPPPESFDAVADSGIEEVDSRSSSDHHLETTSTISTVSSISTLSSEGGENVDTCTVYADGQAFMVDKPPVPPKPKMKPIIHKSNALYQDALVEEDVDSFVIPPPAPPPPPGSAQPGMAKVLQPRTSKLWGDVTEIKSPILSGPKANVISELNSILQQMNREKLAKPGEGLDSPMGAKSASLAPRSPEIMSTISGTRSTTVTFTVRPGTSQPITLQSRPPDYESRTSGTRRAPSPVVSPTEMNKETLPAPLSAATASPSPALSDVFSLPSQPPSGDLFGLNPAGRSRSPSPSILQQPISNKPFTTKPVHLWTKPDVADWLESLNLGEHKEAFMDNEIDGSHLPNLQKEDLIDLGVTRVGHRMNIERALKQLLDR

SEQ ID NO: 173900 - protein, 1473 aa, Artificial Sequence
  derived and/or modified sequence
VAIIAGNFELAEYIKNHKETDIVPFREAPAYSNRRRRPPNTLAAPRVLLRSNSDNNLNASAPDWAVCSTATSHRSLSPQLLQQMPSKPEGAAKTIGSYVPGPRSRSPSLNRLGGAGEDGKRPQPLWHVGSPFALGANKDSLSAFEYPGPKRKLYSAVPGRLFVAVKPYQPQVDGEIPLHRGDRVKVLSIGEGGFWEGSARGHIGWFPAECVEEVQCKPRDSQAETRADRSKKLFRHYTVGSYDSFDTSSDCIIEEKTVVLQKKDNEGFGFVLRGAKADTPIEEFTPTPAFPALQYLESVDEGGVAWQAGLRTGDFLIEVNNENVVKVGHRQVVNMIRQGGNHLVLKVVTVTRNLDPDDTARKKAPPPPKRAPTTALTLRSKSMTSELEELVDKDKPEEIVPASKPSRAAENMAVEPRVATIKQRPSSRCFPAGSDMNSVYERQGIAVMTPTVPGSPKAPFLGIPRGTMRRQKSIDSRIFLSGITEEERQFLAPPMLKFTRSLSMPDTSEDIPPPPQSVPPSPPPPSPTTYNCPKSPTPRVYGTIKPAFNQNSAAKVSPATRSDTVATMMREKGMYFRRELDRYSLDSEDLYSRNAGPQANFRNKRGQMPENPYSEVGKIASKAVYVPAKPARRKGMLVKQSNVEDSPEKTCSIPIPTIIVKEPSTSSSGKSSQGSSMEIDPQAPEPPSQLRPDESLTVSSPFAAAIAGAVRDREKRLEARRNSPAFLSTDLGDEDVGLGPPAPRTRPSMFPEEGDFADEDSAEQLSSPMPSATPREPENHFVGGAEASAPGEAGRPLNSTSKAQGPESSPAVPSASSGTAGPGNYVHPLTGRLLDPSSPLALALSARDRAMKESQQGPKGEAPKADLNKPLYIDTKMRPSLDAGFPTVTRQNTRGPLRRQETENKYETDLGRDRKGDDKKNMLIDIMDTSQQKSAGLLMVHTVDATKLDNALQEEDEKAEVEMKPDSSPSEVPEGVSETEGALQISAAPEPTTVPGRTIVAVGSMEEAVILPFRIPPPPLASVDLDEDFIFTEPLPPPLEFANSFDIPDDRAASVPALSDLVKQKKSDTPQSPSLNSSQPTNSADSKKPASLSNCLPASFLPPPESFDAVADSGIEEVDSRSSSDHHLETTSTISTVSSISTLSSEGGENVDTCTVYADGQAFMVDKPPVPPKPKMKPIIHKSNALYQDALVEEDVDSFVIPPPAPPPPPGSAQPGMAKVLQPRTSKLWGDVTEIKSPILSGPKANVISELNSILQQMNREKLAKPGEGLDSPMGAKSASLAPRSPEIMSTISGTRSTTVTFTVRPGTSQPITLQSRPPDYESRTSGTRRAPSPVVSPTEMNKETLPAPLSAATASPSPALSDVFSLPSQPPSGDLFGLNPAGRSRSPSPSILQQPISNKPFTTKPVHLWTKPDVADWLESLNLGEHKEAFMDNEIDGSHLPNLQKEDLIDLGVTRVGHRMNIERALKQLLDR

SEQ ID NO: 173901 - protein, 1850 aa, Artificial Sequence
  derived and/or modified sequence
MPRSPTSSEDEMAQSFSDYSVGSESDSSKEETIYDTIRATAEKPGGARTEESQGNTLVIRVVIHDLQQTKCIRFNPDATVWVAKQRILCTLTQSLKDVLNYGLFQPASNGRDGKFLDEERLLREYPQPVGEGVPSLEFRYKKRVYKQASLDEKQLAKLHTKTNLKKCMDHIQHRLVEKITKMLDRGLDPNFHDPETGETPLTLAAQLDDSVEVIKALKNGGAHLDFRAKDGMTALHKAARARNQVALKTLLELGASPDYKDSYGLTPLYHTAIVGGDPYCCELLLHEHATVCCKDENGWHEIHQSRCWGHISEPHHTLLSGSARSQQSRSASSALHVCAMYSSFSCVRISLLFHGRITELKQYKKSTPFQVAIIAGNFELAEYIKNHKETDIVPFREAPAYSNRRRRPPNTLAAPRVLLRSNSDNNLNASAPDWAVCSTATSHRSLSPQLLQQMPSKPEGAAKTIGSYVPGPRSRSPSLNRLGGAGEDGKRPQPLWHVGSPFALGANKDSLSAFEYPGPKRKLYSAVPGRLFVAVKPYQPQVDGEIPLHRGDRVKVLSIGEGGFWEGSARGHIGWFPAECVEEVQCKPRDSQAETRADRSKKLFRHYTVGSYDSFDTSSDCIIEEKTVVLQKKDNEGFGFVLRGAKADTPIEEFTPTPAFPALQYLESVDEGGVAWQAGLRTGDFLIEVNNENVVKVGHRQVVNMIRQGGNHLVLKVVTVTRNLDPDDTARKKAPPPPKRAPTTALTLRSKSMTSELEELVDKGVIRKVSDKPEEIVPASKPSRAAENMAVEPRVATIKQRPSSRCFPAGSDMNSVYERQGIAVMTPTVPGSPKAPFLGIPRGTMRRQKSIDSRIFLSGITEEERQFLAPPMLKFTRSLSMPDTSEDIPPPPQSVPPSPPPPSPTTYNCPKSPTPRVYGTIKPAFNQNSAAKVSPATRSDTVATMMREKGMYFRRELDRYSLDSEDLYSRNAGPQANFRNKRGQMPENPYSEVGKIASKAVYVPAKPARRKGMLVKQSNVEDSPEKTCSIPIPTIIVKEPSTSSSGKSSQGSSMEIDPQAPEPPSQLRPDESLTVSSPFAAAIAGAVRDREKRLEARRNSPAFLSTDLGDEDVGLGPPAPRTRPSMFPEEGDFADEDSAEQLSSPMPSATPREPENHFVGGAEASAPGEAGRPLNSTSKAQGPESSPAVPSASSGTAGPGNYVHPLTGRLLDPSSPLALALSARDRAMKESQQGPKGEAPKADLNKPLYIDTKMRPSLDAGFPTVTRQNTRGPLRRQETENKYETDLGRDRKGDDKKNMLIDIMDTSQQKSAGLLMVHTVDATKLDNALQEEDEKAEVEMKPDSSPSEVPEGVSETEGALQISAAPEPTTVPGRTIVAVGSMEEAVILPFRIPPPPLASVDLDEDFIFTEPLPPPLEFANSFDIPDDRAASVPALSDLVKQKKSDTPQSPSLNSSQPTNSADSKKPASLSNCLPASFLPPPESFDAVADSGIEEVDSRSSSDHHLETTSTISTVSSISTLSSEGGENVDTCTVYADGQAFMVDKPPVPPKPKMKPIIHKSNALYQDALVEEDVDSFVIPPPAPPPPPGSAQPGMAKVLQPRTSKLWGDVTEIKSPILSGPKANVISELNSILQQMNREKLAKPGEGLDSPMGAKSASLAPRSPEIMSTISGTRSTTVTFTVRPGTSQPITLQSRPPDYESRTSGTRRAPSPVVSPTEMNKETLPAPLSAATASPSPALSDVFSLPSQPPSGDLFGLNPAGRSRSPSPSILQQPISNKPFTTKPVHLWTKPDVADWLESLNLGEHKEAFMDNEIDGSHLPNLQKEDLIDLGVTRVGHRMNIERALKQLLDR

SEQ ID NO: 173902 - protein, 304 aa, Artificial Sequence
  derived and/or modified sequence
MPRSPTSSEDEMAQSFSDYSVGSESDSSKEETIYDTIRATAEKPGGARTEESQGNTLVIRVVIHDLQQTKCIRFNPDATVWVAKQRILCTLTQSLKDVLNYGLFQPASNGRDGKFLDEERLLREYPQPVGEGVPSLEFRYKKRVYKQASLDEKQLAKLHTKTNLKKCMDHIQHRLVEKITKMLDRGLDPNFHDPETGETPLTLAAQLDDSVEVIKALKNGGAHLDFRAKDGMTALHKAARARNQVALKTLLELGASPDYKDSYGLTPLYHTAIVGGDPYCCELLLHEHATVCCKDENGWHEIHQ

SEQ ID NO: 173903 - DNA, 4194 bp, Artificial Sequence
  derived and/or modified sequence
atgcccagcaagcccgagggcgccgccaagaccatcggcagctacgtgcccggccccagaagcagaagccccagcctgaacagactgggcggcgccggcgaggacggcaagagaccccagcccctgtggcacgtgggcagccccttcgccctgggcgccaacaaggacagcctgagcgccttcgagtaccccggccccaagagaaagctgtacagcgccgtgcccggcagactgttcgtggccgtgaagccctaccagccccaggtggacggcgagatccccctgcacagaggcgacagagtgaaggtgctgagcatcggcgagggcggcttctgggagggcagcgccagaggccacatcggctggttccccgccgagtgcgtggaggaggtgcagtgcaagcccagagacagccaggccgagaccagagccgacagaagcaagaagctgttcagacactacaccgtgggcagctacgacagcttcgacaccagcagcgactgcatcatcgaggagaagaccgtggtgctgcagaagaaggacaacgagggcttcggcttcgtgctgagaggcgccaaggccgacacccccatcgaggagttcacccccacccccgccttccccgccctgcagtacctggagagcgtggacgagggcggcgtggcctggcaggccggcctgagaaccggcgacttcctgatcgaggtgaacaacgagaacgtggtgaaggtgggccacagacaggtggtgaacatgatcagacagggcggcaaccacctggtgctgaaggtggtgaccgtgaccagaaacctggaccccgacgacaccgccagaaagaaggccccccccccccccaagagagcccccaccaccgccctgaccctgagaagcaagagcatgaccagcgagctggaggagctggtggacaaggccagcgtgagaaagaagaaggacaagcccgaggagatcgtgcccgccagcaagcccagcagagccgccgagaacatggccgtggagcccagagtggccaccatcaagcagagacccagcagcagatgcttccccgccggcagcgacatgaacagcgtgtacgagagacagggcatcgccgtgatgacccccaccgtgcccggcagccccaaggcccccttcctgggcatccccagaggcaccatgagaagacagaagagcatcgacagcagaatcttcctgagcggcatcaccgaggaggagagacagttcctggccccccccatgctgaagttcaccagaagcctgagcatgcccgacaccagcgaggacatccccccccccccccagagcgtgccccccagcccccccccccccagccccaccacctacaactgccccaagagccccacccccagagtgtacggcaccatcaagcccgccttcaaccagaacagcgccgccaaggtgagccccgccaccagaagcgacaccgtggccaccatgatgagagagaagggcatgtacttcagaagagagctggacagatacagcctggacagcgaggacctgtacagcagaaacgccggcccccaggccaacttcagaaacaagagaggccagatgcccgagaacccctacagcgaggtgggcaagatcgccagcaaggccgtgtacgtgcccgccaagcccgccagaagaaagggcatgctggtgaagcagagcaacgtggaggacagccccgagaagacctgcagcatccccatccccaccatcatcgtgaaggagcccagcaccagcagcagcggcaagagcagccagggcagcagcatggagatcgacccccaggcccccgagccccccagccagctgagacccgacgagagcctgaccgtgagcagccccttcgccgccgccatcgccggcgccgtgagagacagagagaagagactggaggccagaagaaacagccccgccttcctgagcaccgacctgggcgacgaggacgtgggcctgggcccccccgcccccagaaccagacccagcatgttccccgaggagggcgacttcgccgacgaggacagcgccgagcagctgagcagccccatgcccagcgccacccccagagagcccgagaaccacttcgtgggcggcgccgaggccagcgcccccggcgaggccggcagacccctgaacagcaccagcaaggcccagggccccgagagcagccccgccgtgcccagcgccagcagcggcaccgccggccccggcaactacgtgcaccccctgaccggcagactgctggaccccagcagccccctggccctggccctgagcgccagagacagagccatgaaggagagccagcagggccccaagggcgaggcccccaaggccgacctgaacaagcccctgtacatcgacaccaagatgagacccagcctggacgccggcttccccaccgtgaccagacagaacaccagaggccccctgagaagacaggagaccgagaacaagtacgagaccgacctgggcagagacagaaagggcgacgacaagaagaacatgctgatcgacatcatggacaccagccagcagaagagcgccggcctgctgatggtgcacaccgtggacgccaccaagctggacaacgccctgcaggaggaggacgagaaggccgaggtggagatgaagcccgacagcagccccagcgaggtgcccgagggcgtgagcgagaccgagggcgccctgcagatcagcgccgcccccgagcccaccaccgtgcccggcagaaccatcgtggccgtgggcagcatggaggaggccgtgatcctgcccttcagaatcccccccccccccctggccagcgtggacctggacgaggacttcatcttcaccgagcccctgcccccccccctggagttcgccaacagcttcgacatccccgacgacagagccgccagcgtgcccgccctgagcgacctggtgaagcagaagaagagcgacaccccccagagccccagcctgaacagcagccagcccaccaacagcgccgacagcaagaagcccgccagcctgagcaactgcctgcccgccagcttcctgcccccccccgagagcttcgacgccgtggccgacagcggcatcgaggaggtggacagcagaagcagcagcgaccaccacctggagaccaccagcaccatcagcaccgtgagcagcatcagcaccctgagcagcgagggcggcgagaacgtggacacctgcaccgtgtacgccgacggccaggccttcatggtggacaagccccccgtgccccccaagcccaagatgaagcccatcatccacaagagcaacgccctgtaccaggacgccctggtggaggaggacgtggacagcttcgtgatccccccccccgcccccccccccccccccggcagcgcccagcccggcatggccaaggtgctgcagcccagaaccagcaagctgtggggcgacgtgaccgagatcaagagccccatcctgagcggccccaaggccaacgtgatcagcgagctgaacagcatcctgcagcagatgaacagagagaagctggccaagcccggcgagggcctggacagccccatgggcgccaagagcgccagcctggcccccagaagccccgagatcatgagcaccatcagcggcaccagaagcaccaccgtgaccttcaccgtgagacccggcaccagccagcccatcaccctgcagagcagaccccccgactacgagagcagaaccagcggcaccagaagagcccccagccccgtggtgagccccaccgagatgaacaaggagaccctgcccgcccccctgagcgccgccaccgccagccccagccccgccctgagcgacgtgttcagcctgcccagccagccccccagcggcgacctgttcggcctgaaccccgccggcagaagcagaagccccagccccagcatcctgcagcagcccatcagcaacaagcccttcaccaccaagcccgtgcacctgtggaccaagcccgacgtggccgactggctggagagcctgaacctgggcgagcacaaggaggccttcatggacaacgagatcgacggcagccacctgcccaacctgcagaaggaggacctgatcgacctgggcgtgaccagagtgggccacagaatgaacatcgagagagccctgaagcagctgctggacagatag

SEQ ID NO: 173904 - DNA, 4194 bp, Artificial Sequence
  derived and/or modified sequence
atgccttccaagcctgagggggctgcaaagactataggctcttacgttcccggaccgcgctccagatcaccatcactgaacagattggggggagctggtgaggatggtaagcggcctcaacccttgtggcacgtcgggtccccatttgcgttgggagcaaataaagatagtctcagcgcctttgagtacccgggccccaagaggaagctgtattcggccgtgccaggacggttatttgtggctgtaaaaccttatcagccgcaggtggacggcgaaataccccttcaccgaggcgacagggtgaaggtgctgtcgattggagagggaggcttttgggagggatcagcaaggggacacattggctggttccccgccgagtgcgtggaggaagtccagtgtaagccgcgggattcacaggcagaaacaagagccgatagatctaaaaagctgtttcggcactacaccgtgggttcttacgactcttttgatactagctcggactgtatcattgaggagaagaccgttgtgctgcagaaaaaagacaacgaagggttcggcttcgtcctccgtggggcaaaagccgatactccaattgaggaattcacgcccaccccagcattccccgcactgcaatacctggagtccgtggatgagggaggcgtggcatggcaagccggacttcgcacgggggacttcttaattgaagtgaataacgagaacgttgtgaaggtggggcaccgtcaggttgtgaacatgataaggcagggcggaaatcacctggttctaaaggtagtgacagtgacccgcaatctcgaccctgacgacacagctagaaaaaaggcgccccctccacctaagcgggcgccaacgacagctcttaccctcagatctaaatctatgaccagtgaactggaggaactggtagataaggcgagtgtgaggaagaaaaaagacaagcccgaggagatcgtacccgctagtaaacccagcagagcagcagagaatatggccgttgagccccgcgtggccaccataaaacagcgcccaagcagccggtgctttccggccgggtctgacatgaactctgtgtatgagcgccaggggatcgccgtgatgactccaacagttcccggatctcccaaagccccctttttgggcatcccaagaggcaccatgcggcggcagaaaagcattgattctagaattttcttaagcggaataacagaggaggagaggcagtttctcgctcctcctatgctcaagtttacacgctcactttccatgccggacacttctgaagatatcccacctcccccccagtctgtaccaccgtcaccccccccacctagcccgaccacatataattgccccaagagccctaccccccgtgtgtacggtaccattaagcctgcgttcaaccagaatagcgctgccaaggtcagtcccgccactcgaagtgatacagtggcaactatgatgagggaaaaaggcatgtattttaggcgggaactagataggtacagcctggactctgaagatctgtactctcggaacgcaggcccccaggctaattttcgaaacaagcggggccagatgcctgagaatccatactctgaggtcggtaagatcgcctccaaggctgtgtatgtgcctgccaaacccgccaggaggaaaggcatgttggtgaaacagtcgaacgtagaagatagcccggagaagacatgcagtattccaataccaacaatcatcgttaaggaaccatctacttcctccagcggcaaatccagccagggcagcagtatggagatcgatcctcaggctccagaacctcctagccagctgcgccctgatgagtccctcaccgtctctagtcccttcgcggccgcaatcgcaggcgccgtccgcgatagggaaaaacgtttggaggccagaagaaattctccagcgttcctgagcactgacctcggagacgaagatgtggggctggggccacccgccccacggacccgccctagcatgttcccggaggaaggtgattttgccgatgaggatagtgccgagcagttatcctctccgatgcctagtgctacccccagggagcccgagaaccatttcgtaggtggggctgaggcaagtgcaccgggggaggccgggcgcccgcttaacagtacgagcaaagcccagggacccgagagttcacctgctgtgccatctgccagttcaggaacagccgggcccgggaattacgtgcaccctctgactgggaggttgctggacccctcgagccccctggcattagctctgtcagccagggatagagctatgaaagagagtcagcagggccctaagggagaagcgcctaaggcagaccttaacaagccattgtatatcgatactaagatgagaccttcgcttgacgccggttttcctacagttacgcggcaaaatacccgtgggccgctgcggcggcaggagacggaaaacaagtacgagaccgatctgggcagagaccgtaaaggcgatgacaaaaagaatatgctgatcgacataatggacacgtctcagcagaaatccgctggcctactcatggttcacacggtggatgccacaaaactggacaacgcattgcaggaagaggatgagaaggcggaagtggaaatgaagcccgattcaagtccaagtgaagtgccggaaggtgtctcagagacagagggggccctgcaaatttctgccgcacccgaaccaacaactgtacccggaaggactatcgtagccgtgggatccatggaggaggccgttatcctccccttccggattccgcctccccctctcgcttccgtcgatcttgacgaagatttcatcttcaccgaacccctgccacctccactggagttcgcaaattcttttgacattcccgacgaccgcgccgcttccgtgcctgcactgtccgacctggtcaagcagaaaaagtccgacactccccaatcccccagcctcaacagtagtcagccaaccaactccgcagattcaaaaaagcccgccagcctgtcaaactgcctgccagcttcattcttgccaccccctgagtctttcgacgctgtggccgatagtggaattgaggaagtagacagtaggtcttcctccgaccaccatttggaaaccacatctaccatctctaccgtgtcctcaatcagcacactgtcttctgagggtggagaaaatgtcgacacatgcactgtctacgcagacggccaagctttcatggtagataaacctcccgtcccccccaaacctaagatgaagccaattattcataagagcaacgctctgtaccaggatgctctcgtcgaggaagacgtcgacagtttcgttatccccccgcccgcaccccccccgcccccaggttccgctcaacctggaatggcaaaagttctccagccccgcacttcgaagctttggggtgatgtgactgagataaaatcgccaattctgtccggacccaaggccaatgttatcagcgagctgaatagcatccttcagcagatgaatcgggagaagctggcgaagccaggggaggggttagatagcccgatgggggccaagtctgcaagtctggctccaagaagccctgagataatgtctaccatcagtggaacacgctctactacagtgaccttcactgtacggccggggacgagccagccgatcacgctgcagtccaggcccccagactacgagtcccggacttcaggtactagacgagctccctctcctgtcgtttcccctactgaaatgaacaaagagacccttccggcccccttgtcagcagcgaccgcctcccccagcccggccttgagtgacgttttcagcctaccaagtcagcctcccagtggtgatctgttcggtttaaacccagcaggacggagtcgatctccttccccctcaatactccagcaaccgataagtaataagccttttactacgaagcctgtgcatctttggaccaaacctgacgtagcggactggcttgagtcactgaacctgggggagcataaggaggctttcatggataacgagattgacggaagccatctgccaaatcttcagaaggaggaccttatcgatctaggtgtgacccgtgtgggtcatcgaatgaacattgagcgagcgctcaagcaactgctggaccgctag

SEQ ID NO: 173905 - DNA, 4194 bp, Artificial Sequence
  derived and/or modified sequence
atgcccagcaagccagagggcgccgccaagaccatcggcagctatgtgcccggccccaggagccgcagccccagcctgaaccggctgggcggggccggggaggatggcaagaggccccagcccctgtggcacgtgggcagcccctttgccctgggcgccaacaaggacagcctgagcgcctttgagtacccaggccccaagaggaagctgtacagcgctgtgcccggccgcctgtttgtggccgtgaagccctaccagccccaggtggatggagagatccccctgcacagaggagacagagtgaaggtgctgagcatcggggagggcggcttctgggagggcagcgcccggggccacatcggctggttcccagcagaatgtgtggaggaggtgcagtgcaagccccgggacagccaggccgagaccagggctgacaggagcaagaagctgttccgccactacacagtgggcagctatgacagctttgacaccagcagtgactgcatcatcgaggagaagacagtggtgctgcagaagaaggacaatgaaggatttggatttgtgctgcggggggccaaggctgacacccccatcgaggagttcacccccaccccagccttccctgccctgcagtacctggagagcgtggatgaaggaggagtggcctggcaggccggcctgaggactggagacttcctgattgaggtgaacaatgaaaatgtggtgaaggtgggccaccggcaggtggtgaacatgatccggcagggcggcaaccacctggtgctgaaggtggtgacagtgaccaggaacctggaccctgatgacacagccaggaagaaggcccctcctccacccaagagggcccccaccacagccctgaccctgcggagcaagtccatgaccagcgagctggaggagctggtggacaaggcctctgtgaggaagaagaaggacaagccagaggagatcgtgcctgccagcaagcccagcagagctgctgagaacatggctgtggagccccgggtggccaccatcaagcagaggcccagcagccgctgcttccctgctggcagtgacatgaacagcgtgtatgaaaggcagggcattgctgtgatgacccccaccgtgcccggcagccccaaggcccccttcctgggcatcccccggggcaccatgaggcggcagaagagcattgacagccgcatcttcctgagcggcatcacagaggaggagcggcagttcctggccccacccatgctgaagttcaccaggagcctgtccatgccagacaccagcgaggacatccccccaccaccccagagcgtgccccccagccccccaccacccagccccaccacctacaactgccccaagagccccaccccccgggtgtatggcaccatcaagccagccttcaaccagaacagcgctgccaaggtgtccccagccaccaggagtgacacagtggccaccatgatgagggagaagggcatgtacttcagaagagagctggaccgctacagcctggacagcgaggacctgtacagcagaaatgccggcccccaggccaacttcaggaacaagaggggccagatgcctgagaacccctacagcgaggtgggcaagatcgccagcaaggctgtgtatgtgcctgccaagccagcccggaggaagggcatgctggtgaagcagagcaatgtggaggacagccctgagaagacctgcagcatccccatccccaccatcatcgtgaaggagcccagcaccagcagcagcggcaagagcagccagggcagctccatggagattgacccccaggcccctgagccccccagccagctgcggccagatgagagcctgactgtgagcagcccctttgctgctgccatcgccggggctgtgcgggaccgggagaagaggctggaggcccggaggaacagccctgccttcctgagcacagacctgggagatgaagatgtgggcctgggccccccagcccccaggacccggcccagcatgtttcctgaggagggggactttgctgatgaagattctgctgagcagctgagcagccccatgcccagcgccaccccccgggagcctgagaaccactttgtgggcggcgctgaggccagcgcccctggagaggccggccggcccctgaacagcaccagcaaggcccagggccctgagagcagccctgctgtgcccagcgccagcagcggcacagctggccctggcaactacgtgcaccccctgaccggccgcctgctggaccccagcagccccctggccctggccctgagcgcccgggaccgggccatgaaggagagccagcagggccccaagggggaggcccccaaggctgacctgaacaagcccctgtacatcgacaccaagatgaggcccagcctggatgctggcttccccaccgtgacccggcagaacacccggggccccctgcggcggcaggagacagagaacaagtatgaaacagacctgggccgggacagaaaaggagatgacaagaagaacatgctgattgacatcatggacaccagccagcagaagtctgctggcctgctgatggtgcacacagtggatgccaccaagctggacaatgccctgcaggaggaggatgagaaggccgaggtggagatgaagccagacagcagccccagcgaggtgcctgagggcgtgtctgaaacagaaggagccctgcagatctctgctgcccctgagcccaccaccgtgcccggccgcaccatcgtggccgtgggctccatggaggaggccgtcatcctgcccttccgcatccccccaccacccctggcctctgtggacctggatgaggacttcatcttcacagagcccctgcccccacccctggagtttgccaacagctttgacatcccagatgaccgggccgcctctgtgcctgccctgagtgacctggtgaagcagaagaagagtgacaccccccagagccccagcctgaacagcagccagcccaccaacagcgctgacagcaagaagccagccagcctgagcaactgcctgcctgccagcttcctgcccccacctgagagctttgatgctgtggccgacagcggcatcgaggaggtggacagccgcagcagcagtgaccaccacctggagaccaccagcaccatcagcacagtgagcagcatcagcaccctgagcagcgagggcggagaaaatgtggacacctgcaccgtgtatgcagatggccaggccttcatggtggacaagccccctgtgccccccaagcccaagatgaagcccatcatccacaagagcaatgccctgtaccaggatgccctggtggaggaggatgtggacagctttgtgatccccccaccagcccctcctcctcctcctggcagcgcccagcccggcatggccaaggtgctgcagcccaggaccagcaagctgtggggagatgtgacagagatcaagagccccatcctgagcggccccaaggccaacgtcatcagcgagctgaacagcatcctgcagcagatgaaccgggagaagctggccaagccaggagagggcctggacagccccatgggcgccaagagcgccagcctggcccccaggagccctgagatcatgagcaccatcagcggcaccaggagcaccaccgtgaccttcaccgtgcggcccggcaccagccagcccatcaccctgcagagccggcccccagactatgagagcaggaccagcggcacccggcgggcccccagccctgtggtgagccccacagagatgaacaaggagaccctgcctgcccccctgtctgctgccacagccagccccagccctgccctgagtgatgtgttcagcctgcccagccagcccccatctggggacctgtttggcctgaacccagctggccgcagccgcagccccagccccagcatcctgcagcagcccatcagcaacaagcccttcaccaccaagcctgtgcacctgtggaccaagccagatgtggccgactggctggagagcctgaacctgggggagcacaaggaggccttcatggacaatgaaattgatggcagccacctgcccaacctgcagaaggaggacctgattgacctgggcgtgaccagggtgggccacaggatgaacatcgagcgggccctgaagcagctgctggacagatag

SEQ ID NO: 173906 - DNA, 4194 bp, Artificial Sequence
  derived and/or modified sequence
atgcccagcaagcccgagggcgccgccaagaccatcggcagctacgtccccggcccccgaagtaggagtccgtccctcaataggctggggggtgcaggagaggatggcaagcgaccacagcctctgtggcacgtagggagtccctttgctctcggggcaaataaggactccctgtctgcttttgaatacccaggcccaaaacgtaagctttattctgcagtgcctggccggctgtttgtcgcagtaaagccataccagccacaagtcgatggtgagatcccattgcacagaggagatcgggtcaaggtgctgtcgattggtgagggggggttttgggagggatctgcaaggggtcacataggctggtttccagcagagtgtgtcgaagaagtgcagtgtaaacccagagatagccaggccgaaactcgcgctgataggagcaagaaactgttccgccactacaccgtgggatcttacgactcttttgacacctcttctgactgtataatcgaggaaaagacggtcgttttgcagaagaaggacaatgaaggatttggcttcgtactgaggggtgcaaaagccgatactccaattgaggagttcacacctactccagcttttcctgccctccagtacctggagtctgtggatgagggaggtgtcgcctggcaggccggcctgagaaccggtgactttctgattgaggtgaacaatgagaatgtcgttaaagtcggacaccggcaagttgtcaacatgattagacaggggggcaaccatttggtcctgaaagttgtgaccgtcacacgcaatcttgacccagatgatacagcccggaaaaaggcccccccaccccccaagagggcaccaaccacagcgttgacactgaggtctaagtcaatgactagtgaactcgaagagctggtcgacaaagcctcagtccggaaaaagaaggacaagcctgaggagattgtcccagcttctaaaccctcccgagctgcggaaaacatggctgtagaaccacgagtcgctaccatcaagcagcggccttcaagtaggtgtttccccgcagggtctgatatgaactcagtgtacgaacgacagggcatcgcagtaatgactccgacagtcccaggctcccctaaagcaccctttcttggaattcccagggggacaatgcggaggcagaaaagtattgatagtcgtattttcttgtctggcattacggaagaggagagacagttccttgccccccctatgcttaagttcacccgcagtttgtcaatgccagacacatccgaagatataccacctccaccgcagagcgtgccacctagccctccaccccctagtccgacaacttacaattgcccaaagtctccaactccccgtgtgtatgggacaatcaaaccagccttcaaccaaaatagtgcagcgaaggtgagcccggccacccgctctgatacagtggccaccatgatgcgcgagaaaggtatgtactttcggcgcgagctcgatagatattcactagacagcgaggacctgtacagccggaatgcaggcccacaggccaattttcgtaataaacgcggacagatgcctgagaatccttattcagaggtcggtaagatcgcctccaaggctgtctacgtgccggcaaagccggccagacgaaagggtatgctcgtaaaacagtctaatgtggaagactcccctgaaaaaacgtgctccatcccaattcccactataatagtcaaggagccctcaaccagttcctccggcaaatcgtctcagggttcgtccatggaaatcgaccctcaggcccctgagcctccttctcagttacggcccgatgagtcattgactgtatcaagcccgtttgcagccgcaattgcaggtgccgtgcgggacagagagaagcggctggaagcccgccggaactctccagctttcctgagcaccgatcttggggacgaggatgttggcttgggccctcccgctcctcgcactcggccttctatgttccctgaggaaggggactttgccgatgaggacagtgcggaacagttgtccagtccgatgccctccgcgactccacgagagcccgaaaatcactttgtggggggagctgaagccagtgcccccggtgaggccggccgccctctcaactctacttctaaggcacagggtcccgagtcctcaccagctgtaccctcggctagtagcggaacagcaggaccaggaaactacgttcaccccctgaccggtcgcttattagaccccagctcaccactcgcactcgcccttagcgctagagacagagcaatgaaggagagccagcaaggaccaaaaggcgaagctccaaaagccgacctgaataaacctctgtacattgacacaaaaatgagaccctcactggacgcaggctttcctaccgtgacaaggcagaatacccgaggcccactgcgcagacaggagacggaaaacaagtatgaaaccgatttgggcagagacaggaaaggcgacgacaaaaagaacatgctgatcgatatcatggacactagtcagcagaagtctgctggcctcctgatggtccacaccgtggacgcaactaagcttgacaacgccctacaagaagaggacgagaaggcagaagtcgaaatgaaaccggactctagccctagcgaagtgcctgaaggagtgagcgagacagaaggtgccctgcagatcagcgccgccccggagccaaccacagtgcccgggagaaccatcgtggcagttggaagcatggaagaggctgtgattctcccttttcgcattccgccccctccgctcgcatcggtcgacctggacgaagattttattttcacagagcccctgccccctccacttgagtttgctaactcttttgacatcccagatgaccgcgcggcaagtgtgccggcactgtctgacctagtgaaacaaaagaagagcgacactccgcaatctcctagtctcaattcatcccaacctacaaacagcgccgactcaaagaaaccagcatcgctgagcaactgcctaccagcttccttcctgccacctcccgaatccttcgacgccgtggctgattcagggattgaagaggtggacagcaggtcaagcagcgaccaccaccttgagacaacgtcaaccattagcaccgtgtcttcaattagcaccctgtcttcagaaggcggggagaatgtcgacacttgcactgtctacgcagacggtcaagccttcatggtggacaaacccccggttccacccaaacccaagatgaagcccatcattcataaaagcaacgctctataccaagacgcactggtagaggaagatgtcgactcttttgtcattcctccccctgcccccccacctccccctgggtctgcacagcctggcatggcaaaagtgcttcagcccaggacgtccaaactatggggcgatgtcactgaaatcaagagccccatcctgtccggccccaaggcaaacgtcatcagtgagttgaactccatcttgcagcagatgaatagagaaaagctggccaagccgggtgaagggctcgatagccccatgggagccaagtcagcctctctcgcacctagaagtcctgaaattatgtcgaccatctccggaacgcgatccacaaccgtcacattcacagttaggcctgggacctcccaacctatcacactccagtctcggcctcctgactatgagtcccgtacgagcgggactcgcagggccccaagccccgttgtctcccctacggagatgaataaagagacactcccagctcctctgagcgccgcaacagcaagcccatctcctgcactcagtgacgtgttttccctcccgagccagcctccatcaggcgatctgtttggcctcaatccagcaggaaggtctcggagccccagcccctcaatactgcagcagccaattagtaataaaccgtttacaacaaagcccgtccacctgtggacgaagcctgacgtcgccgactggcttgagtccttaaatcttggagagcacaaggaggcttttatggacaatgaaatcgacggtagtcatctccccaacctacagaaggaagacttgatcgacctgggagttacacgggtcggacatcgaatgaacattgagcgcgctttaaagcagcttcttgataggtag

SEQ ID NO: 173907 - DNA, 4193 bp, Artificial Sequence
  derived and/or modified sequence
atgcctagcaagccagagggcgctgcaaagacaatcgggagctatgtgccgggtcctcggtcccgctcacctagtctgaatcggttaggcggtgccggtgaagatgggaaacgccctcagccactgtggcatgtgggaagtccgttcgctttgggcgctaataaagattcactgtctgccttcgagtaccctggcccaaagcggaaactgtatagcgcggtgcccggaagactttttgtggccgtcaaaccttatcaaccccaggtggatggcgaaattccgctgcaccggggtgaccgcgtgaaagtcttgtcaatcggtgaaggcggattctgggaaggaagcgctaggggacatatcgggtggtttcccgcagagtgtgtagaggaagtgcagtgtaagccgcgagatagtcaggccgagacacgtgccgatcggagcaaaaagctgtttcgacactacacggtcggttcgtacgacagctttgatactagttctgactgcatcatagaggaaaagaccgtcgtactgcaaaaaaaggacaacgagggattcggatttgtactgaggggcgcaaaggccgatactccaatcgaagaattcacacctacccccgctttcccagcgttacagtatctggagtctgtcgacgaaggaggcgttgcgtggcaggcgggacttcggactggtgatttcctaatcgaggtcaataacgaaaacgtggtgaaggtagggcataggcaagtcgtgaatatgatccgtcaagggggtaatcacctggtgctgaaggtggtcactgtgacccgtaacctggatcccgacgacacagcccgaaaaaaagcccctccccctcctaagcgcgctcccaccactgcactcacactgagaagcaaatccatgacctcagagctggaggaactcgtggacaaggcgagcgtgaggaagaaaaaagataagccagaagagattgtgcctgctagcaagccttctagagccgcagagaacatggccgtggaacccagggtggcaacaattaaacagagaccgtcctcccgatgtttcccagctgggagtgacatgaacagcgtttacgagcgtcaaggaatcgccgttatgacacccaccgtgcccggatcaccaaaggctccctttttaggaatcccacggggaaccatgcggagacagaaaagcatcgacagccgcatatttttgtctgggatcaccgaagaggagaggcagttcctggccccacccatgcttaagtttacccgctctctttctatgcccgacacgagcgaggatattccaccaccgccacaatcggtacctcccagtcccccacctcccagtccaaccacctataattgccccaaaagtccaacacctcgcgtctatgggaccattaaaccagccttcaaccagaatagcgcagcgaaggtctctcccgctaccaggagtgacactgtggcaaccatgatgagagagaagggcatgtacttccgccgagaacttgataggtacagccttgactctgaggacctttattctagaaacgcgggtccccaagctaatttccgtaataagagaggccagatgcctgaaaacccatattccgaggttggtaagatcgcgtccaaggccgtgtatgttccagccaagcccgctcggcgtaagggcatgctggtcaagcagagcaatgtggaagattctccagagaaaacatgctctataccgatccccaccatcatcgtgaaggagcccagtacttccagctccggcaaatcttcccaggggtcctcaatggagatcgatccacaggctcctgagccaccgagtcagctgaggcccgacgagagcctcacagtgagttctcctttcgcagcggctatcgccggtgcggtccgggacagggaaaagagactggaggccaggagaaattcgcccgctttcctatcgacagatcttggcgatgaggacgtaggtctgggccctcctgcccctcgtactcggccatctatgtttcctgaggagggcgactttgccgacgaagacagtgctgagcagctttcatccccaatgccctccgctactccacgggagcctgagaaccactttgtcggaggcgcagaagcttctgctccgggtgaagctggcaggccactgaactctacttccaaagcccaggggccagagtcgtcaccagctgttcccagtgcctcctctggcaccgccggtcccggaaactatgtccatcctttgacagggcgtctgctggatccctctagccctctagccctggctttgagtgcccgtgacagggctatgaaggaaagtcagcaaggtcctaagggggaggcgccaaaagccgacctcaataagcccttatacatcgacactaagatgcgcccaagcttagatgccggattccctacggtgacacgacaaaacacacgtgggcctctccggagacaggaaaccgaaaacaagtacgagacagatctgggtcgagaccgcaagggcgatgacaagaaaaatatgctcatcgacattatggataccagtcagcagaagtccgccggactgctgatggtacacacagtagatgcaacgaaattggacaatgcactccaggaagaggacgaaaaagccgaagtggagatgaagccagattcctccccctcagaagtgccagaaggggtgtccgagaccgaaggtgcactgcagatcagcgctgcaccggaaccaactacggtgcctggccgaaccattgtggccgtaggctctatggaagaagccgtaatcctcccattcagaattcctccaccacctcttgcctctgtggatctggatgaggacttcatctttactgaaccgctacctcccccactcgaattcgcaaacagcttcgacatacccgacgatagagccgcatccgttccagccctctccgatcttgtgaaacaaaagaagagcgacactcctcagtctccatctctgaactcgagtcaaccaaccaactctgctgattcaaaaaaacccgcatcattgagtaactgcctgcccgcaagttttctgccccctccagaatccttcgacgctgttgcggattccgggatcgaagaggttgattccaggagttcctctgatcaccacctggaaacaacatccaccatctctacagtgtcctccataagtaccctgagctccgagggaggggagaatgttgatacctgtactgtctacgcagatgggcaggcattcatggtagataagcctcctgtccctcctaaaccaaagatgaaacccattatccacaagtctaacgctctgtaccaggatgcactggtcgaagaggacgtggatagtttcgtgattcctcccccagcaccacctccccctcctggctctgcacagcctgggatggcgaaggtgctccagcccaggacaagcaagctgtggggcgatgtcactgagatcaagtccccaatcttgagtggccctaaagctaacgtgatctccgagcttaacagcatcctccaacagatgaatcgagagaagcttgccaaaccgggtgagggccttgacagccctatgggagctaaatccgcctcattagctcctcgatcaccagagattatgtctacaatctccggcactcgctctactacagtgaccttcaccgtgagacctggtacatctcaaccgatcacattgcagtctcggccacctgattatgagagccgtacatccggtacaagaagggccccatctccggtagtatcaccaaccgagatgaacaaggagactcttcctgccccactgtctgccgctactgcaagcccctcacctgcgctgagtgacgtgtttagcctgccctcacagccccctagcggtgacctgttcggactgaatcctgctgggaggagccgttctccctctccttcaattctgcaacaacctatttctaacaaacctttcaccactaagcccgttcatctctggactaaacccgacgtagcagactggctggagtctctgaaccttggcgaacataaagaagcctttatggataatgagattgatggctcccacctgccaaatctccagaaagaagacctgatagacctcggggtgacaagagttgggcacagaatgaacatcgagcgcgctttgaagcagctcttggaccgtta

SEQ ID NO: 173908 - DNA, 10641 bp, Artificial Sequence
  derived and/or modified sequence
ctctagaatacagacagttcctgctctaagaggccatctgtgaggctcagtctcccaacacctctgacacaggcagccatgccgcgcagcccaacatccagcgaggacgagatggcccagagcttctccgactactccgtggggtcggagtcagacagctccaaagaagagaccatctatgacacgatccgggccactgcggagaagccgggcggtgccaggacggaggagagccagggcaacacgctggtgatccgcgtggtcatccatgacctgcagcagacgaaatgcattcgatttaacccggatgccacagtgtgggttgcaaagcagcggatcctgtgtacattaacccagagtttgaaagatgtcctgaactacggcctgttccagccggccagcaatgggcgtgacggcaagttcctggatgaggagcggctcctgcgcgagtacccacagcccgtgggtgagggcgttccttccctggagtttcgatacaagaagcgggtgtataaacaagccagtctcgatgagaaacagttggccaagctccacacgaagaccaatctgaagaaatgcatggatcacattcagcatcgcttggtggagaagatcaccaagatgctggaccgaggcctggatcccaatttccacgacccggagaccggagagacccccctgaccttagccgctcagctggacgactctgtggaggtcatcaaagctctcaaaaatggtggagctcacctggacttccgtgccaaagatgggatgaccgccctacacaaagctgcccgagcgaggaaccaagttgccctgaagacccttttagagcttggtgcatccccagattataaagacagttacggcctcaccccgctgtatcacacagccatcgtcggaggtgatccctactgctgcgagcttctcctgcacgaacacgccactgtgtgctgcaaagatgagaacggctggcacgagatccaccaggcctgcaggtacgggcacgtgcagcacctggagcacctgctgttctacggggcagacatgagtgcccagaatgcctcggggaacacggccttgcacatctgcgccctctacaaccaggacagctgtgcaagagtgcttctgtttcgaggcggaaataaggagttaaaaaactacaacagccagactccatttcaggtggccataatagcaggcaactttgagctggcagaatacatcaagaaccacaaggaaacagacattgtgcccttccgagaggccccggcgtactccaaccgccggcggcggccccccaacacgctggccgccccccgggtcctgctgcgctccaacagtgacaacaacctcaatgccagcgctcccgactgggccgtctgctccacggccacctcgcaccgcagcctgtcaccccagctgctgcagcagatgcccagcaagcccgagggggccgcgaagaccattgggagctacgtgcccgggccccgcagccggtccccatcgctcaacaggctgggcggcgcaggcgaggacggcaagaggccgcagcctctctggcatgtcgggtcgccttttgctcttggtgccaacaaggactcactctcggccttcgagtacccggggcccaagcggaagctctacagtgccgtgcccgggaggctcttcgtcgctgtcaagccataccaaccccaagtggacggcgagatcccccttcaccgcggtgacagggtcaaagttctgagcatcggtgaagggggcttctgggaaggcagcgcccgcggccacatcggatggtttccggcggagtgcgtggaggaggtccagtgtaagcccagggacagccaggcagaaacccgcgctgaccgcagcaagaagcttttcaggcactacaccgtgggctcctatgacagcttcgacacttccagtgactgcattattgaggagaagacggtggtcctgcagaaaaaagacaatgagggctttggattcgtgcttcgaggggccaaagctgacacacccattgaagaattcacaccaacaccggctttcccagccctacagtacctggagtccgtggatgaaggtggggtggcgtggcaagccggactaaggaccggggacttcttgattgaggttaacaatgagaatgttgtcaaagtcggccacaggcaggtggtgaacatgatccggcagggagggaatcacctggtccttaaggtggtcacggtgaccaggaatctggaccccgacgacaccgccaggaagaaagctcccccgcctccaaagcgggcaccgaccacagccctcaccctgcgctccaagtccatgacctcggagctggaggagctcgtggataaagcctcggtccggaagaagaaggataaacccgaggagatagtcccggcctccaagccctcccgcgctgctgagaacatggctgtggaaccgagggtggcgaccatcaagcagcggcccagcagccggtgcttcccggcgggctcagacatgaactctgtgtacgaacgccaaggaatcgccgtgatgacgcccactgttcctgggagcccaaaagccccgtttctgggcatccctcgaggtacgatgcgaaggcagaaatcaatagacagcagaatctttctatcaggaataacagaggaagagcggcagtttctggctcctccaatgctgaagttcaccagaagcctgtccatgccggacacctctgaggacatcccccctccaccgcagtctgtgcccccgtccccaccaccaccttccccaaccacttacaactgccccaagtccccaactccaagagtctacgggacgattaagcctgcgttcaatcagaattctgccgccaaggtgtcccccgccaccaggtccgacaccgtggccaccatgatgagggagaaggggatgtacttcaggagagagctggaccgctactccttggactctgaagacctctacagtcggaatgccggcccgcaagccaacttccgcaacaagagaggccagatgccagaaaacccatactcagaggtggggaagatcgccagcaaagccgtctacgtccccgccaagcccgccaggcggaaggggatgctggtgaagcagtccaacgtggaggacagccccgagaagacgtgctccatccctatcccgaccatcatcgtgaaggagccgtccaccagcagcagcggcaagagcagccagggcagcagcatggagatcgacccccaggccccggagccaccgagccagctgcggcctgacgaaagcctgaccgtcagcagcccctttgccgccgccatcgccggagccgtccgcgaccgtgagaagcggctggaagccaggaggaactccccggccttcctctccacagacctgggggatgaggatgtgggcctggggccacccgcccccaggacgcggccctccatgttccccgaggagggggattttgctgacgaggacagcgctgagcagctgtcatcccccatgccgagtgccacgcccagggagcccgaaaaccatttcgtgggtggcgccgaggccagtgctccgggtgaggctgggaggccgctgaattccacgtccaaagcccaggggcccgagagcagcccagcagtgccctccgcgagcagcggcacagccggccccgggaattatgtccacccactcacagggcggctgcttgatcccagctccccgctggccctggcactctccgcaagggaccgagccatgaaggagtctcaacagggacccaaaggggaggcccccaaggccgacctcaacaaacctctttacattgataccaaaatgcggcccagcctggatgccggcttccctacggtcaccaggcagaacacccggggacccctgaggcggcaggagacggagaacaagtacgagaccgacctgggccgagaccggaaaggcgatgacaagaagaacatgctgatcgacatcatggacacgtcccagcagaagtcggctggcctgctgatggtgcacaccgtggacgccactaagctggacaacgccctgcaggaagaggacgagaaggcagaggtggagatgaagccagacagctcgccgtccgaggtgccagaaggtgtttccgaaaccgaaggtgctttacagatctccgctgcccccgagcccaccaccgtgcccggcagaaccatcgtcgcggtgggctccatggaagaggcggtgattttgccattccgcatccctcctccccctctggcatccgtggacttggatgaggattttatttttacagagccattgcctcctcccctggaatttgcaaatagttttgatatccccgatgaccgggcagcttctgtcccggctctctcagacttagtgaagcagaagaaaagcgacacccctcagtccccttcgttgaactccagccaaccaaccaactctgcagacagcaagaagccagccagtctttcaaactgtctgcctgcctcattcctgccaccccctgaaagctttgacgccgtcgccgactctgggatcgaggaggtggacagccggagtagcagcgaccaccacctcgagacgaccagcactatctccaccgtgtctagcatctccaccctgtcttccgaaggtggagagaatgtggacacctgcacagtctatgcagatgggcaagcatttatggttgacaaacccccagtacctcctaagccaaaaatgaagcccatcattcacaaaagcaatgcactttatcaagacgcgctcgtggaagaagatgtagatagctttgttatccccccgcccgctcccccgcccccgccgggcagtgcccagcctgggatggccaaggttctccagccaaggacctccaagttgtggggcgacgtcacagagatcaaaagcccgattctctcaggcccaaaggcaaacgttattagtgaattgaactctatcctacagcaaatgaaccgagagaaattggcaaagccgggggaaggactggattcaccaatgggagccaagtccgccagcctcgctccaagaagcccggagatcatgagcaccatctcaggtacacggagcacgacggtcaccttcactgttcgccccggcacctcccagcccatcaccctgcagagccggccccccgactatgaaagcaggacctcaggaacaagacgtgccccaagccctgtggtctcgccaacagagatgaacaaagagaccctgcccgcccccctgtctgctgccaccgcctctccttctcccgctctctcagatgtctttagccttccaagccagcccccttctggggatctatttggcttgaacccagcgggacgcagtaggtcgccatccccctcgatactgcaacagccaatctcaaataagccttttacaactaaacctgtccacctgtggactaaaccagatgtggccgattggctggaaagtctaaacttgggtgaacataaagaggccttcatggacaatgagatcgatggcagtcacttaccaaacctgcagaaggaggacctcatcgatcttggggtaactcgagtcgggcacagaatgaacatagaaagggctttgaaacagctgctggacagataaggacggctgctctccacctcgcagactgctcttgttataagtagagatgggctcgtgctgaaacatctgaatgccaagcgaagtctgtgagcatcaaccccactccatgggtttgtctcctggtacccaaagaaatactgagttgtgtccacaacatggctgggtcttcagacccctggctcaccatgtgggtgtcttgggcagtttctatcacacatgggacaaggggagggagtttttctaacatggaaaaagattctcagcctgccgcccagcatgcaggtggcctcgctttgccgggtccgagaggctccccgtcaattttgcacgggatcctagctcttgtaggcagacaccagtgcactctagatacctcctgagacctccgtcctctgctttccgggcagctctcaccaccccaggccccggcatgaggcctttcctcagtcctgtggcctctcagaggacacctgatgctcacctgcccctctttctcctgcacttggcttgcagtgagatgctcccagatgcatttgtccagtgccccatcatgggcctgaaaggcagagaaactttttcctacacagattcttttccccatctcctcctgtggtttgcatccatggctctttggccatgaggttcctggcagtgctgggagtttggatgggatcgtgcccagctttgcttagctttctttatttctgcaaatctgttagcataattccaaggtggccaagcagatgtcacatggagttagtcaaagcacaaagtcacgattccacaatggaggggagacctggccaagggagccagccagcgtgcaactgcccaagctccaggtctccaggacaagagcagttgtctgccatgagcacccatccaggatggagaataagggcttctctgcctctcagaattctttttaattgaagatgtcttgagctctgcaaagatcagagcaggtgagcatccactttgacatgaaggacaagaagacgcatggctcatggcgggcacatgcggctgccagtgagacagcgtctcctctgggagctgggcgggcacagcatcctcagttctgtgcccagccaagggtgagcatctctgctgagacagtccttttgctctcggaggccagggaagatggtacttagaggcttttcccctatcgctctgggtgtctaggaatcccaccagcttgtcttaacagtacaacagcttctttgaggacccagtgggtatggagtatagacagaacccagggttgagaacagaaggtgggcggcaggatcagagtgaaagcagaggcgtgaggagaggaaagcagggaggtctcctgggctgccaggtcagcctctctggcaaggctttcttgagccccgcccctttctttccccggagtccctccaccccataacaatacctcgaatttccaaaagaggtcaccagatgcacatgggccgcaaaacacacagtcaggcttccagcacattctcccccatttggaggatactcgaatgtcaggtttttggttttattattatttcagaactagctcagcccatctctaattataaaacatggttttgttttttttttttcctttttttcttgattaggtctggaacagctctagaatgaacacataaaatttagcaatttaaaatctttctttactgcaagtttaaatagttgtacagatagtttataagcacaatattttaagaaaaaaaagtggctggtctactaggcagcctttgtgccacttcagtgctagaaagttaaagaaaaaaaaacttttgtgatttaataatactatttctgtggaataattataaaagtatgacctttttaaatcaaccttatttggatgcatctgaaccagcagagctgtgttatattttctatctttgctagaacttcgtcattgaaggacaatttcttcaaagtggttacaattcataatgcagcagtttctccaaaaacaaaaacaaaacacacaccacacacacgcgcttttccagtcacacacccctgatgttggaaccaagtttttggaccttctgttccaaaaccttttgcaggtcaatctttgtatttgaaatgatccaatccaacttgaagtcaattgaatattaaggcgctttacttccgtgtgctttcagtttttccatcatgagatgaatgagcattactctagataaatttcaagacaggatactacaggtggcctgctgaggctgccccatattttagaaaatgtaaaaatggtggtttggccattaatttgtcttccatttgatgataccgcaaaattccgtgagtccattcctttggcatggcactttccctgggcctacagttggtattacctctgtgctcagtgccaggcaaaacactagctcaaaggagagtcaaggaaaccgctggcagacgataaccagtcgaaactcgtgacttcggtttgttgaactttggcagccagttggtgagggccagatgttattccctttcttaaagatactccaagccacatgccactaaccacaagcaagctggctgcaagactaaagagctgataacatagtttatttttacactgtcttattatagagaagtaatagacctatcagaacctgcactgaccaacaaataaacacatgttgccaagatgaatcggtctctatctctatctgcttattttggtactgaaagcaatagttcctcattcaaatcaccacccactgttctccccctttgggacatgttaggacgaggccctattccatgcccctctttaatggtggaacaaatgttaaactgctcatctaaagatcatgttgatattattccaggttttaagatcaacttttgttacatactgtaatttaaataaactgcatttacatgcctagtttctgtaatattgtgtatacaaaacccaaatctctcaaaatgtaaattatgtatacctgccaagataccttttccagggtgtctgcgcacattttaagttaattcacataatataaaaattactcaatgtgactgttgatttgctgaactttacatatcacaaagtgaattatttgtgatactttagttaataaaatggtaaatttttttctcagttattgaacaagcaagcattatccagttgatctggcaatgactttttgtgtgtgggccacaatattgattttcccattaacaatttttttttgttttttaaatactaatatgtttcacactatagtttgtgtaacaacacgtgttcgcattatctatgttgctgttacttttgtgcttttattctttttagactttataaaaaaaaaaaaaagctcctgtaatttgcactttctcccaatccttaaatctcttgtatggcaaccaaaattactgtaaaaaaataaatatactattgcactaaggttgtggttctgattgcaaacaaacagtgaacactgtctgaattaaacaaaaagctgcccgacttgcaatctaatgtagattatctcaggcattgtggccagctctgcctctctaaaactgaccagaaaaatctctctcatcgagtaaacaggctcctgtcactgagctaatctgccttggttccatttccttattctcaatttatcaatggatacgtgcatgttatttcagaattatgcaaaacgtcaaaatctgcttctgtgaccgctgctataggcgtggagctgaggctcggcttttccttttgttctgggtggaagcagcggtgccgcggagggccagccagatccggacccttcccttagggtccagtctccccacaccccagcagggtgtcttctagccataaggccaagggagtggcagaactgggccgcctctctggttgacaagcaaaccacatgctaaggcttggagcaagagagaatttgtgtctattggcaaagaactaagccaggaagacatgggccatccctccgctttagggaagcatattttaaacctaaacgttgaacttcttctttggcctcaccagtgaaaacttgttgtctttagttcctaaagtttcttctactttggcacattccccagttgagcagcagcctctatgcttccacgttcaggaaaaattccagtcctcatatcttttgtagttcaccctcaagctctcccgcttcaccatccaatagtttctcccaaaccttggcacccccctagactttgcttccaatggtttcttccagaccacttttcctagatgaatatattcgtttaccttactaggaaaattattggaagattttttcttttacttgaaattggaggcattttaataactggcgaactggaatgtgtttctgtatttgtagacaaccatgaacccatgcaagtaggtgaacattccacagtggctgggtgaccacagcagctgcatgcagacaggactgcccgtgctttgtggggaatcagagaatttccaaacttgtttctcagacttccgcagatctcatcactttgatttctaatccatgctgtattggtgattttgtttatcgttcctgtaacttgttctacattccacagtctttaccgttttatgttcaaaattacaacaatccctgtccattgattccactctggaactctttgttcatgccaattttgaaattttaatacgagccttcaaataaacacagaaaagaaaaaaaaaaaggaaaaaaaataaagtgtgtgccttgggtgttttgaacctgatctgcataaaaccatattgtattcaaatgctgtatctttcatgaaaggataaatatatcttcaatgtattaatgtagctgataaaatagttatagtgccttgttttctgaactgagaagcccatatcaatgcacaacgtaaagaaaggacggttcgagctatgaaatgttgaggacacctacacgtgattctggagcctttctcatcataagactgtggaaaatacacagtcgtttaagttaaaaataaaaagtaaattga

SEQ ID NO: 173909 - DNA, 4422 bp, Artificial Sequence
  derived and/or modified sequence
gtagctattatcgcagggaatttcgaactggccgagtatataaaaaatcataaggaaactgacatagtgccatttagagaagcccccgcgtattccaataggcggagacgccccccgaacacccttgccgcaccacgcgtgctgttgcggtccaattcggacaataacctcaacgccagtgccccagactgggccgtttgctccaccgccacttcccatcgctccctgagcccccagctcctgcagcagatgcctagtaaaccggaaggcgccgccaagaccataggctcatatgtcccggggccccgctccagatcacctagcttaaaccggttgggtggagccggagaggatgggaaacggccccagcccctgtggcatgtcggctcaccatttgccctgggcgctaacaaggacagtctctctgccttcgagtatcccggtcctaagcgcaagctgtattccgcggtgcccggcaggctattcgtggcagttaagccatatcagcctcaagttgatggcgaaattcccctgcaccgtggcgatagagtgaaagtgctgagtatcggggaaggcgggttctgggagggatcagcccgcggacacattggctggttcccagcagagtgcgtcgaggaagtacagtgtaaacctcgcgattcccaggccgaaaccagagccgaccgtagcaaaaagcttttccggcactacacagtgggcagttatgacagttttgacacttctagtgattgcataattgaggagaagactgtggtactgcagaagaaggacaatgaagggttcggctttgtcttgcgtggggccaaagctgatactccaattgaagagtttactcccacccccgccttccccgccctgcagtatctagaatctgtcgatgaggggggagtagcctggcaggctgggttgcgcactggcgactttctcattgaagtgaataacgaaaacgttgtaaaggtagggcacagacaggtggtgaatatgatccggcagggcggcaatcatcttgtgcttaaggttgtgactgttacccggaatctcgacccagatgatactgccaggaaaaaagccccgcccccgcccaagcgcgccccgaccactgcattgacattaaggtcaaaatccatgacatccgagttggaggagctggttgacaaggacaagcccgaggagatcgtccccgcctcgaagccctcgagggcagcggagaatatggccgtggagccccgggtagctacaatcaagcagaggccctccagccggtgcttccctgccggaagtgacatgaactcggtatacgaaagacaagggatagcggtcatgacaccaacagtccctggcagcccaaaagcaccttttctgggcataccccgcgggaccatgcggcggcaaaaatctatcgactcccggattttcctgtcaggaatcacagaagaagagcggcagttcctggcgcctccaatgcttaaatttacgagatcattatctatgcccgacacgagtgaggacatcccacccccaccacagtcagtgccgccctccccccctcccccgtcccctaccacgtacaattgccccaagtccccgactccccgagtttacgggactataaagccagcgtttaatcagaactcagccgcaaaggttagtcctgcaactcggagtgatacagtagctaccatgatgcgggagaaaggcatgtactttcgcagggaactggaccgctatagcctcgatagtgaggatctgtattctaggaacgccggcccacaggcaaattttcggaataagcggggacagatgcctgagaatccttatagtgaggtgggcaagatcgcgtcaaaagcagtatatgtgccagccaaaccagccaggaggaaaggaatgctggtgaagcagtccaatgtagaggactcccctgagaaaacttgctctataccaataccaacaatcatagtgaaagagcctagcactagctcatcaggcaaatcttcccagggcagctcaatggagattgaccctcaggctcccgaacctccttcgcagcttcgtcctgatgaaagcctgacagtgagttctccttttgccgcagctatcgccggtgccgtccgcgatcgagaaaagaggctggaggcccgtcgcaatagtccagctttcctgagcactgatcttggagacgaggatgtggggctgggtcctcccgctccacgcacaaggccatcaatgttccctgaggaaggtgactttgccgacgaggatagcgccgagcaactgagctcaccaatgccatctgctacaccccgagaaccggaaaaccatttcgtcgggggcgccgaggctagcgctccgggagaagccggaagacccttgaattccacaagcaaagcgcagggccctgagagctcgcctgccgttcccagcgccagctctggcactgccgggccaggaaactatgtgcacccgctgaccggacgcctgctggacccctcttctcccctggcactggctctgagcgccagggatagagccatgaaagaatcacagcagggccccaagggtgaagcgcctaaggccgaccttaataaacctctttacattgacacgaagatgcgccccagcctggatgccgggttcccaacggtgactagacagaatactagaggaccattgcggaggcaggagacagaaaataaatatgagaccgaccttggccgcgatcgtaagggagacgacaagaaaaatatgctgattgacattatggatacttcccagcaaaagtccgctgggttactgatggtgcatacagtggatgctaccaaactcgataacgctctacaggaggaggacgagaaggcagaggttgaaatgaagcccgactccagcccatctgaggtaccagagggcgtctccgagaccgagggcgcactgcaaatttctgctgctccagaaccaaccacagttcctggccgcaccatcgtggcagtgggctcaatggaggaggccgttatcctgccatttaggatccccccacctcccctggcttctgtggacctggatgaggacttcatcttcaccgagcctctgccacctccgctggagttcgccaactcgtttgatattcctgacgacagggctgcaagcgtacctgctctgtccgacctggtcaaacagaagaaatccgacacacctcagtcgccatcacttaactcaagccaaccaacgaatagcgcagactctaagaaacccgcgagtctgagtaactgtttaccagccagttttttacctcctcctgaaagcttcgatgccgttgcagactccggcattgaagaagtggactccaggagctccagtgaccatcacttggaaaccacctctaccatttccacagtctcaagcatcagcaccctgtcctccgaaggaggcgagaatgtggacacttgtactgtgtatgcagacggacaggcatttatggttgataaaccccccgtccctcccaagcctaagatgaaacctatcatccataaatcaaatgctctctaccaggatgcgctggttgaagaagatgtcgattcgttcgttattccccctcctgctcctccacccccacctggtagcgcccagcccggcatggctaaggtcctgcagcctagaacatccaaactctggggagacgtaacagaaataaagtcaccgatactgtccgggcctaaagcgaatgtgatctctgagctgaacagtatccttcagcagatgaaccgagaaaaattggccaagcccggagaaggcttagactctcccatgggggcaaaaagtgctagccttgctcctcgctcccccgagattatgtccaccatcagcggcacaagatctaccaccgttaccttcactgtaaggcccgggaccagtcaaccgattaccctgcagtctaggcctcctgactatgagagtcgcacaagcggaaccaggagggctcctagccctgtggtgagccctacagagatgaataaagaaaccttgcctgccccactaagcgccgccactgccagtccaagtcccgccctcagcgacgtgtttagccttccttcccagccaccatctggcgatctgtttggattgaacccggcggggcgttccaggagcccatccccctccattctgcagcaacctatcagtaacaagcctttcacgaccaagccggtgcatctgtggaccaaacccgatgttgctgactggctggagagtcttaacctgggagagcacaaagaagccttcatggacaacgagatcgacgggagccacctgcccaatctgcagaaagaagacttgattgatttaggcgtgacccgggtcggacaccgaatgaacatcgaaagggccttgaaacagctccttgatagatag

SEQ ID NO: 173910 - DNA, 5553 bp, Artificial Sequence
  derived and/or modified sequence
atgccccgctcccccacatccagcgaagacgaaatggcccaaagctttagcgactatagcgttggctcggaaagtgattcatcaaaagaggaaaccatatacgataccatcagagctaccgctgagaagccaggcggcgccaggaccgaggaatcccagggaaacacactcgttataagagtcgtaatccacgacctgcagcagaccaagtgcatcagattcaaccctgacgctaccgtgtgggtggcaaagcagcgaatcctgtgcacattgactcaatctctgaaagacgtactcaactacggtctgtttcagcccgcaagcaacggcagagatgggaaatttctggacgaagagagactcctgagggagtatccacagcccgttggtgagggtgttccttccctggagtttcggtacaaaaagagagtttacaagcaggcttccctggatgaaaagcagttggccaagctgcacacaaagactaatttaaagaagtgcatggatcatattcagcataggctcgtagagaaaattactaagatgctggatagagggctcgatccgaacttccacgaccctgaaacaggagaaactccactgactctggcggctcagctcgatgactcagtggaagtgatcaaagcattaaagaatgggggggcgcaccttgactttagagccaaggatgggatgacagctcttcataaagccgctcgggcgcgcaaccaggttgccctgaaaacactcctggagctgggcgcgtcacctgactacaaagatagctacggcctcacccctttgtatcacaccgcaatcgtcggcggcgacccatactgctgtgaactgctccttcacgaacacgccacagtgtgctgcaaagatgagaacggctggcatgagatccatcagtcgcgatgctggggacatatatctgagcctcaccacaccctcctgagcggatcagcccgtagccagcagtctcgttccgcatcatctgccctccatgtctgtgccatgtactcttctttctcttgtgtgagaatctccctactgtttcacgggaggattacagaacttaagcagtacaagaagtctacgccgtttcaggtcgctatcatagccggtaatttcgagttagcagaatacatcaaaaatcacaaggaaactgacattgtgccctttcgcgaggcaccagcctactctaaccggcgcagaagaccacccaatactctcgccgcccccagggtactccttagaagcaactccgataataatctaaacgcgagcgctcccgactgggctgtgtgtagtaccgcgacatcccacaggtctcttagcccccagctgctgcagcagatgccaagcaaacctgagggagctgctaagaccatcgggtcttacgtgccgggacccagatctcgtagccctagcctgaacagactaggaggcgccggggaggacggtaagagacctcagcccttgtggcatgtgggatcccctttcgccttaggcgcaaacaaagactcactaagcgcattcgagtaccccggcccaaaaagaaaactctattcagcagtgccaggccgtctctttgtggccgtcaagccttatcagccccaggtggacggtgaaattcccttacacaggggggatcgggttaaggttctgagcatcggagagggggggttttgggaagggtccgcaaggggacatattggctggtttccagctgaatgtgtcgaagaggtgcaatgtaaaccgagggacagccaagccgaaactagagccgaccggagtaagaaactttttaggcactatactgtgggcagttacgattcattcgatacaagctctgattgtatcattgaagagaagactgtcgttctgcaaaagaaggacaacgagggattcggattcgtgttaaggggggcaaaggccgacacccctattgaggaatttacacccacccccgccttccctgccctgcaatatctggagtcggtggacgagggaggagtcgcttggcaagcgggcttacgtaccggagattttctgattgaggtcaataatgagaatgttgttaaagtgggacaccgacaagtggtgaatatgatccgccaggggggaaaccatctggtactcaaggttgtaaccgtgactaggaacctcgatccggacgataccgcgcgcaagaaggcaccccctccccctaagcgggcacctacaacggccctcacattacggtccaagtccatgacatctgaacttgaagaacttgttgataaaggtgtgatccggaaagtgtcagataagcctgaggaaatcgtgccagcttcgaagccgtcacgtgcagctgagaacatggcagtagagcctcgagtcgctactattaagcagagaccatccagccgatgcttcccggctggttctgatatgaattctgtttatgaaaggcagggaattgcagtcatgacaccaacagtacctgggagtcccaaggccccttttctgggaatccccaggggcacaatgaggcggcagaaatctattgactcccgtatttttctgtctggcatcacagaggaagagagacagtttcttgctccacccatgctgaaatttacccgcagcctgtcaatgcctgacacgtcagaagacatcccccccccgcctcaatcagtccctccatctccacctccaccttcacccaccacctataactgtccaaagtccccgactcctcgggtttatggcaccatcaaacccgcctttaaccaaaatagtgcagctaaagtatcccccgcgaccagatccgatactgtggcaacaatgatgagagaaaaggggatgtactttaggcgagagctggatcgttattctttagattccgaggatttgtactccagaaacgctggccctcaagccaactttagaaacaaacgcgggcaaatgccggaaaatccatattccgaagtgggaaagatcgcgtctaaagcggtctacgtcccggcaaagccagcccgcaggaagggaatgttggtgaaacagtcgaatgtggaagactctcccgagaagacttgtagtatcccaatcccaacaattatagttaaagagccgtccacatctagctctgggaagtctagccagggatcatcaatggagatcgaccctcaggctcccgagcctccctctcagttgcgaccagacgaatcactgacagtctctagccctttcgctgcagcgattgctggcgcagtgagagaccgggagaagaggttggaggctcgaaggaactccccagcattcctcagcactgatctaggcgatgaagatgtcggcctcggtcctccagccccacgcacgcgtcccagcatgtttcccgaagaaggcgacttcgcggatgaggatagtgccgaacaactgtcctcccctatgccttccgccacaccccgggaaccagaaaatcactttgtcgggggggcagaagcatctgccccaggtgaagctggccggcccctaaattctacgagcaaagcgcagggcccagaatcctcacctgctgtgccctccgctagctccggaaccgcaggccccggcaattacgttcatcccctgactggccgactcctggaccctagctccccactggctttagctctgagcgcccgcgacagggctatgaaagaaagtcagcagggaccaaagggagaggcccccaaagcagatcttaacaaaccgctttacattgacactaagatgagaccttcattggatgcagggttccctaccgtgactagacaaaacacaaggggacctttaagacgccaggagacggagaacaagtatgagacagaccttggcagagataggaaaggggacgataagaaaaacatgctcatagacattatggatacgtcccagcagaagagcgctggactgctgatggtccacaccgttgatgcaacaaaactggataacgccttacaggaggaggatgagaaggctgaggtcgagatgaaacccgatagttccccgagcgaggtgcctgagggcgtgagtgaaactgagggagccctccagatcagtgctgccccagagcctacaaccgttcctgggcgaaccatcgtagcagtgggcagcatggaggaggcagtcatactaccttttcgcattcccccaccccccctagcgtccgtcgatctcgacgaggacttcatttttacagagccattgcccccccccctagaattcgccaatagtttcgacattccagatgacagagccgcgagcgtccctgccttgagcgacctcgtgaagcagaaaaagagcgatacaccacaaagtccatcccttaattcttcccaaccaactaatagtgcagactccaagaagcccgcaagcctgtccaactgcctgcctgcctctttcctgcccccacctgagagctttgatgccgttgccgatagcggtatcgaggaggtggattctcgctcgtcctccgaccaccacctggagaccacctcgaccatctccacagtaagttcaattagcaccttgagtagcgagggcggggaaaatgtagacacttgtacggtgtacgccgacggccaagcctttatggtcgacaaaccacccgtaccccctaaaccaaaaatgaagcctattattcacaagagcaacgcactttatcaggacgcactggtagaagaggatgtggactcctttgtgataccccctcccgctcctccccccccacctggttcggctcagcccggaatggcaaaggttctgcaacctagaacatcaaaactgtggggggacgtaactgaaatcaagtctcctatcttgtcaggccccaaggccaacgtaataagtgaactcaactccattctacagcagatgaaccgggagaagctggctaaaccgggggaaggccttgattcaccaatgggagccaaaagcgcatctcttgcgcctaggagtcctgagatcatgtctaccatctctgggacccgcagcaccacagtaaccttcaccgtgcggccaggtacgtcccagccaatcactctgcagagtaggccccctgactatgagtctcggactagtggcacaaggcgcgcccctagtcccgtggttagcccaaccgagatgaataaagagaccttgcccgcgccactgtcagctgccactgcctcacctagccctgctctatctgacgtattttcgttgccaagccagccaccttctggagatctgttcggactgaatccggctggcagaagcaggagtccgtcacctagcattctccaacaacccatcagtaacaagccatttaccacaaagcccgtgcatctgtggaccaaacccgatgtggccgattggctcgagtcattgaacctcggggagcataaggaggccttcatggataacgagattgacgggagtcacctgccaaacctgcaaaaggaggatttaattgaccttggcgtcacgagagtcggccaccggatgaatattgaaagagcacttaagcaacttcttgaccgatag

SEQ ID NO: 173911 - DNA, 4422 bp, Artificial Sequence
  derived and/or modified sequence
gtggccatcatcgccggcaactttgagctggccgagtacatcaagaaccacaaggagacagacatcgtgcccttccgggaggccccagcctacagcaacagaagaagaagaccacccaacaccctggccgccccccgggtgctgctgcggagcaacagcgacaacaacctgaatgccagcgccccagactgggccgtgtgcagcacagccaccagccacaggagcctgagcccccagctgctgcagcagatgcccagcaagccagagggcgccgccaagaccatcggcagctatgtgcccggccccaggagccgcagccccagcctgaaccggctgggcggcgctggagaagatggcaagaggccccagcccctgtggcacgtgggcagcccctttgccctgggcgccaacaaggacagcctgagcgcctttgagtacccaggccccaagaggaagctgtacagcgctgtgcccggccgcctgtttgtggccgtgaagccctaccagccccaggtggatggagagatccccctgcacagaggagacagagtgaaggtgctgagcattggagagggcggcttctgggagggcagcgcccggggccacatcggctggttcccagcagaatgtgtggaggaggtgcagtgcaagccccgggacagccaggccgagaccagggctgacaggagcaagaagctgttccgccactacacagtgggcagctatgacagctttgacaccagcagtgactgcatcatcgaggagaagacagtggtgctgcagaagaaggacaatgaaggcttcggctttgtgctgcggggggccaaggctgacacccccatcgaggagttcacccccaccccagccttccctgccctgcagtacctggagagcgtggatgagggcggcgtggcctggcaggccggcctgaggactggagacttcctgattgaggtgaacaatgaaaatgtggtgaaggtgggccaccggcaggtggtgaacatgatccggcagggcggcaaccacctggtgctgaaggtggtgacagtgaccaggaacctggaccctgatgacacagccaggaagaaggcccctcctccacccaagagggcccccaccacagccctgaccctgcggagcaagtccatgaccagcgagctggaggagctggtggacaaggacaagccagaggagatcgtgcctgccagcaagcccagcagagctgctgagaacatggctgtggagccccgggtggccaccatcaagcagaggcccagcagccgctgcttccctgctggcagtgacatgaacagcgtgtatgaaaggcagggcattgctgtgatgacccccaccgtgcccggcagccccaaggcccccttcctgggcatcccccggggcaccatgaggcggcagaagagcattgacagccgcatcttcctgagcggcatcacagaggaggagcggcagttcctggccccacccatgctgaagttcaccaggagcctgtccatgccagacaccagcgaggacatccccccaccaccccagagcgtgccccccagccccccaccacccagccccaccacctacaactgccccaagagccccaccccccgggtgtatggcaccatcaagccagccttcaaccagaacagcgctgccaaggtgtccccagccaccaggagtgacacagtggccaccatgatgagggagaagggcatgtacttcagaagagagctggaccgctacagcctggacagcgaggacctgtacagcagaaatgccggcccccaggccaacttcaggaacaagaggggccagatgcctgagaacccctacagcgaggtgggcaagatcgccagcaaggctgtgtatgtgcctgccaagccagcccggaggaagggcatgctggtgaagcagagcaatgtggaggacagccctgagaagacctgcagcatccccatccccaccatcatcgtgaaggagcccagcaccagcagcagcggcaagagcagccagggcagctccatggagattgacccccaggcccctgagccccccagccagctgcggccagatgagagcctgactgtgagcagcccctttgctgctgccatcgccggggctgtgcgggaccgggagaagaggctggaggcccggaggaacagccctgccttcctgagcacagacctgggagatgaagatgtgggcctgggccccccagcccccaggacccggcccagcatgtttcctgaggagggggactttgctgatgaagattctgctgagcagctgagcagccccatgcccagcgccaccccccgggagcctgagaaccactttgtgggcggcgctgaggccagcgcccctggagaggccggccggcccctgaacagcaccagcaaggcccagggccctgagagcagccctgctgtgcccagcgccagcagcggcacagctggccctggcaactacgtgcaccccctgaccggccgcctgctggaccccagcagccccctggccctggccctgagcgcccgggaccgggccatgaaggagagccagcagggccccaagggggaggcccccaaggctgacctgaacaagcccctgtacatcgacaccaagatgaggcccagcctggatgctggcttccccaccgtgacccggcagaacacccggggccccctgcggcggcaggagacagagaacaagtatgaaacagacctgggccgggacagaaaaggagatgacaagaagaacatgctgattgacatcatggacaccagccagcagaagtctgctggcctgctgatggtgcacacagtggatgccaccaagctggacaatgccctgcaggaggaggatgagaaggccgaggtggagatgaagccagacagcagccccagcgaggtgcctgagggcgtgtctgaaacagaaggagccctgcagatctctgctgcccctgagcccaccaccgtgcccggccgcaccatcgtggccgtgggctccatggaggaggccgtcatcctgcccttccgcatccccccaccacccctggcctctgtggacctggatgaggacttcatcttcacagagcccctgcccccacccctggagtttgccaacagctttgacatcccagatgaccgggccgcctctgtgcctgccctgagtgacctggtgaagcagaagaagagtgacaccccccagagccccagcctgaacagcagccagcccaccaacagcgctgacagcaagaagccagccagcctgagcaactgcctgcctgccagcttcctgcccccacctgagagctttgatgctgtggccgacagcggcatcgaggaggtggacagccgcagcagcagtgaccaccacctggagaccaccagcaccatcagcacagtgagcagcatcagcaccctgagcagcgagggcggagaaaatgtggacacctgcaccgtgtatgcagatggccaggccttcatggtggacaagccccctgtgccccccaagcccaagatgaagcccatcatccacaagagcaatgccctgtaccaggatgccctggtggaggaggatgtggacagctttgtgatccccccaccagcccctcctcctcctcctggcagcgcccagcccggcatggccaaggtgctgcagcccaggaccagcaagctgtggggagatgtgacagagatcaagagccccatcctgagcggccccaaggccaacgtcatcagcgagctgaacagcatcctgcagcagatgaaccgggagaagctggccaagccaggagagggcctggacagccccatgggcgccaagagcgccagcctggcccccaggagccctgagatcatgagcaccatcagcggcaccaggagcaccaccgtgaccttcaccgtgcggcccggcaccagccagcccatcaccctgcagagccggcccccagactatgagagcaggaccagcggcacccggcgggcccccagccctgtggtgagccccacagagatgaacaaggagaccctgcctgcccccctgtctgctgccacagccagccccagccctgccctgagtgatgtgttcagcctgcccagccagcccccatctggggacctgtttggcctgaacccagctggccgcagccgcagccccagccccagcatcctgcagcagcccatcagcaacaagcccttcaccaccaagcctgtgcacctgtggaccaagccagatgtggccgactggctggagagcctgaacctgggggagcacaaggaggccttcatggacaatgaaattgatggcagccacctgcccaacctgcagaaggaggacctgattgacctgggcgtgaccagggtgggccacaggatgaacatcgagcgggccctgaagcagctgctggacagatag

SEQ ID NO: 173912 - DNA, 5553 bp, Artificial Sequence
  derived and/or modified sequence
atgcccaggagccccaccagcagtgaagatgagatggcccagagcttcagtgactacagcgtgggcagcgagagtgacagcagcaaggaggagaccatctatgacaccatccgggccacagctgagaagccaggaggagccaggacagaggagagccagggcaacaccctggtgatccgggtggtgattcatgacctgcagcagaccaagtgcatccgcttcaacccagatgccaccgtgtgggtggccaagcagaggatcctgtgcaccctgacccagagcctgaaggatgtgctgaactacggcctcttccagcctgccagcaatggaagagatggcaagttcctggatgaggagcggctgctgcgggagtacccccagcctgtgggggagggcgtgcccagcctggagttccgctacaagaagagggtgtacaagcaggccagcctggatgagaagcagctggccaagctgcacaccaagaccaacctgaagaagtgcatggaccacatccagcaccggctggtggagaagatcaccaagatgctggaccggggcctggaccccaacttccatgaccctgagaccggggagacccccctgaccctggccgcccagctggatgacagcgtggaggtgatcaaggccctgaagaatggaggagcccacctggacttccgggccaaggatggcatgacagccctgcacaaggccgcccgggccaggaaccaggtggccctgaagaccctgctggagctgggcgccagcccagactacaaggacagctatggcctgacccccctgtaccacacagccatcgtgggcggggacccctactgctgtgagctgctgctgcacgagcacgccaccgtgtgctgcaaggatgaaaatggctggcatgagatccaccagagccgctgctggggccacatcagcgagccccaccacaccctgctgagcggcagcgcccggagccagcagagccgcagcgccagcagcgccctgcacgtgtgtgccatgtacagcagcttcagctgtgtgcgcatcagcctgctcttccacggccgcatcacagagctgaagcagtacaagaagagcacccccttccaggtggccatcatcgccggcaactttgagctggccgagtacatcaagaaccacaaggagacagacatcgtgcccttccgggaggccccagcctacagcaacagaagaagaagaccacccaacaccctggccgccccccgggtgctgctgcggagcaacagcgacaacaacctgaatgccagcgccccagactgggccgtgtgcagcacagccaccagccacaggagcctgagcccccagctgctgcagcagatgcccagcaagccagagggcgccgccaagaccatcggcagctatgtgcccggccccaggagccgcagccccagcctgaaccggctgggcggcgctggagaagatggcaagaggccccagcccctgtggcacgtgggcagcccctttgccctgggcgccaacaaggacagcctgagcgcctttgagtacccaggccccaagaggaagctgtacagcgctgtgcccggccgcctgtttgtggccgtgaagccctaccagccccaggtggatggagagatccccctgcacagaggagacagagtgaaggtgctgagcattggagagggcggcttctgggagggcagcgcccggggccacatcggctggttcccagcagaatgtgtggaggaggtgcagtgcaagccccgggacagccaggccgagaccagggctgacaggagcaagaagctgttccgccactacacagtgggcagctatgacagctttgacaccagcagtgactgcatcatcgaggagaagacagtggtgctgcagaagaaggacaatgaaggcttcggctttgtgctgcggggggccaaggctgacacccccatcgaggagttcacccccaccccagccttccctgccctgcagtacctggagagcgtggatgagggcggcgtggcctggcaggccggcctgaggactggagacttcctgattgaggtgaacaatgaaaatgtggtgaaggtgggccaccggcaggtggtgaacatgatccggcagggcggcaaccacctggtgctgaaggtggtgacagtgaccaggaacctggaccctgatgacacagccaggaagaaggcccctcctccacccaagagggcccccaccacagccctgaccctgcggagcaagtccatgaccagcgagctggaggagctggtggacaagggcgtcatcaggaaggtgtctgacaagccagaggagatcgtgcctgccagcaagcccagcagagctgctgagaacatggctgtggagccccgggtggccaccatcaagcagaggcccagcagccgctgcttccctgctggcagtgacatgaacagcgtgtatgagcggcagggcattgctgtgatgacccccaccgtgcccggcagccccaaggcccccttcctgggcatcccccggggcaccatgaggcggcagaagagcattgacagccgcatcttcctgagcggcatcacagaggaggagcggcagttcctggccccacccatgctgaagttcaccaggagcctgtccatgccagacaccagcgaggacatccccccaccaccccagagcgtgccccccagccccccaccacccagccccaccacctacaactgccccaagagccccaccccccgggtgtatggcaccatcaagccagccttcaaccagaacagcgctgccaaggtgtccccagccaccaggagtgacacagtggccaccatgatgagggagaagggcatgtacttccggcgggagctggaccgctacagcctggacagtgaagatctctacagcagaaatgccggcccccaggccaacttcaggaacaagaggggccagatgcctgagaacccctacagcgaggtgggcaagatcgccagcaaggctgtgtatgtgcctgccaagccagcccggaggaagggcatgctggtgaagcagagcaatgtggaggacagccctgagaagacctgcagcatccccatccccaccatcatcgtgaaggagcccagcaccagcagcagcggcaagagcagccagggcagctccatggagattgacccccaggcccctgagccccccagccagctgcggccagatgagagcctgactgtgagcagcccctttgctgctgccatcgccggggctgtgcgggaccgggagaagaggctggaggcccggaggaacagccctgccttcctgagcacagacctgggagatgaagatgtgggcctgggccccccagcccccaggacccggcccagcatgtttcctgaggagggggactttgctgatgaggacagcgctgagcagctgagcagccccatgcccagcgccaccccccgggagcctgagaaccactttgtgggcggcgctgaggccagcgcccctggagaggccggccggcccctgaacagcaccagcaaggcccagggccctgagagcagccctgctgtgcccagcgccagcagcggcacagctggccctggcaactacgtgcaccccctgaccggccgcctgctggaccccagcagccccctggccctggccctgagcgcccgggaccgggccatgaaggagagccagcagggccccaagggggaggcccccaaggctgacctgaacaagcccctgtacatcgacaccaagatgaggcccagcctggatgctggcttccccaccgtgacccggcagaacacccggggccccctgcggcggcaggagacagagaacaagtatgaaacagacctgggccgggacagaaaaggagatgacaagaagaacatgctgattgacatcatggacaccagccagcagaagtctgctggcctgctgatggtgcacacagtggatgccaccaagctggacaatgccctgcaggaggaggatgagaaggccgaggtggagatgaagccagacagcagccccagcgaggtgcctgagggcgtgtctgaaacagagggcgccctgcagatctctgctgcccctgagcccaccaccgtgcccggccgcaccatcgtggccgtgggctccatggaggaggccgtcatcctgcccttccgcatccccccaccacccctggcctctgtggacctggatgaggacttcatcttcacagagcccctgcccccacccctggagtttgccaacagctttgacatcccagatgacagagctgcctctgtgcctgccctgagtgacctggtgaagcagaagaagagtgacaccccccagagccccagcctgaacagcagccagcccaccaacagcgctgacagcaagaagccagccagcctgagcaactgcctgcctgccagcttcctgcccccacctgagagctttgatgctgtggccgacagcggcatcgaggaggtggacagccgcagcagcagtgaccaccacctggagaccaccagcaccatcagcacagtgagcagcatcagcaccctgagcagcgagggcggggagaatgtggacacctgcaccgtgtatgcagatggccaggccttcatggtggacaagccccctgtgccccccaagcccaagatgaagcccatcatccacaagagcaatgccctgtaccaggatgccctggtggaggaggatgtggacagctttgtgattcctcctccagcccctcctcctcctcctggcagcgcccagcccggcatggccaaggtgctgcagcccaggaccagcaagctgtggggagatgtgacagagatcaagagccccatcctgagcggccccaaggccaacgtcatcagcgagctgaacagcatcctgcagcagatgaaccgggagaagctggccaagccaggagagggcctggacagccccatgggcgccaagagcgccagcctggcccccaggagccctgagatcatgagcaccatcagcggcaccaggagcaccaccgtgaccttcaccgtgcggcccggcaccagccagcccatcaccctgcagagccggcccccagactatgagagcaggaccagcggcacccggcgggcccccagccctgtggtgagccccacagagatgaacaaggagaccctgcctgcccccctgtctgctgccacagccagccccagccctgccctgagtgatgtgttcagcctgcccagccagccccccagcggggacctgtttggcctgaacccagctggccgcagccgcagccccagccccagcatcctgcagcagcccatcagcaacaagcccttcaccaccaagcctgtgcacctgtggaccaagccagatgtggccgactggctggagagcctgaacctgggggagcacaaggaggccttcatggacaatgaaattgatggcagccacctgcccaacctgcagaaggaggacctgattgacctgggcgtgaccagggtgggccacaggatgaacatcgagcgggccctgaagcagctgctggacagatag

SEQ ID NO: 173913 - DNA, 4422 bp, Artificial Sequence
  derived and/or modified sequence
gtggccatcatcgccggcaacttcgagctggccgagtacatcaagaaccataaggagaccgacatagtgccgtttagagaggcccctgcctattcaaacaggaggagacgtcctcccaataccctggccgctcctcgggtgctactcaggtccaactcagataataatctgaatgctagtgctcctgactgggccgtctgtagtacggcaacatctcataggtcactgtcccctcagctgctgcagcagatgcccagtaaacctgagggagcggcgaagaccatcggttcttacgttccaggtccccgatcccggtctccaagcctgaaccggctggggggcgccggcgaggatggaaaacgcccccaacccctgtggcacgtagggtccccgtttgcactgggggctaacaaggatagcttgtcagcattcgagtaccctggtccgaaaagaaaactgtattccgcagttcccggccgtctattcgttgcggtaaagccctaccagccccaagtcgacggagagatacccttgcacagaggcgatagggtgaaagtcctgtcaattggtgagggtggattctgggaaggctctgctagagggcacatcggatggttcccagccgagtgcgtagaggaagtacagtgcaaacctagagatagccaggctgaaactagggctgatcggtccaagaaattgtttcggcattatactgtggggtcctacgactcctttgatacatcttctgactgcattatcgaagaaaagactgtcgtgctccaaaagaaggacaacgagggtttcggattcgtgctgcgaggcgccaaagctgatacgcccattgaagagtttacgccaacaccggcttttcctgcactccagtacctggaatccgtggacgagggcggtgtagcttggcaagcagggctgcgcacaggtgacttcctgatagaagtgaataacgagaacgtcgtgaaggtaggccaccgacaggtcgtgaatatgattcgccagggtggcaaccacctagtgctgaaagtcgtaacagtcactaggaatttggacccggacgacaccgctagaaagaaagcaccgcctccacccaaacgcgctcccacaacggccctgactctccgatctaagagtatgaccagcgaactggaagagctggttgataaggataaaccagaagaaatagtcccagcctcgaaaccttccagggccgctgagaacatggccgtggaacctagggtcgcgacaataaagcaacgtccctcctcaagatgctttcctgccgggtcagacatgaattcagtgtatgaaagacagggtatcgctgtcatgacccccaccgtacccggcagccctaaggcccccttcctgggcatacctagaggcactatgcggagacagaaaagtatcgattcacgcatctttctgtcaggaatcacagaagaagaacgccagtttcttgcccccccaatgctaaaattcacacggtctctttcaatgcccgacaccagtgaagacattcccccccctcctcagagcgtaccgccctcaccaccaccacccagccccaccacatacaattgccctaaaagcccgacccccagagtgtatggcactataaaacccgccttcaatcagaatagcgccgctaaggtcagccctgcaactcgaagcgataccgttgccactatgatgcgtgaaaaaggtatgtacttcagacgggaattggacaggtatagcctggacagcgaggacctgtactcaaggaatgccggaccacaggctaattttagaaataagcgcggccagatgcccgagaacccatattccgaggtaggcaagattgctagcaaagcggtttacgtgcccgccaagccagcgcgcagaaaaggcatgctagtaaagcaatccaatgtggaggactcccctgaaaaaacttgttcaattccgatccccactatcatcgtgaaggagccctcaacctccagttctggaaagtcctcccagggatcctctatggaaattgacccacaggcaccagagcctccaagtcagctcagacccgacgaatcattgaccgtgtcctctcctttcgccgcagcaatagccggagccgtccgagacagggaaaaaaggctggaagctaggaggaatagccctgcctttctgagcacggacctaggagacgaagatgtaggactgggcccacccgctcccaggacaaggcccagcatgttcccagaagagggcgattttgctgatgaagattctgctgagcagttatcctcgccgatgccgagtgccacgccacgcgagcctgagaaccacttcgtagggggggccgaagcctctgctccaggtgaagccggtcgtcctctgaattcaacaagcaaagctcaggggccagaaagttcgccggcagttccctcggcatcttcagggactgcaggacctggaaattacgtccatccgttgactgggagactgcttgatccaagttcacctctggccttagccttatcagccagagaccgcgctatgaaggagtcgcaacaaggcccaaaaggagaggcgccaaaggccgatctgaacaagcccctatacattgacacaaagatgaggccttctctcgatgctggcttcccaactgtcacacgacagaacaccagaggtcctctccgtagacaggaaaccgagaacaagtatgagaccgaccttggcagagaccggaagggtgacgataaaaagaacatgctcatcgacatcatggacacttctcagcagaaaagcgcaggcctactcatggtgcacaccgtcgatgctaccaagctggataacgcgctgcaggaggaagacgaaaaagccgaggttgagatgaagccggactcctctcccagtgaagtccctgaaggagttagcgagacagagggggcgctgcaaatcagcgcagcacctgagccaacaacagttccaggcaggacaatcgtggcggtcggttcaatggaagaagcagtcattctgccattccgcattccaccccctccgctggcttctgtggacctcgatgaggactttatcttcaccgagcctttaccaccaccccttgagtttgcaaactcattcgatatcccagatgacagggctgcatcggtccccgccttatcagatctggtcaagcagaagaaaagcgatacaccccagtcaccaagcctcaatagcagccagcccacgaactccgccgattcaaaaaaaccagcttctttgtctaactgcctcccagccagtttcttgcccccacccgaaagcttcgatgctgtagctgactctgggattgaagaagtcgactctagatccagttctgatcatcacttggaaaccactagcaccatctccaccgtcagttccattagtaccctatctagcgagggcggggagaacgtggacacttgcactgtgtatgcagatggtcaagcattcatggtcgataagcctccagttccacctaaacccaagatgaaacctatcatccataagagcaatgccttgtatcaggacgccttggttgaggaggatgtggactccttcgtgataccgcctcccgctccaccgccccctcccgggtccgctcagcctggaatggccaaagtgctccagccaagaacatcgaaactgtggggagacgttaccgaaatcaagagtcccatcctgagcggaccaaaggccaacgttattagcgagctgaacagtattttgcagcagatgaacagagagaagctggccaaacccggggaaggtctggattcccccatgggagcaaaatcagccagcctcgcccccagaagcccagagatcatgtccacgatttcaggtacgcgatctacaacagtgacttttaccgttcggcccgggactagtcagcccataactcttcagagccgaccccccgactacgaatctcggacgagcggcacaagaagagcccctagcccagtcgtttcacctaccgagatgaataaggagactctccctgccccgctgtccgcagcaaccgcttctccctcccccgcactgagcgatgtctttagcttgccttcacagccaccctctggcgatttgttcggcctgaaccccgcggggcggtctcggagtccgtcccctagcattctacaacagcctatttccaataaaccatttacaactaaacctgtgcacttatggaccaagccggatgtggccgattggctcgagagtttgaatttaggtgaacacaaagaggcctttatggataacgagatcgacggcagtcaccttcccaacttacagaaggaagacctcatagatctcggtgttactcgggtcggccaccgtatgaatatcgagagagccctcaagcagctgttggaccggtag

SEQ ID NO: 173914 - DNA, 5553 bp, Artificial Sequence
  derived and/or modified sequence
atgccccggagccccaccagcagcgaggacgagatggcccagagcttttctgactactccgtgggtagcgagtctgactccagcaaggaggagactatttacgacactatacgggccacagctgagaaaccaggaggtgcacgtactgaagaaagtcagggtaatacactcgtgatccgagtggtgattcacgatctccagcagaccaagtgcatacgcttcaaccctgacgcaacggtgtgggtagccaagcagcgaatcttgtgcacgctgacacagagccttaaggacgttctcaactatgggttatttcagccagccagtaacggtcgagatggtaagtttcttgacgaagaaaggctcctgagggaataccctcagccagtgggggagggggttccctctctcgagttccgatataagaaacgtgtctacaagcaggcttccctagacgagaagcagctcgctaaactgcacacaaagacaaatctgaagaaatgcatggaccacatccagcatagattggtagagaagattacaaagatgcttgaccgcggcttagatcctaatttccacgacccagaaaccggcgaaactcctctgaccctagcggcccagctggatgatagcgtagaggtgatcaaagcattaaaaaatggaggcgcccatttggacttccgcgccaaagacggcatgaccgcgcttcataaggctgctagagccagaaatcaggtcgccctaaagactctgcttgagctcggggcctctcccgattataaagactcatacggtctgacccccctgtatcacacggcaattgtcgggggcgacccatactgttgcgaactgctcttgcacgaacatgcaaccgtgtgttgtaaagacgagaatggttggcacgagattcaccaatcaagatgttggggccatataagcgaaccacatcacaccctactcagcgggtcagcccgatctcagcagtctagaagtgccagttcagccctccatgtttgcgccatgtacagcagtttctcatgcgtgcggatttccctgttgttccatggaaggattaccgaattgaaacagtacaagaaaagtacccccttccaggttgccatcattgcgggcaatttcgagttggctgaatatatcaaaaaccacaaggaaaccgatatcgtgccctttcgcgaggcccccgcttacagtaataggagacgccgcccccctaacacacttgccgctccgagagtcctgcttagaagcaactcagataacaatctcaacgcctcggcaccagattgggcggtgtgttctactgctaccagccacaggtcgctgtccccccagctcttgcaacagatgcccagtaagccggagggtgccgcaaaaactattgggtcgtacgtacccgggccgagatcccggagtccttctctgaatagattgggcggagccggtgaggatgggaagcgtccccagcccctttggcatgtgggctctccattcgctctgggggccaacaaggacagcctgtctgccttcgaatatcctgggcctaaaaggaaactgtattcagccgtcccagggcgactgttcgtagctgttaagccatatcaaccccaggttgatggcgaaataccgctgcaccgtggtgatcgggtgaaggtgttatcaatcggtgagggcggattttgggagggatcagctcgtggacatattggctggtttcccgcagaatgtgtggaggaggtgcagtgcaagccaagagattcacaggctgagacgagggctgatagatctaagaagctctttcggcattacaccgtggggtcctacgacagtttcgatacttcgagcgactgtataatcgaagaaaagacagtcgtgctccaaaaaaaggacaacgaagggtttgggttcgtactcagaggcgccaaggccgatacgccaatagaagaattcactcctaccccggcattcccagcactgcagtacctggagtcagttgatgaaggcggggtcgcctggcaggccgggctacggaccggcgactttctgatagaagtgaacaatgagaatgtagttaaagtcgggcaccgccaggtcgttaacatgatccggcaggggggtaatcacctcgtgctcaaagtggtgacagtcacgcggaatctggacccagacgatacagctcggaagaaggcacctcctcccccgaagagggcgccaaccacggccctgacactccggagcaagagtatgacctcggagctagaggagcttgtggataagggtgtgatcagaaaggtaagtgacaagcctgaagaaattgtgccagctagcaagccgtcacgcgccgcggaaaatatggccgtcgaacctagggttgccactatcaaacagcgcccttcaagccgctgtttccctgccggcagtgatatgaactccgtctatgagaggcagggaatcgcggtcatgacccccactgtgcccggatccccgaaagccccgttcctgggtatccctcgcggcacaatgagaagacagaagtccatagattcaagaattttcctctccggaattacagaggaggagcggcagttccttgcgcctcctatgctgaagttcacaaggagcctgtccatgcccgacacctcggaagacattcccccacccccacagtctgtgccacctagtccacccccacctagccctacaacttacaattgccctaagagtcctacaccccgcgtgtatggcactatcaagccagcatttaaccaaaacagcgctgccaaggtatcccctgcgacgaggtcggacaccgtggcaactatgatgagggagaaggggatgtacttccgtagggagctggaccgctacagcttagattccgaggatttatattcaagaaatgcaggaccacaggctaactttcgaaataagcgcgggcaaatgccagaaaacccctatagtgaggtggggaaaattgctagcaaggccgtctatgtgcccgccaagcccgccaggaggaaggggatgctcgtcaaacagtccaacgtggaggatagccctgagaagacgtgttcaatccctattcctaccatcatcgtgaaagaaccctcaacctctagctctggcaaaagtagccagggctcttcgatggagatcgacccccaggcccctgaaccaccctctcagctccggcccgacgagtcactgactgtgtcttctcctttcgctgccgccattgccggtgctgtccgcgacagagagaaaagacttgaagctcggagaaatagccctgccttcttgtctactgacttaggcgacgaggatgtgggcctcgggcctcccgcccccagaacacggccatctatgttccctgaagagggcgactttgccgatgaggacagcgctgaacagctgtcaagcccaatgccttccgctacaccgagggagcctgagaatcactttgtaggcggggccgaagcttccgcccccggagaagctgggcggcctctgaactctacctccaaggcacaagggccagaatctagccccgccgtcccgtcagcctcatctgggaccgcagggcccgggaactacgttcatccgctgactgggagactgctggatccttcatctcccctcgcattagcgctgtctgcccgggatcgagctatgaaggaaagccagcaaggtcctaagggcgaggctccaaaagccgatctcaacaaacccctgtatatcgatacaaaaatgcgtccctcgttagatgcaggattccctaccgtcactcgacaaaacactcggggtccattacgtcggcaagaaactgaaaacaaatatgaaacggatcttgggcgtgatcgtaaaggtgacgataaaaagaacatgctgatcgatatcatggatactagccagcagaagtccgctggactcttgatggtccacaccgtcgacgccaccaagctcgacaatgctctgcaggaggaagacgaaaaggcagaggtggagatgaagcctgattcatctccctctgaagtgccagagggggtgtcagaaaccgaaggtgcacttcagatctccgccgcgcccgaacccaccacagttccaggaagaactatcgtggccgtggggtcaatggaagaggctgtgatcctgccatttaggattccaccgcctcctttggcaagcgtggatttagacgaggactttatcttcaccgagccactgcctccacccctggagtttgccaacagtttcgacatccccgatgacagagcagcaagtgtgcctgccttgtccgacttggtgaaacaaaagaaaagcgataccccacaatccccgtcgttgaactcttcacagcctacaaacagtgccgatagcaagaaaccagcttccctctccaattgcctgcccgcaagtttcctgccccctcctgaaagttttgacgccgtggcggatagcgggatcgaggaagtcgacagcaggtcatcctcagatcatcacctggaaacaacgagtacaattagcactgttagcagcatcagcactctgtcatccgaggggggcgagaatgttgacacctgcactgtctacgcagacggacaggcatttatggtggataagccgcccgtgcctcctaaacccaagatgaagcctatcattcacaaatcgaatgctctgtaccaggacgcactagtggaagaggatgtagattccttcgtcatccctcctcccgctccgccccccccaccaggctccgctcagcctggcatggcaaaagtcttgcagccgcgcacctctaagctgtggggagacgtcactgagataaagagtcctatcttatcaggtccaaaggccaacgtcatctcagagcttaattccattttgcagcagatgaatcgcgagaagctggcaaagccaggcgagggccttgactcgcccatgggggccaagagcgcatctctggcccctagatctcccgagattatgtcgacgattagcggaacacggtctactacagtgacttttaccgtgagaccagggacaagccagccaattacattgcagtccaggcctccggattacgagagcaggacttccgggacgcgtcgtgcaccaagccctgtggtatcaccaacggagatgaataaggagaccctgcccgcccccctttctgcagccactgcttctccctcccccgcactgtcagacgtgtttagtctcccctcacagcctccatctggagacctattcggattgaatcccgcaggaagatcgcgaagtccctccccaagtatccttcagcaaccaatcagcaataagccattcacaaccaagcccgtgcacctgtggactaaacctgatgtggccgactggctggagtccctgaacttgggtgagcacaaagaggcatttatggataatgagattgatgggagccacttgcccaacctgcagaaggaggatctcatcgacctgggggttacacgcgtcggccaccgcatgaacatcgagcgcgctctgaagcaactgctggaccgctag

SEQ ID NO: 173915 - DNA, 4422 bp, Artificial Sequence
  derived and/or modified sequence
gtggccattattgctggaaattttgaactcgcagaatatattaaaaatcataaggaaacagatattgtgccttttcgcgaagcacccgcttatagcaacaggagacgcaggcctcccaatacattagcagcacccagggtactgctgcggagcaattcagataacaatctcaatgcatctgcccctgattgggcagtctgctcaacggcaacaagccatagatctctatctcctcaactgttgcagcagatgccgtcaaaacctgagggggctgccaagactattggaagctatgtgccaggacccaggagcaggagcccttctcttaataggttggggggagcaggcgaggacgggaagcgtccgcaaccactttggcacgttgggtctcccttcgcattaggtgcgaacaaggatagtttgagcgccttcgagtaccccggtcccaagcggaaactctactccgctgtgcctggcagactctttgtggcagtaaagccgtatcagccccaagtggatggcgagatcccactgcacaggggagatagggtgaaagtgctatccataggtgaggggggattttgggagggaagtgctagagggcatatcggatggtttcccgcagagtgcgttgaggaggttcagtgcaaaccaagggacagccaggccgagactcgggctgatagaagtaagaaattgttccgacactatacagtgggcagctatgatagttttgacacctcaagcgattgcattatcgaggagaaaacagtggtcctgcagaagaaggacaacgaaggcttcggattcgtgctccggggagccaaagccgacacacccattgaagagttcactccaacacccgcttttcctgcattgcaatatctggagagcgtagatgaagggggtgtagcttggcaggccggtctcagaacgggcgactttctaattgaggtgaataacgaaaacgtggtgaaggtagggcacaggcaagtcgttaacatgatcagacaggggggtaaccaccttgtgttaaaagtggtaaccgtaacccgcaacctggaccctgacgatactgccagaaagaaggcaccgccacctcctaagcgagcacccactaccgctctcacgctccggagcaagtccatgacatccgagctggaagaactcgtcgataaagataaacctgaagagattgtgccagcttctaagcctagccgagctgccgaaaatatggctgtcgaaccgcgtgtcgccactatcaagcaacgtcctagttccaggtgttttcctgcaggatccgacatgaactctgtttacgagcggcagggaatcgccgtaatgacccccactgtacccggtagcccaaaggcacccttccttggcattccccgaggaacgatgagaaggcagaaaagcattgacagccgcattttcctctccgggatcacagaggaagaaagacaattcctggctccacccatgctgaagtttactagaagtctcagcatgcccgacactagcgaggatatcccacctcctccccaatccgttccccctagtccacctccgcctagcccaacaacatataattgccccaagtcacctacacctcgggtgtatggaaccatcaaacccgcattcaaccagaactcagccgctaaagtatcccccgcaactagatctgacaccgtcgctactatgatgagagaaaaaggcatgtattttcgcagggaactggatcgttattccctggacagtgaagacctgtacagtcgcaacgcagggcctcaggccaacttccgtaacaagcggggacagatgccagagaatccttactctgaggtcgggaaaatcgcatcgaaagccgtgtatgtccctgcaaagcctgctcgtagaaaaggaatgctcgtcaagcagtctaatgtggaagactctcctgaaaagacgtgcagcataccaattcctactatcatagtgaaagagccttcgacctcctctagcggtaaatcctcacaaggttcgagcatggagatcgatcctcaggcccctgagcccccatctcagctgcgtcctgacgagtcactgacggttagtagtccttttgctgctgctatcgcaggggcagtaagggacagggaaaagcggctggaagctaggagaaattccccggcatttctatctacagacttgggtgacgaggacgttggacttggccctcccgcaccaagaaccaggccttcgatgtttcccgaagagggagactttgcagacgaggattccgccgagcaactctcatccccgatgccatcagccactcccagagagccggagaaccacttcgtcgggggagctgaagccagcgccccaggtgaagccggaagacctcttaattcaacgtcgaaggcccagggccctgagagcagtcctgcagtccctagcgctagctccggtacggcgggtcctggaaattatgtccatcctctcactggcagactcctcgaccccagctctcccctggctctggctctttccgccagggatcgcgcaatgaaggagagccagcagggtcccaagggcgaggcgccaaaagccgacctgaataagcctttgtacatcgataccaaaatgaggccttctctggatgctggcttccctactgtgacaaggcaaaacacaagaggtcccctccgccgtcaggaaactgagaacaaatacgaaacagatctcgggagggaccggaagggcgatgataaaaagaatatgctaattgacattatggatacttctcagcaaaagagcgctggtctacttatggtccatactgtggacgctacgaagcttgataatgcacttcaagaagaggacgagaaggccgaggttgaaatgaagcccgattccagcccaagcgaggtgccagagggcgtcagtgaaacggagggtgcccttcagattagtgctgccccagaacccaccacagtgccagggaggaccattgtcgcagtcgggagcatggaggaggcagtaatcctgccatttcgtatcccccctccccctttagcctcagtggatctggacgaggattttatatttaccgaaccgttgccccctcccttagaattcgctaacagctttgacatacccgacgatagggccgcatctgtgcctgctctctcagacctcgtcaaacagaaaaagagcgacacaccccagtccccatctttaaattcatcccagcccactaattctgccgactcaaagaagccagctagtctttcgaactgcctccccgcatccttcctgcctcctcctgaaagtttcgacgcagtagccgattcgggaattgaggaagtcgatagccgtagttcatctgatcatcacctggagacgacaagcaccatttccacagtctcgtcaatctctacactcagctccgagggcggagagaatgtggacacttgtactgtctatgctgatgggcaggccttcatggtcgacaagccacctgtgccacctaagccaaagatgaagcctatcatccataaaagtaacgcattataccaagacgcccttgtggaggaggatgtggactcctttgtgatcccccctcctgcccctccccctcctccagggtccgcccagcccggaatggccaaagtcctccagcctcggacttctaagttgtggggggatgtcacggaaatcaaatcacctatcctgagcggcccaaaagctaacgtgatttccgaacttaattctattctgcaacagatgaatcgagagaaactagccaaaccaggggaaggtctggattctccaatgggcgctaaaagtgcctctctcgctccacgtagcccagagataatgtccactatctcaggtaccagatcaaccacagtgacctttacagtacggcctggcacctcgcagccaatcactctgcagagtcgcccacccgactatgagtccagaacctccggaactcgacgtgccccttcccctgtcgtgtcgccaacggagatgaataaagaaaccctgccggcaccgctgagtgccgcaacggcctctccatcacccgcactctccgatgtgttcagtctgcccagccagcccccttcaggggacctatttggcctaaatcccgcaggccgtagccgcagcccgtcccctagcatattacaacagccaatttccaataagccctttacgacaaaaccagtgcacctttggaccaagccggatgttgcagactggctggagtcccttaatctgggtgagcataaagaagccttcatggataatgagatcgatggctcccacttgcctaacctccagaaggaggacctcatcgatttgggggtgactagggtgggacacagaatgaatatcgaacgggcattaaaacagctgcttgaccgttag

SEQ ID NO: 173916 - DNA, 5552 bp, Artificial Sequence
  derived and/or modified sequence
atgccccgttcaccgacctctagcgaggatgaaatggcacaatcgttcagcgattactccgtgggaagtgagtcagatagttctaaagaagagacaatctatgatacgattagggctaccgctgagaaacctgggggagcacggactgaggaaagccaggggaacacactagttattcgcgtggtgatccacgatctgcagcagacaaaatgcatcagatttaaccccgatgctaccgtttgggtcgccaaacagcggattctatgtacactgacccagtcactaaaagatgtattaaattatgggctcttccagccggctagcaacgggagggacgggaagttcctggacgaagagagactgttgcgggagtatccacagcctgttggcgaaggcgtaccctctcttgagtttaggtataagaaacgtgtgtacaagcaggcaagtctcgatgagaaacagctcgctaagctacacacaaaaacgaacctcaagaaatgcatggaccacatccaacacaggctggttgagaaaattaccaagatgctggatcgcggtctcgatcctaattttcacgatcctgagactggggaaacgccactcacactcgccgcacaactcgatgattctgtggaagtgatcaaggccttaaagaacggcggagcacacctggactttcgcgctaaagacggcatgaccgctcttcacaaagcagctcgtgctagaaaccaagtggcgttgaaaactctgcttgaactgggtgcgtcccccgactataaggatagctacggcctgaccccactttatcatacggcaatagtcggtggcgacccttactgttgcgaactgctgctccatgaacacgcaaccgtctgttgtaaggacgagaatggctggcatgagatccatcaatcaaggtgctggggccacatatcagagccccaccacaccttactgagtgggagcgcgaggtctcagcagtcaagaagtgcctcgtctgctctccatgtgtgcgctatgtattcttcctttagctgcgttagaatcagcctcttgttccatggccgtatcacagaattaaaacagtacaagaagtcaacaccattccaagtcgccatcatagccggtaactttgaactggccgagtacattaagaaccacaaagaaaccgacatcgtaccatttcgagaggcaccagcgtattcgaacagacgccgacgccctccgaacacattggcggcacccagggtcttgcttagaagtaacagcgacaataatttgaatgctagcgcccctgattgggcggtttgtagcactgcaacatcacatcgctctctgtcccctcaactgctacagcagatgccatccaagcctgaaggtgccgctaagacaatcggtagttatgtgccagggccacgtagccgatctcctagcttgaataggctcgggggtgccggagaagatggcaagcggccacagcctctgtggcacgtgggttctccattcgcgctcggtgccaataaggactcgctctccgcattcgagtacccgggacccaagaggaagttatattccgctgtgcctgggagactcttcgtggcagttaagccctatcagccccaggtagacggcgaaataccactccatcgcggagaccgcgtcaaggttctcagcataggtgagggaggcttctgggaagggtccgctcggggtcacatcggctggtttcccgcagaatgtgtggaggaagtgcagtgtaagccgcgagattcgcaggccgaaacgcgcgctgacaggagtaaaaaactctttagacattataccgtcggctcttacgatagctttgatacctcatcggactgcatcatcgaggagaagacagtggtcctacagaaaaaagataacgagggttttggtttcgtgttacgcggtgccaaggcagatacgcccatcgaagagtttacgcctaccccagcatttcctgcgttgcagtatcttgagtctgtggatgaaggcggtgttgcctggcaggctggattacgtactggagacttcctcatcgaggtgaacaatgagaacgttgtgaaggtgggacatcgccaggtagtaaacatgattcggcaagggggaaaccacctggtgttgaaagttgttacagtgacgagaaatctggatcctgatgacactgctcgcaagaaggcccctccgcctcccaagagggcacctacgaccgcactaaccctgcggtcaaaaagcatgacatccgaattagaagaattagtggacaaaggtgtgattcggaaagttagcgataagccagaggagatcgtgccagcttcaaagccaagcagggctgctgagaacatggctgtggaaccccgtgtggctactatcaagcagcgcccttcttcccggtgcttcccagcgggatcagatatgaacagtgtgtacgaacggcagggaatcgccgtgatgacccccacagtgcctggtagtcccaaggcaccctttctgggtatacccagggggacaatgcgcaggcaaaagtccatcgatagtaggatcttcttgagcgggatcaccgaggaagagcgacagttccttgccccaccaatgttgaaattcacccggtccctcagcatgcctgatacatctgaagatattcctccaccaccccaaagtgtacccccttcacctcccccaccatcaccaactacgtataactgcccaaagtccccaaccccaagagtatacgggactattaagcccgcatttaaccagaattctgccgcaaaagtttcccccgcaacccgcagtgatacagttgctaccatgatgagggagaaggggatgtacttccgcagggagctggaccggtattctctggactccgaagatctatatagtaggaatgcaggtcctcaggccaatttccgcaataagcgcggacagatgccagaaaatccttatagtgaagtggggaagattgcctcaaaggctgtttatgtgccagctaagcctgcaaggcgcaaaggtatgttagtgaagcaatcgaatgtggaggactctcccgaaaagacctgtagtataccaatccccacaattatcgtgaaggagccatcaacaagcagttcagggaaatcctctcaggggtccagcatggagattgatcctcaggcaccggaacctccgtctcagctccgaccagatgaatctctgacagtgtccagtccatttgcggctgcaattgccggagcagtgcgggacagggagaaacgtttggaagccaggcgcaactctcctgcttttctgagtactgatttgggggatgaggatgtggggttgggcccacccgcacccaggaccagacccagtatgttccctgaagaaggggactttgctgacgaggactccgccgagcagcttagctcccccatgccatctgcaaccccgagagaacctgaaaatcacttcgtcgggggagccgaggcaagcgctcctggcgaggccggacggcctttgaatagtacgtctaaggcccagggtcccgagtcttccccagcagtcccatctgctagctctggtaccgccggacccggaaattatgtacatcctcttaccggcagactcctcgatccctccagtccacttgctttggctctgtccgcgagagacagggccatgaaagaatctcagcagggcccaaagggggaagctccgaaggcggatctaaataagcccctgtatatagacactaagatgcggccttctctggatgcgggattccccacggttacgaggcaaaataccagagggcctctgcggcgtcaggagaccgaaaacaaatacgagacagacctcggcagggatcggaaaggggacgataaaaagaatatgctgattgatattatggacacatcccagcaaaagtctgcaggattgcttatggtacacaccgtggatgccacaaagttggataacgctctgcaggaggaagatgaaaaagctgaggttgaaatgaaaccagatagtagcccatctgaggtcccagaaggcgtgagtgaaaccgagggcgctttgcagataagcgcggctcctgagcccaccaccgtgccaggccgaacgatagtcgcagtgggctcaatggaggaagctgttattctgcctttcaggatcccgccacctcctctggcctccgtggacctcgatgaagattttatcttcaccgagcccctgcctccacctcttgagttcgccaactccttcgacataccagatgatcgggctgctagcgtgccggcactttctgacctggtgaagcagaaaaagtcagatactccacagagtccaagcctaaatagttcacagcccaccaatagcgccgattctaaaaaaccagcctcactgagcaattgtctgcccgcttcttttttgccgcctccagaatcatttgatgctgtagcagacagcgggattgaggaggtagattcccgctcttcaagcgatcatcacttggaaacaacttctacaataagtaccgtctcctctatctctaccttgtccagtgaagggggtgagaatgtggatacttgtaccgtctatgcggacggccaggcgttcatggtcgacaaacccccagtgccaccgaagcctaagatgaagccaattatccataagtccaacgctctgtaccaagatgcactcgtggaggaagacgtggattctttcgtcattcctcctcccgcacctccccctccaccaggctccgcccagccaggcatggcaaaagttttgcagccgcgaacttcaaagctgtggggtgatgtcacagagattaaaagccctatcctatcagggcctaaagctaatgttatatccgaacttaactccatccttcagcagatgaaccgagagaagctggctaagcctggcgagggactggacagtcccatgggggctaagagcgcctctctcgctccccgaagccccgagatcatgtctaccatcagcggaacgcgatccactacagtcacatttactgttcggccaggcactagccaaccgattactctccagagtaggccccctgattatgaatctcgcaccagcggaacgcgcagagctccttccccagtggtgagtccaacagagatgaataaggaaacgcttcccgcacccctgtccgctgccactgcttccccaagccccgcacttagtgatgtttttagcctgccatctcagcccccaagtggcgatctttttgggctgaatcctgctggcagaagtcgatctccatctccctctatcctccagcagcctatctccaacaagcccttcactaccaaacccgtccacctctggactaaaccagacgtcgcagactggttggaaagcctgaatctcggagaacacaaggaggccttcatggataacgagatcgacggatcacacctgcctaatctccagaaagaagatctgattgatcttggggtgacaagggttgggcatcgtatgaacatcgagagagctttgaagcagctcctggaccgtta

SEQ ID NO: 173917 - DNA, 4422 bp, Artificial Sequence
  derived and/or modified sequence
gtggccataatagcaggcaactttgagctggcagaatacatcaagaaccacaaggaaacagacattgtgcccttccgagaggccccggcgtactccaaccgccggcggcggccccccaacacgctggccgccccccgggtcctgctgcgctccaacagtgacaacaacctcaatgccagcgctcccgactgggccgtctgctccacggccacctcgcaccgcagcctgtcaccccagctgctgcagcagatgcccagcaagcccgagggggccgcgaagaccattgggagctacgtgcccgggccccgcagccggtccccatcgctcaacaggctgggcggcgcaggcgaggacggcaagaggccgcagcctctctggcatgtcgggtcgccttttgctcttggtgccaacaaggactcactctcggccttcgagtacccggggcccaagcggaagctctacagtgccgtgcccgggaggctcttcgtcgctgtcaagccataccaaccccaagtggacggcgagatcccccttcaccgcggtgacagggtcaaagttctgagcatcggtgaagggggcttctgggaaggcagcgcccgcggccacatcggatggtttccggcggagtgcgtggaggaggtccagtgtaagcccagggacagccaggcagaaacccgcgctgaccgcagcaagaagcttttcaggcactacaccgtgggctcctatgacagcttcgacacttccagtgactgcattattgaggagaagacggtggtcctgcagaaaaaagacaatgagggctttggattcgtgcttcgaggggccaaagctgacacacccattgaagaattcacaccaacaccggctttcccagccctacagtacctggagtccgtggatgaaggtggggtggcgtggcaagccggactaaggaccggggacttcttgattgaggttaacaatgagaatgttgtcaaagtcggccacaggcaggtggtgaacatgatccggcagggagggaatcacctggtccttaaggtggtcacggtgaccaggaatctggaccccgacgacaccgccaggaagaaagctcccccgcctccaaagcgggcaccgaccacagccctcaccctgcgctccaagtccatgacctcggagctggaggagctcgtggataaagataaacccgaggagatagtcccggcctccaagccctcccgcgctgctgagaacatggctgtggaaccgagggtggcgaccatcaagcagcggcccagcagccggtgcttcccggcgggctcagacatgaactctgtgtacgaacgccaaggaatcgccgtgatgacgcccactgttcctgggagcccaaaagccccgtttctgggcatccctcgaggtacgatgcgaaggcagaaatcaatagacagcagaatctttctatcaggaataacagaggaagagcggcagtttctggctcctccaatgctgaagttcaccagaagcctgtccatgccggacacctctgaggacatcccccctccaccgcagtctgtgcccccgtccccaccaccaccttccccaaccacttacaactgccccaagtccccaactccaagagtctacgggacgattaagcctgcgttcaatcagaattctgccgccaaggtgtcccccgccaccaggtccgacaccgtggccaccatgatgagggagaaggggatgtacttcaggagagagctggaccgctactccttggactctgaagacctctacagtcggaatgccggcccgcaagccaacttccgcaacaagagaggccagatgccagaaaacccatactcagaggtggggaagatcgccagcaaagccgtctacgtccccgccaagcccgccaggcggaaggggatgctggtgaagcagtccaacgtggaggacagccccgagaagacgtgctccatccctatcccgaccatcatcgtgaaggagccgtccaccagcagcagcggcaagagcagccagggcagcagcatggagatcgacccccaggccccggagccaccgagccagctgcggcctgacgaaagcctgaccgtcagcagcccctttgccgccgccatcgccggagccgtccgcgaccgtgagaagcggctggaagccaggaggaactccccggccttcctctccacagacctgggggatgaggatgtgggcctggggccacccgcccccaggacgcggccctccatgttccccgaggagggggattttgctgacgaggacagcgctgagcagctgtcatcccccatgccgagtgccacgcccagggagcccgaaaaccatttcgtgggtggcgccgaggccagtgctccgggtgaggctgggaggccgctgaattccacgtccaaagcccaggggcccgagagcagcccagcagtgccctccgcgagcagcggcacagccggccccgggaattatgtccacccactcacagggcggctgcttgatcccagctccccgctggccctggcactctccgcaagggaccgagccatgaaggagtctcaacagggacccaaaggggaggcccccaaggccgacctcaacaaacctctttacattgataccaaaatgcggcccagcctggatgccggcttccctacggtcaccaggcagaacacccggggacccctgaggcggcaggagacggagaacaagtacgagaccgacctgggccgagaccggaaaggcgatgacaagaagaacatgctgatcgacatcatggacacgtcccagcagaagtcggctggcctgctgatggtgcacaccgtggacgccactaagctggacaacgccctgcaggaagaggacgagaaggcagaggtggagatgaagccagacagctcgccgtccgaggtgccagaaggtgtttccgaaaccgaaggtgctttacagatctccgctgcccccgagcccaccaccgtgcccggcagaaccatcgtcgcggtgggctccatggaagaggcggtgattttgccattccgcatccctcctccccctctggcatccgtggacttggatgaggattttatttttacagagccattgcctcctcccctggaatttgcaaatagttttgatatccccgatgaccgggcagcttctgtcccggctctctcagacttagtgaagcagaagaaaagcgacacccctcagtccccttcgttgaactccagccaaccaaccaactctgcagacagcaagaagccagccagtctttcaaactgtctgcctgcctcattcctgccaccccctgaaagctttgacgccgtcgccgactctgggatcgaggaggtggacagccggagtagcagcgaccaccacctcgagacgaccagcactatctccaccgtgtctagcatctccaccctgtcttccgaaggtggagagaatgtggacacctgcacagtctatgcagatgggcaagcatttatggttgacaaacccccagtacctcctaagccaaaaatgaagcccatcattcacaaaagcaatgcactttatcaagacgcgctcgtggaagaagatgtagatagctttgttatccccccgcccgctcccccgcccccgccgggcagtgcccagcctgggatggccaaggttctccagccaaggacctccaagttgtggggcgacgtcacagagatcaaaagcccgattctctcaggcccaaaggcaaacgttattagtgaattgaactctatcctacagcaaatgaaccgagagaaattggcaaagccgggggaaggactggattcaccaatgggagccaagtccgccagcctcgctccaagaagcccggagatcatgagcaccatctcaggtacacggagcacgacggtcaccttcactgttcgccccggcacctcccagcccatcaccctgcagagccggccccccgactatgaaagcaggacctcaggaacaagacgtgccccaagccctgtggtctcgccaacagagatgaacaaagagaccctgcccgcccccctgtctgctgccaccgcctctccttctcccgctctctcagatgtctttagccttccaagccagcccccttctggggatctatttggcttgaacccagcgggacgcagtaggtcgccatccccctcgatactgcaacagccaatctcaaataagccttttacaactaaacctgtccacctgtggactaaaccagatgtggccgattggctggaaagtctaaacttgggtgaacataaagaggccttcatggacaatgagatcgatggcagtcacttaccaaacctgcagaaggaggacctcatcgatcttggggtaactcgagtcgggcacagaatgaacatagaaagggctttgaaacagctgctggacagataa

SEQ ID NO: 173918 - DNA, 8987 bp, Artificial Sequence
  derived and/or modified sequence
atgccgcgcagcccaacatccagcgaggacgagatggcccagagcttctccgactactccgtggggtcggagtcagacagctccaaagaagagaccatctatgacacgatccgggccactgcggagaagccgggcggtgccaggacggaggagagccagggcaacacgctggtgatccgcgtggtcatccatgacctgcagcagacgaaatgcattcgatttaacccggatgccacagtgtgggttgcaaagcagcggatcctgtgtacattaacccagagtttgaaagatgtcctgaactacggcctgttccagccggccagcaatgggcgtgacggcaagttcctggatgaggagcggctcctgcgcgagtacccacagcccgtgggtgagggcgttccttccctggagtttcgatacaagaagcgggtgtataaacaagccagtctcgatgagaaacagttggccaagctccacacgaagaccaatctgaagaaatgcatggatcacattcagcatcgcttggtggagaagatcaccaagatgctggaccgaggcctggatcccaatttccacgacccggagaccggagagacccccctgaccttagccgctcagctggacgactctgtggaggtcatcaaagctctcaaaaatggtggagctcacctggacttccgtgccaaagatgggatgaccgccctacacaaagctgcccgagcgaggaaccaagttgccctgaagacccttttagagcttggtgcatccccagattataaagacagttacggcctcaccccgctgtatcacacagccatcgtcggaggtgatccctactgctgcgagcttctcctgcacgaacacgccactgtgtgctgcaaagatgagaacggctggcacgagatccaccagtctaggtgctggggacacatcagtgagccacaccacactctgctctctggaagtgcacgaagtcaacaaagccgaagtgcttcctctgcactccatgtctgtgctatgtattcatctttttcctgtgtcagaatctcgttgctttttcatggccgaataactgaattaaaacagtacaaaaagagcacccccttccaggtggccataatagcaggcaactttgagctggcagaatacatcaagaaccacaaggaaacagacattgtgcccttccgagaggccccggcgtactccaaccgccggcggcggccccccaacacgctggccgccccccgggtcctgctgcgctccaacagtgacaacaacctcaatgccagcgctcccgactgggccgtctgctccacggccacctcgcaccgcagcctgtcaccccagctgctgcagcagatgcccagcaagcccgagggggccgcgaagaccattgggagctacgtgcccgggccccgcagccggtccccatcgctcaacaggctgggcggcgcaggcgaggacggcaagaggccgcagcctctctggcatgtcgggtcgccttttgctcttggtgccaacaaggactcactctcggccttcgagtacccggggcccaagcggaagctctacagtgccgtgcccgggaggctcttcgtcgctgtcaagccataccaaccccaagtggacggcgagatcccccttcaccgcggtgacagggtcaaagttctgagcatcggtgaagggggcttctgggaaggcagcgcccgcggccacatcggatggtttccggcggagtgcgtggaggaggtccagtgtaagcccagggacagccaggcagaaacccgcgctgaccgcagcaagaagcttttcaggcactacaccgtgggctcctatgacagcttcgacacttccagtgactgcattattgaggagaagacggtggtcctgcagaaaaaagacaatgagggctttggattcgtgcttcgaggggccaaagctgacacacccattgaagaattcacaccaacaccggctttcccagccctacagtacctggagtccgtggatgaaggtggggtggcgtggcaagccggactaaggaccggggacttcttgattgaggttaacaatgagaatgttgtcaaagtcggccacaggcaggtggtgaacatgatccggcagggagggaatcacctggtccttaaggtggtcacggtgaccaggaatctggaccccgacgacaccgccaggaagaaagctcccccgcctccaaagcgggcaccgaccacagccctcaccctgcgctccaagtccatgacctcggagctggaggagctcgtggataaaggggttattaggaaggtatcagataaacccgaggagatagtcccggcctccaagccctcccgcgctgctgagaacatggctgtggaaccgagggtggcgaccatcaagcagcggcccagcagccggtgcttcccggcgggctcagacatgaactctgtgtacgaacgccaaggaatcgccgtgatgacgcccactgttcctgggagcccaaaagccccgtttctgggcatccctcgaggtacgatgcgaaggcagaaatcaatagacagcagaatctttctatcaggaataacagaggaagagcggcagtttctggctcctccaatgctgaagttcaccagaagcctgtccatgccggacacctctgaggacatcccccctccaccgcagtctgtgcccccgtccccaccaccaccttccccaaccacttacaactgccccaagtccccaactccaagagtctacgggacgattaagcctgcgttcaatcagaattctgccgccaaggtgtcccccgccaccaggtccgacaccgtggccaccatgatgagggagaaggggatgtacttcaggagagagctggaccgctactccttggactctgaagacctctacagtcggaatgccggcccgcaagccaacttccgcaacaagagaggccagatgccagaaaacccatactcagaggtggggaagatcgccagcaaagccgtctacgtccccgccaagcccgccaggcggaaggggatgctggtgaagcagtccaacgtggaggacagccccgagaagacgtgctccatccctatcccgaccatcatcgtgaaggagccgtccaccagcagcagcggcaagagcagccagggcagcagcatggagatcgacccccaggccccggagccaccgagccagctgcggcctgacgaaagcctgaccgtcagcagcccctttgccgccgccatcgccggagccgtccgcgaccgtgagaagcggctggaagccaggaggaactccccggccttcctctccacagacctgggggatgaggatgtgggcctggggccacccgcccccaggacgcggccctccatgttccccgaggagggggattttgctgacgaggacagcgctgagcagctgtcatcccccatgccgagtgccacgcccagggagcccgaaaaccatttcgtgggtggcgccgaggccagtgctccgggtgaggctgggaggccgctgaattccacgtccaaagcccaggggcccgagagcagcccagcagtgccctccgcgagcagcggcacagccggccccgggaattatgtccacccactcacagggcggctgcttgatcccagctccccgctggccctggcactctccgcaagggaccgagccatgaaggagtctcaacagggacccaaaggggaggcccccaaggccgacctcaacaaacctctttacattgataccaaaatgcggcccagcctggatgccggcttccctacggtcaccaggcagaacacccggggacccctgaggcggcaggagacggagaacaagtacgagaccgacctgggccgagaccggaaaggcgatgacaagaagaacatgctgatcgacatcatggacacgtcccagcagaagtcggctggcctgctgatggtgcacaccgtggacgccactaagctggacaacgccctgcaggaagaggacgagaaggcagaggtggagatgaagccagacagctcgccgtccgaggtgccagaaggtgtttccgaaaccgaaggtgctttacagatctccgctgcccccgagcccaccaccgtgcccggcagaaccatcgtcgcggtgggctccatggaagaggcggtgattttgccattccgcatccctcctccccctctggcatccgtggacttggatgaggattttatttttacagagccattgcctcctcccctggaatttgcaaatagttttgatatccccgatgaccgggcagcttctgtcccggctctctcagacttagtgaagcagaagaaaagcgacacccctcagtccccttcgttgaactccagccaaccaaccaactctgcagacagcaagaagccagccagtctttcaaactgtctgcctgcctcattcctgccaccccctgaaagctttgacgccgtcgccgactctgggatcgaggaggtggacagccggagtagcagcgaccaccacctcgagacgaccagcactatctccaccgtgtctagcatctccaccctgtcttccgaaggtggagagaatgtggacacctgcacagtctatgcagatgggcaagcatttatggttgacaaacccccagtacctcctaagccaaaaatgaagcccatcattcacaaaagcaatgcactttatcaagacgcgctcgtggaagaagatgtagatagctttgttatccccccgcccgctcccccgcccccgccgggcagtgcccagcctgggatggccaaggttctccagccaaggacctccaagttgtggggcgacgtcacagagatcaaaagcccgattctctcaggcccaaaggcaaacgttattagtgaattgaactctatcctacagcaaatgaaccgagagaaattggcaaagccgggggaaggactggattcaccaatgggagccaagtccgccagcctcgctccaagaagcccggagatcatgagcaccatctcaggtacacggagcacgacggtcaccttcactgttcgccccggcacctcccagcccatcaccctgcagagccggccccccgactatgaaagcaggacctcaggaacaagacgtgccccaagccctgtggtctcgccaacagagatgaacaaagagaccctgcccgcccccctgtctgctgccaccgcctctccttctcccgctctctcagatgtctttagccttccaagccagcccccttctggggatctatttggcttgaacccagcgggacgcagtaggtcgccatccccctcgatactgcaacagccaatctcaaataagccttttacaactaaacctgtccacctgtggactaaaccagatgtggccgattggctggaaagtctaaacttgggtgaacataaagaggccttcatggacaatgagatcgatggcagtcacttaccaaacctgcagaaggaggacctcatcgatcttggggtaactcgagtcgggcacagaatgaacatagaaagggctttgaaacagctgctggacagataaggacggctgctctccacctcgcagactgctcttgttataagtagagatgggctcgtgctgaaacatctgaatgccaagcgaagtctgtgagcatcaaccccactccatgggtttgtctcctggtacccaaagaaatactgagttgtgtccacaacatggctgggtcttcagacccctggctcaccatgtgggtgtcttgggcagtttctatcacacatgggacaaggggagggagtttttctaacatggaaaaagattctcagcctgccgcccagcatgcaggtggcctcgctttgccgggtccgagaggctccccgtcaattttgcacgggatcctagctcttgtaggcagacaccagtgcactctagatacctcctgagacctccgtcctctgctttccgggcagctctcaccaccccaggccccggcatgaggcctttcctcagtcctgtggcctctcagaggacacctgatgctcacctgcccctctttctcctgcacttggcttgcagtgagatgctcccagatgcatttgtccagtgccccatcatgggcctgaaaggcagagaaactttttcctacacagattcttttccccatctcctcctgtggtttgcatccatggctctttggccatgaggttcctggcagtgctgggagtttggatgggatcgtgcccagctttgcttagctttctttatttctgcaaatctgttagcataattccaaggtggccaagcagatgtcacatggagttagtcaaagcacaaagtcacgattccacaatggaggggagacctggccaagggagccagccagcgtgcaactgcccaagctccaggtctccaggacaagagcagttgtctgccatgagcacccatccaggatggagaataagggcttctctgcctctcagaattctttttaattgaagatgtcttgagctctgcaaagatcagagcaggtgagcatccactttgacatgaaggacaagaagacgcatggctcatggcgggcacatgcggctgccagtgagacagcgtctcctctgggagctgggcgggcacagcatcctcagttctgtgcccagccaagggtgagcatctctgctgagacagtccttttgctctcggaggccagggaagatggtacttagaggcttttcccctatcgctctgggtgtctaggaatcccaccagcttgtcttaacagtacaacagcttctttgaggacccagtgggtatggagtatagacagaacccagggttgagaacagaaggtgggcggcaggatcagagtgaaagcagaggcgtgaggagaggaaagcagggaggtctcctgggctgccaggtcagcctctctggcaaggctttcttgagccccgcccctttctttccccggagtccctccaccccataacaatacctcgaatttccaaaagaggtcaccagatgcacatgggccgcaaaacacacagtcaggcttccagcacattctcccccatttggaggatactcgaatgtcaggtttttggttttattattatttcagaactagctcagcccatctctaattataaaacatggttttgttttttttttttcctttttttcttgattaggtctggaacagctctagaatgaacacataaaatttagcaatttaaaatctttctttactgcaagtttaaatagttgtacagatagtttataagcacaatattttaagaaaaaaaagtggctggtctactaggcagcctttgtgccacttcagtgctagaaagttaaagaaaaaaaaacttttgtgatttaataatactatttctgtggaataattataaaagtatgacctttttaaatcaaccttatttggatgcatctgaaccagcagagctgtgttatattttctatctttgctagaacttcgtcattgaaggacaatttcttcaaagtggttacaattcataatgcagcagtttctccaaaaacaaaaacaaaacacacaccacacacacgcgcttttccagtcacacacccctgatgttggaaccaagtttttggaccttctgttccaaaaccttttgcaggtcaatctttgtatttgaaatgatccaatccaacttgaagtcaattgaatattaaggcgctttacttccgtgtgctttcagtttttccatcatgagatgaatgagcattactctagataaatttcaagacaggatactacaggtggcctgctgaggctgccccatattttagaaaatgtaaaaatggtggtttggccattaatttgtcttccatttgatgataccgcaaaattccgtgagtccattcctttggcatggcactttccctgggcctacagttggtattacctctgtgctcagtgccaggcaaaacactagctcaaaggagagtcaaggaaaccgctggcagacgataaccagtcgaaactcgtgacttcggtttgttgaactttggcagccagttggtgagggccagatgttattccctttcttaaagatactccaagccacatgccactaaccacaagcaagctggctgcaagactaaagagctgataacatagtttatttttacactgtcttattatagagaagtaatagacctatcagaacctgcactgaccaacaaataaacacatgttgccaagatgaatcggtctctatctctatctgcttattttggtactgaaagcaatagttcctcattcaaatcaccacccactgttctccccctttgggacatgttaggacgaggccctattccatgcccctctttaatggtggaacaaatgttaaactgctcatctaaagatcatgttgatattattccaggttttaagatcaacttttgttacatactgtaatttaaataaactgcatttacatgcctagtttctgtaatattgtgtatacaaaacccaaatctctcaaaatgtaaattatgtatacctgccaagataccttttccagggtgtctgcgcacattttaagttaattcacataatataaaaattactcaatgtgactgttgatttgctgaactttacatatcacaaagtgaattatttgtgatactttagttaataaaatggtaaatttttttctcagttattgaacaagcaagcattatccagttgatctggcaatgactttttgtgtgtgggccacaatattgattttcccattaacaatttttttttgttttttaaatactaatatgtttcacactatagtttgtgtaacaacacgtgttcgcattatctatgttgctgttacttttgtgcttttattctttttagactttataaaaaaaaaaaaaagctcctgtaatttgcactttctcccaatccttaaatctcttgtatggcaaccaaaattactgtaaaaaaataaatatactattgcact

SEQ ID NO: 173919 - DNA, 4422 bp, Artificial Sequence
  derived and/or modified sequence
gtggccatcatcgccggcaacttcgagctggccgagtacatcaagaaccacaaggagaccgacatcgtgcccttcagagaggcccccgcctacagcaacagaagaagaagaccccccaacaccctggccgcccccagagtgctgctgagaagcaacagcgacaacaacctgaacgccagcgcccccgactgggccgtgtgcagcaccgccaccagccacagaagcctgagcccccagctgctgcagcagatgcccagcaagcccgagggcgccgccaagaccatcggcagctacgtgcccggccccagaagcagaagccccagcctgaacagactgggcggcgccggcgaggacggcaagagaccccagcccctgtggcacgtgggcagccccttcgccctgggcgccaacaaggacagcctgagcgccttcgagtaccccggccccaagagaaagctgtacagcgccgtgcccggcagactgttcgtggccgtgaagccctaccagccccaggtggacggcgagatccccctgcacagaggcgacagagtgaaggtgctgagcatcggcgagggcggcttctgggagggcagcgccagaggccacatcggctggttccccgccgagtgcgtggaggaggtgcagtgcaagcccagagacagccaggccgagaccagagccgacagaagcaagaagctgttcagacactacaccgtgggcagctacgacagcttcgacaccagcagcgactgcatcatcgaggagaagaccgtggtgctgcagaagaaggacaacgagggcttcggcttcgtgctgagaggcgccaaggccgacacccccatcgaggagttcacccccacccccgccttccccgccctgcagtacctggagagcgtggacgagggcggcgtggcctggcaggccggcctgagaaccggcgacttcctgatcgaggtgaacaacgagaacgtggtgaaggtgggccacagacaggtggtgaacatgatcagacagggcggcaaccacctggtgctgaaggtggtgaccgtgaccagaaacctggaccccgacgacaccgccagaaagaaggccccccccccccccaagagagcccccaccaccgccctgaccctgagaagcaagagcatgaccagcgagctggaggagctggtggacaaggacaagcccgaggagatcgtgcccgccagcaagcccagcagagccgccgagaacatggccgtggagcccagagtggccaccatcaagcagagacccagcagcagatgcttccccgccggcagcgacatgaacagcgtgtacgagagacagggcatcgccgtgatgacccccaccgtgcccggcagccccaaggcccccttcctgggcatccccagaggcaccatgagaagacagaagagcatcgacagcagaatcttcctgagcggcatcaccgaggaggagagacagttcctggccccccccatgctgaagttcaccagaagcctgagcatgcccgacaccagcgaggacatccccccccccccccagagcgtgccccccagcccccccccccccagccccaccacctacaactgccccaagagccccacccccagagtgtacggcaccatcaagcccgccttcaaccagaacagcgccgccaaggtgagccccgccaccagaagcgacaccgtggccaccatgatgagagagaagggcatgtacttcagaagagagctggacagatacagcctggacagcgaggacctgtacagcagaaacgccggcccccaggccaacttcagaaacaagagaggccagatgcccgagaacccctacagcgaggtgggcaagatcgccagcaaggccgtgtacgtgcccgccaagcccgccagaagaaagggcatgctggtgaagcagagcaacgtggaggacagccccgagaagacctgcagcatccccatccccaccatcatcgtgaaggagcccagcaccagcagcagcggcaagagcagccagggcagcagcatggagatcgacccccaggcccccgagccccccagccagctgagacccgacgagagcctgaccgtgagcagccccttcgccgccgccatcgccggcgccgtgagagacagagagaagagactggaggccagaagaaacagccccgccttcctgagcaccgacctgggcgacgaggacgtgggcctgggcccccccgcccccagaaccagacccagcatgttccccgaggagggcgacttcgccgacgaggacagcgccgagcagctgagcagccccatgcccagcgccacccccagagagcccgagaaccacttcgtgggcggcgccgaggccagcgcccccggcgaggccggcagacccctgaacagcaccagcaaggcccagggccccgagagcagccccgccgtgcccagcgccagcagcggcaccgccggccccggcaactacgtgcaccccctgaccggcagactgctggaccccagcagccccctggccctggccctgagcgccagagacagagccatgaaggagagccagcagggccccaagggcgaggcccccaaggccgacctgaacaagcccctgtacatcgacaccaagatgagacccagcctggacgccggcttccccaccgtgaccagacagaacaccagaggccccctgagaagacaggagaccgagaacaagtacgagaccgacctgggcagagacagaaagggcgacgacaagaagaacatgctgatcgacatcatggacaccagccagcagaagagcgccggcctgctgatggtgcacaccgtggacgccaccaagctggacaacgccctgcaggaggaggacgagaaggccgaggtggagatgaagcccgacagcagccccagcgaggtgcccgagggcgtgagcgagaccgagggcgccctgcagatcagcgccgcccccgagcccaccaccgtgcccggcagaaccatcgtggccgtgggcagcatggaggaggccgtgatcctgcccttcagaatcccccccccccccctggccagcgtggacctggacgaggacttcatcttcaccgagcccctgcccccccccctggagttcgccaacagcttcgacatccccgacgacagagccgccagcgtgcccgccctgagcgacctggtgaagcagaagaagagcgacaccccccagagccccagcctgaacagcagccagcccaccaacagcgccgacagcaagaagcccgccagcctgagcaactgcctgcccgccagcttcctgcccccccccgagagcttcgacgccgtggccgacagcggcatcgaggaggtggacagcagaagcagcagcgaccaccacctggagaccaccagcaccatcagcaccgtgagcagcatcagcaccctgagcagcgagggcggcgagaacgtggacacctgcaccgtgtacgccgacggccaggccttcatggtggacaagccccccgtgccccccaagcccaagatgaagcccatcatccacaagagcaacgccctgtaccaggacgccctggtggaggaggacgtggacagcttcgtgatccccccccccgcccccccccccccccccggcagcgcccagcccggcatggccaaggtgctgcagcccagaaccagcaagctgtggggcgacgtgaccgagatcaagagccccatcctgagcggccccaaggccaacgtgatcagcgagctgaacagcatcctgcagcagatgaacagagagaagctggccaagcccggcgagggcctggacagccccatgggcgccaagagcgccagcctggcccccagaagccccgagatcatgagcaccatcagcggcaccagaagcaccaccgtgaccttcaccgtgagacccggcaccagccagcccatcaccctgcagagcagaccccccgactacgagagcagaaccagcggcaccagaagagcccccagccccgtggtgagccccaccgagatgaacaaggagaccctgcccgcccccctgagcgccgccaccgccagccccagccccgccctgagcgacgtgttcagcctgcccagccagccccccagcggcgacctgttcggcctgaaccccgccggcagaagcagaagccccagccccagcatcctgcagcagcccatcagcaacaagcccttcaccaccaagcccgtgcacctgtggaccaagcccgacgtggccgactggctggagagcctgaacctgggcgagcacaaggaggccttcatggacaacgagatcgacggcagccacctgcccaacctgcagaaggaggacctgatcgacctgggcgtgaccagagtgggccacagaatgaacatcgagagagccctgaagcagctgctggacagatag

SEQ ID NO: 173920 - DNA, 5553 bp, Artificial Sequence
  derived and/or modified sequence
atgcccagaagccccaccagcagcgaggacgagatggcccagagcttcagcgactacagcgtgggcagcgagagcgacagcagcaaggaggagaccatctacgacaccatcagagccaccgccgagaagcccggcggcgccagaaccgaggagagccagggcaacaccctggtgatcagagtggtgatccacgacctgcagcagaccaagtgcatcagattcaaccccgacgccaccgtgtgggtggccaagcagagaatcctgtgcaccctgacccagagcctgaaggacgtgctgaactacggcctgttccagcccgccagcaacggcagagacggcaagttcctggacgaggagagactgctgagagagtacccccagcccgtgggcgagggcgtgcccagcctggagttcagatacaagaagagagtgtacaagcaggccagcctggacgagaagcagctggccaagctgcacaccaagaccaacctgaagaagtgcatggaccacatccagcacagactggtggagaagatcaccaagatgctggacagaggcctggaccccaacttccacgaccccgagaccggcgagacccccctgaccctggccgcccagctggacgacagcgtggaggtgatcaaggccctgaagaacggcggcgcccacctggacttcagagccaaggacggcatgaccgccctgcacaaggccgccagagccagaaaccaggtggccctgaagaccctgctggagctgggcgccagccccgactacaaggacagctacggcctgacccccctgtaccacaccgccatcgtgggcggcgacccctactgctgcgagctgctgctgcacgagcacgccaccgtgtgctgcaaggacgagaacggctggcacgagatccaccagagcagatgctggggccacatcagcgagccccaccacaccctgctgagcggcagcgccagaagccagcagagcagaagcgccagcagcgccctgcacgtgtgcgccatgtacagcagcttcagctgcgtgagaatcagcctgctgttccacggcagaatcaccgagctgaagcagtacaagaagagcacccccttccaggtggccatcatcgccggcaacttcgagctggccgagtacatcaagaaccacaaggagaccgacatcgtgcccttcagagaggcccccgcctacagcaacagaagaagaagaccccccaacaccctggccgcccccagagtgctgctgagaagcaacagcgacaacaacctgaacgccagcgcccccgactgggccgtgtgcagcaccgccaccagccacagaagcctgagcccccagctgctgcagcagatgcccagcaagcccgagggcgccgccaagaccatcggcagctacgtgcccggccccagaagcagaagccccagcctgaacagactgggcggcgccggcgaggacggcaagagaccccagcccctgtggcacgtgggcagccccttcgccctgggcgccaacaaggacagcctgagcgccttcgagtaccccggccccaagagaaagctgtacagcgccgtgcccggcagactgttcgtggccgtgaagccctaccagccccaggtggacggcgagatccccctgcacagaggcgacagagtgaaggtgctgagcatcggcgagggcggcttctgggagggcagcgccagaggccacatcggctggttccccgccgagtgcgtggaggaggtgcagtgcaagcccagagacagccaggccgagaccagagccgacagaagcaagaagctgttcagacactacaccgtgggcagctacgacagcttcgacaccagcagcgactgcatcatcgaggagaagaccgtggtgctgcagaagaaggacaacgagggcttcggcttcgtgctgagaggcgccaaggccgacacccccatcgaggagttcacccccacccccgccttccccgccctgcagtacctggagagcgtggacgagggcggcgtggcctggcaggccggcctgagaaccggcgacttcctgatcgaggtgaacaacgagaacgtggtgaaggtgggccacagacaggtggtgaacatgatcagacagggcggcaaccacctggtgctgaaggtggtgaccgtgaccagaaacctggaccccgacgacaccgccagaaagaaggccccccccccccccaagagagcccccaccaccgccctgaccctgagaagcaagagcatgaccagcgagctggaggagctggtggacaagggcgtgatcagaaaggtgagcgacaagcccgaggagatcgtgcccgccagcaagcccagcagagccgccgagaacatggccgtggagcccagagtggccaccatcaagcagagacccagcagcagatgcttccccgccggcagcgacatgaacagcgtgtacgagagacagggcatcgccgtgatgacccccaccgtgcccggcagccccaaggcccccttcctgggcatccccagaggcaccatgagaagacagaagagcatcgacagcagaatcttcctgagcggcatcaccgaggaggagagacagttcctggccccccccatgctgaagttcaccagaagcctgagcatgcccgacaccagcgaggacatccccccccccccccagagcgtgccccccagcccccccccccccagccccaccacctacaactgccccaagagccccacccccagagtgtacggcaccatcaagcccgccttcaaccagaacagcgccgccaaggtgagccccgccaccagaagcgacaccgtggccaccatgatgagagagaagggcatgtacttcagaagagagctggacagatacagcctggacagcgaggacctgtacagcagaaacgccggcccccaggccaacttcagaaacaagagaggccagatgcccgagaacccctacagcgaggtgggcaagatcgccagcaaggccgtgtacgtgcccgccaagcccgccagaagaaagggcatgctggtgaagcagagcaacgtggaggacagccccgagaagacctgcagcatccccatccccaccatcatcgtgaaggagcccagcaccagcagcagcggcaagagcagccagggcagcagcatggagatcgacccccaggcccccgagccccccagccagctgagacccgacgagagcctgaccgtgagcagccccttcgccgccgccatcgccggcgccgtgagagacagagagaagagactggaggccagaagaaacagccccgccttcctgagcaccgacctgggcgacgaggacgtgggcctgggcccccccgcccccagaaccagacccagcatgttccccgaggagggcgacttcgccgacgaggacagcgccgagcagctgagcagccccatgcccagcgccacccccagagagcccgagaaccacttcgtgggcggcgccgaggccagcgcccccggcgaggccggcagacccctgaacagcaccagcaaggcccagggccccgagagcagccccgccgtgcccagcgccagcagcggcaccgccggccccggcaactacgtgcaccccctgaccggcagactgctggaccccagcagccccctggccctggccctgagcgccagagacagagccatgaaggagagccagcagggccccaagggcgaggcccccaaggccgacctgaacaagcccctgtacatcgacaccaagatgagacccagcctggacgccggcttccccaccgtgaccagacagaacaccagaggccccctgagaagacaggagaccgagaacaagtacgagaccgacctgggcagagacagaaagggcgacgacaagaagaacatgctgatcgacatcatggacaccagccagcagaagagcgccggcctgctgatggtgcacaccgtggacgccaccaagctggacaacgccctgcaggaggaggacgagaaggccgaggtggagatgaagcccgacagcagccccagcgaggtgcccgagggcgtgagcgagaccgagggcgccctgcagatcagcgccgcccccgagcccaccaccgtgcccggcagaaccatcgtggccgtgggcagcatggaggaggccgtgatcctgcccttcagaatcccccccccccccctggccagcgtggacctggacgaggacttcatcttcaccgagcccctgcccccccccctggagttcgccaacagcttcgacatccccgacgacagagccgccagcgtgcccgccctgagcgacctggtgaagcagaagaagagcgacaccccccagagccccagcctgaacagcagccagcccaccaacagcgccgacagcaagaagcccgccagcctgagcaactgcctgcccgccagcttcctgcccccccccgagagcttcgacgccgtggccgacagcggcatcgaggaggtggacagcagaagcagcagcgaccaccacctggagaccaccagcaccatcagcaccgtgagcagcatcagcaccctgagcagcgagggcggcgagaacgtggacacctgcaccgtgtacgccgacggccaggccttcatggtggacaagccccccgtgccccccaagcccaagatgaagcccatcatccacaagagcaacgccctgtaccaggacgccctggtggaggaggacgtggacagcttcgtgatccccccccccgcccccccccccccccccggcagcgcccagcccggcatggccaaggtgctgcagcccagaaccagcaagctgtggggcgacgtgaccgagatcaagagccccatcctgagcggccccaaggccaacgtgatcagcgagctgaacagcatcctgcagcagatgaacagagagaagctggccaagcccggcgagggcctggacagccccatgggcgccaagagcgccagcctggcccccagaagccccgagatcatgagcaccatcagcggcaccagaagcaccaccgtgaccttcaccgtgagacccggcaccagccagcccatcaccctgcagagcagaccccccgactacgagagcagaaccagcggcaccagaagagcccccagccccgtggtgagccccaccgagatgaacaaggagaccctgcccgcccccctgagcgccgccaccgccagccccagccccgccctgagcgacgtgttcagcctgcccagccagccccccagcggcgacctgttcggcctgaaccccgccggcagaagcagaagccccagccccagcatcctgcagcagcccatcagcaacaagcccttcaccaccaagcccgtgcacctgtggaccaagcccgacgtggccgactggctggagagcctgaacctgggcgagcacaaggaggccttcatggacaacgagatcgacggcagccacctgcccaacctgcagaaggaggacctgatcgacctgggcgtgaccagagtgggccacagaatgaacatcgagagagccctgaagcagctgctggacagatag

SEQ ID NO: 173921 - protein, 393 aa, Artificial Sequence
  derived and/or modified sequence
MGKSDFLTPKAIANRIKSKGLQKLRWYCQMCQKQCRDENGFKCHCMSESHQRQLLLASENPQQFMDYFSEEFRNDFLELLRRRFGTKRVHNNIVYNEYISHREHIHMNATQWETLTDFTKWLGREGLCKVDETPKGWYIQYIDRDPETIRRQLELEKKKKQDLDDEEKTAKFIEEQVRRGLEGKEQEVPTFTELSRENDEEKVTFNLSKGACSSSGATSSKSSTLGPSALKTIGSSASVKRKESSQSSTQSKEKKKKKSALDEIMEIEEEKKRTARTDYWLQPEIIVKIITKKLGEKYHKKKAIVKEVIDKYTAVVKMIDSGDKLKLDQTHLETVIPAPGKRILVLNGGYRGNEGTLESINEKTFSATIVIETGPLKGRRVEGIQYEDISKLA

SEQ ID NO: 173922 - DNA, 1182 bp, Artificial Sequence
  derived and/or modified sequence
atgggtaaaagtgacttcttaacacctaaggccattgctaatagaattaaatcaaaaggtttgcaaaagctcagatggtactgtcaaatgtgtcagaagcagtgtagagacgagaacggctttaaatgccattgtatgagcgagagccatcagcgccagctgctgctcgcctcagaaaacccccagcagttcatggattacttcagtgaggagttccgtaacgatttcctggagttgttgcgacgccggtttggaacgaagcgtgtgcacaacaacatcgtttacaacgagtatatctctcaccgggaacatatccatatgaacgcgacccagtgggaaacccttacagattttacaaaatggctcgggcgggagggactgtgcaaggtggatgagactcctaaagggtggtatatccagtacatcgacagggacccagaaacaattcgcaggcaactggaactagaaaagaaaaaaaaacaggacctggacgacgaggaaaagaccgctaagttcatcgaagagcaggtgaggagggggttagagggcaaagagcaggaggtgccaacctttacggagttgagccgcgagaatgatgaggagaaagtgacattcaatctgtcaaagggagcgtgtagttcatccggcgccacatcaagcaagtcctccacgctgggcccgtctgcgcttaaaaccatcgggtccagcgcttctgtgaagcggaaagagtcaagtcaatcttccacacaatctaaggagaagaagaaaaagaagagtgccctggacgagattatggagatcgaagaagaaaagaagcggactgctcgaactgattactggctgcagccagagattatagtgaaaataattacgaaaaagttgggagaaaaataccacaagaaaaaagccatcgtcaaggaagtgatcgacaaatacaccgccgtggttaagatgatcgattccggcgataagcttaaactggatcaaactcacctggaaactgtgatccctgccccgggcaaacgtattttagttctcaatggcgggtatagaggaaatgagggaaccttggagtcaataaatgagaaaacctttagcgccacgatcgtgatagaaacagggcctcttaaaggtagacgtgtcgaaggaatccagtatgaagacataagcaaactggcctag

SEQ ID NO: 173923 - DNA, 2081 bp, Artificial Sequence
  derived and/or modified sequence
ggctggctgagtactggggtccagaaagtgatcgctgccgtggtcgccatggggaagtcggattttcttactcccaaggctatcgccaacaggatcaagtccaaggggctgcagaagctacgctggtattgccagatgtgccagaagcagtgccgggacgagaatggctttaagtgtcattgtatgtccgaatctcatcagagacaactattgctggcttcagaaaatcctcagcagtttatggattatttttcagaggaattccgaaatgactttctagaacttctcaggagacgctttggcactaaaagggtccacaacaacattgtctacaacgaatacatcagccaccgagagcacatccacatgaatgccactcagtgggaaactctgactgattttactaagtggctgggcagagaaggcttgtgcaaagtggacgagacaccaaaaggctggtatattcagtacatagacagggacccagaaactatccgccggcaactggaactggagaaaaagaaaaagcaggaccttgatgatgaagaaaaaactgccaaatttattgaagagcaagtgagaagaggcctggaagggaaggaacaggaggtccctacttttacggaattaagcagagaaaatgatgaagagaaagtcacgtttaatttgagtaaaggagcatgtagctcatccggagcaacatcttccaagtcaagtactctgggaccgagtgcactgaagacgataggaagttcagcatcagtgaaacgaaaagaatcttcccagagctcaactcagtctaaagaaaagaagaaaaagaaatctgcactggatgaaatcatggagattgaagaggaaaagaaaagaactgcccgaacagactactggctacagcctgaaattattgtgaaaattataaccaagaaactgggagagaaatatcataagaaaaaggctattgttaaggaagtaattgacaaatatacagctgttgtgaagatgattgattctggagacaagctgaaacttgaccagactcatttagagacagtaattccagcaccaggaaaaagaattctagttttaaatggaggctacagaggaaatgaaggtaccctagaatccatcaatgagaagactttttcagctactatcgtcattgaaactggccctttaaaaggacgcagagttgaaggaattcaatatgaagacatttctaaacttgcctgagtttgaaaatttgttaacaatacattaaaatcttaaagcatcaaattggtgttcgccaaggcattatgagactctactgtgttagggtatattcttttgtataaaacaaacaggtttttgaaaatattactgtatagttgttcagctaaactttgagaagaatttaattatgtctcatgaggtatcaaactatgtaattttgtccttgttatttttgtttcctttgtaatttacttgatgagtttatatcttcattaaagaatgttattataaagtgttttatctatgacaatttagaatcatgtaattggaggaaatccttcatacactctatattttcagtagtagagtagtaaagttgaactctaagtgtgactaaattttaaatgtcaaactataaatatagaagcagctttattgtggtaataattcatataccatacagttcactcatttaaaatatacatacaattcagtggtttttagtatttttgcagaattgtgcagccatcaccactgtctgattttaaaacactttcataccccaaaatgaaaccctttaatagtcaatcgctatttttcccctctgccctagccctagacagccactaatgtactttctgtctctatggatttgccctttctggacatttcttataaatggaatcatataatatgtgatcttttatgactggcttcttacacttagcatcatgttttcaaggtttatccatgcagtagcatgtaggcgtgcttcatttgtttttatggctgcttaatattccactgtatggatgtaccgtattttgtttgtccattcatcagctgataaacatttagattgtttctac

SEQ ID NO: 173924 - DNA, 1182 bp, Artificial Sequence
  derived and/or modified sequence
atgggcaagagtgacttcctgacccccaaggccatcgccaaccgcatcaagagcaagggcctgcagaagctgcgctggtactgccagatgtgccagaagcagtgcagagatgaaaatggcttcaagtgccactgcatgtctgagagccaccagaggcagctgctgctggccagcgagaacccccagcagttcatggactacttcagcgaggagttcagaaatgacttcctggagctgctgcggcggcgcttcggcaccaagagggtgcacaacaacatcgtgtacaatgagtacatcagccaccgggagcacatccacatgaatgccacccagtgggagaccctgacagacttcaccaagtggctgggccgggagggcctgtgcaaggtggatgagacccccaagggctggtacatccagtacatcgaccgggaccctgagaccatccggcggcagctggagctggagaagaagaagaagcaggacctggatgatgaggagaagacagccaagttcatcgaggagcaggtgcggcggggcctggagggcaaggagcaggaggtgcccaccttcacagagctgagcagagaaaatgatgaggagaaggtgaccttcaacctgagcaaaggagcctgcagcagcagcggggccaccagcagcaagagcagcaccctgggccccagcgccctgaagaccatcggcagcagcgcctctgtgaagaggaaggagagcagccagagcagcacccagagcaaggagaagaagaagaagaagagcgccctggatgagatcatggagattgaggaggagaagaagaggacagccaggacagactactggctgcagcctgagatcatcgtgaagatcatcaccaagaagctgggggagaagtaccacaagaagaaggccatcgtgaaggaggtgattgacaagtacacagctgtggtgaagatgattgattctggggacaagctgaagctggaccagacccacctggagaccgtcatcccagcccctgggaagaggatcctggtgctgaatggaggctacagaggaaatgaaggcaccctggagagcatcaatgagaagaccttcagcgccaccatcgtgattgaaacaggccccctgaagggcagaagagtggagggcatccagtatgaggacatcagcaagctggcctag

SEQ ID NO: 173925 - DNA, 1182 bp, Artificial Sequence
  derived and/or modified sequence
atgggcaagagcgacttcctgacccccaaggccatcgccaaccggattaaaagtaaaggtctgcaaaagctaaggtggtactgccagatgtgccagaaacagtgcagagatgagaacggattcaagtgccactgcatgtccgaatcccatcagaggcaacttctgttagcaagcgaaaacccccagcagtttatggattacttttccgaggaattccgcaacgactttctggaactgctcaggaggcgtttcggaactaagcgggtgcataataatatcgtgtacaatgaatacatctctcatcgcgaacacatacacatgaacgccacacaatgggagaccctgaccgattttactaagtggctgggacgggagggcttgtgcaaggtcgacgaaaccccaaaaggctggtacatccagtacattgatagagaccccgagacgattcggaggcagctggaactggagaaaaagaagaagcaggacctggacgacgaggaaaagacggcaaagtttatagaggagcaggtgagaaggggactggaaggcaaggaacaggaggtacccactttcactgagctttcaagagagaatgatgaggagaaggtgactttcaaccttagtaaaggtgcctgcagtagctcgggcgccacctcttctaagtcaagcaccctgggtccctctgccctgaagaccattgggtcgagcgcatcggtaaagcggaaagaatccagccagtcttccacccagtcgaaagaaaaaaagaaaaaaaaaagcgccctcgatgaaataatggaaatagaggaagagaagaaacggaccgcgcgcactgattactggctccaacctgagatcattgtgaagattatcaccaaaaaactgggggagaaatatcataaaaaaaaggcgattgtcaaggaggtgatcgacaagtacaccgccgtagtgaagatgattgactccggggacaaattaaagttagaccagacacatctggaaacagtaataccggcgccggggaaacggattctagtcctgaacggaggatacaggggcaatgaggggacactggaatctattaacgagaagactttctctgccacaattgtcatagagaccggacccttgaagggccgcagagtcgagggcattcaatatgaggatataagcaagttagcatag

SEQ ID NO: 173926 - DNA, 1182 bp, Artificial Sequence
  derived and/or modified sequence
atggggaaaagcgactttctgacccctaaggccatcgctaacaggattaagtcgaaaggattgcagaagctgcgctggtactgccagatgtgtcagaaacagtgcagggacgagaacggtttcaagtgtcactgcatgagcgaaagccaccagcggcaactccttttggcgagcgaaaaccctcagcaatttatggactatttttcagaagaattccggaatgattttctggaattactgagaaggcggttcggtactaaaagggttcataacaacattgtgtataacgaatatatctcccaccgggaacatattcacatgaatgccacacaatgggagactctcaccgactttaccaaatggttgggaagagaaggactgtgcaaagtggatgagaccccgaagggttggtatatccagtacattgacagggaccctgaaaccatccgcagacaactggagttggagaagaagaaaaagcaagaccttgacgatgaggagaagactgctaagttcattgaagaacaagtgagacgcggtctcgaagggaaagaacaggaagttcccacatttaccgaattgtcacgcgaaaatgatgaggagaaggtcacctttaacctgtctaagggtgcatgctcatccagcggtgccacctcttctaagtcttctacactcggccctagcgccctgaagacaatcggaagtagcgccagtgtgaagagaaaggagtcttcgcaatctagtacccaaagcaaggagaagaagaaaaaaaaaagcgcactcgatgagattatggagatagaggaagagaagaagagaacagccaggacagattattggttgcaacccgagatcatcgtgaaaatcatcaccaaaaagctgggcgagaaatatcacaagaaaaaagctatcgtgaaagaggtgattgataagtacacagctgtggtaaaaatgattgactccggcgacaagctaaaactcgaccaaacacacctggagacagtgattcccgcacctgggaagagaatcctggttctaaatgggggttatcgaggcaatgagggaacactagagagcatcaatgagaaaacctttagcgccacaatagtgatcgagaccggcccacttaaggggaggcgcgtggagggcatccagtacgaggatattagcaagctggcctag

SEQ ID NO: 173927 - DNA, 1182 bp, Artificial Sequence
  derived and/or modified sequence
atgggcaagagcgacttcctgacccccaaggccatcgccaacagaatcaagagcaagggcctgcagaagctgagatggtactgccagatgtgccagaagcagtgcagagacgagaacggcttcaagtgccactgcatgagcgagagccaccagagacagctgctgctggccagcgagaacccccagcagttcatggactacttcagcgaggagttcagaaacgacttcctggagctgctgagaagaagattcggcaccaagagagtgcacaacaacatcgtgtacaacgagtacatcagccacagagagcacatccacatgaacgccacccagtgggagaccctgaccgacttcaccaagtggctgggcagagagggcctgtgcaaggtggacgagacccccaagggctggtacatccagtacatcgacagagaccccgagaccatcagaagacagctggagctggagaagaagaagaagcaggacctggacgacgaggagaagaccgccaagttcatcgaggagcaggtgagaagaggcctggagggcaaggagcaggaggtgcccaccttcaccgagctgagcagagagaacgacgaggagaaggtgaccttcaacctgagcaagggcgcctgcagcagcagcggcgccaccagcagcaagagcagcaccctgggccccagcgccctgaagaccatcggcagcagcgccagcgtgaagagaaaggagagcagccagagcagcacccagagcaaggagaagaagaagaagaagagcgccctggacgagatcatggagatcgaggaggagaagaagagaaccgccagaaccgactactggctgcagcccgagatcatcgtgaagatcatcaccaagaagctgggcgagaagtaccacaagaagaaggccatcgtgaaggaggtgatcgacaagtacaccgccgtggtgaagatgatcgacagcggcgacaagctgaagctggaccagacccacctggagaccgtgatccccgcccccggcaagagaatcctggtgctgaacggcggctacagaggcaacgagggcaccctggagagcatcaacgagaagaccttcagcgccaccatcgtgatcgagaccggccccctgaagggcagaagagtggagggcatccagtacgaggacatcagcaagctggcctag

SEQ ID NO: 173928 - protein, 304 aa, Artificial Sequence
  derived and/or modified sequence
MSLMVISMACVGFFWLQGAWPHEGFRRKPSLLAHPGRLVKSEETVILQCWSDVMFEHFLLHREGTFNDTLRLIGEHIDGVSKANFSIGRMRQDLAGTYRCYGSVPHSPYQFSAPSDPLDIVITGLYEKPSLSAQPGPTVLAGESVTLSCSSWSSYDMYHLSTEGEAHERRFSAGPKVNGTFQADFPLGPATQGGTYRCFGSFHDSPYEWSKSSDPLLVSVTGNPSNSWPSPTEPSSKTGNPRHLHVLIGTSVVKLPFTILLFFLLHRWCSDKKNASVMDQGPAGNRTVNREDSDEQDHQEVSYA

SEQ ID NO: 173929 - DNA, 1113 bp, Artificial Sequence
  derived and/or modified sequence
ccggcagcaccatgtcgctcatggtcatcagcatggcatgtgttgggttcttctggctgcagggggcctggccacatgagggattccgcagaaaaccttccctcctggcccacccaggtcgcctggtgaaatcagaagagacagtcatcctgcaatgttggtcagatgtcatgtttgagcacttccttctgcacagagaggggacgtttaacgacactttgcgcctcattggagagcacattgatggggtctccaaggccaacttctccatcggtcgcatgaggcaagacctggcagggacctacagatgctacggttctgttcctcactccccctatcagttttcagctcccagtgaccctctggacatcgtgatcacaggtctatatgagaaaccttctctctcagcccagccgggccccacggttctggcaggagagagcgtgaccttgtcctgcagctcctggagctcctatgacatgtaccatctatccacggagggggaggcccatgaacgtaggttctctgcagggcccaaggtcaacggaacattccaggccgactttcctctgggccctgccacccaaggaggaacctacagatgcttcggctctttccatgactctccctacgagtggtcaaagtcaagtgacccactgcttgtttctgtcacaggaaacccttcaaatagttggccttcacccactgaaccaagctccaaaaccggtaaccccagacacctacacgttctgattgggacctcagtggtcaaactccctttcaccatcctcctcttctttctccttcatcgctggtgctccgacaaaaaaaatgcatctgtaatggaccaagggcctgcggggaacagaacagtgaacagggaggattctgacgaacaggaccatcaggaggtgtcatacgcataattggatcactgtgttttcacacagagaaaaatcactcccccttctcagaggcccaagacacccccaacagatagcagcatgtacatagaacttccaaatgctgagtccagatccaaagctgtcttctgtccacgagcaccacagtcaggccttgaggggatcttctagggagacaacagccctgtct

SEQ ID NO: 173930 - protein, 304 aa, Artificial Sequence
  derived and/or modified sequence
MSLMVIIMACVGFFLLQGAWPQEGVHRKPSFLALPGHLVKSEETVILQCWSDVMFEHFLLHREGKFNNTLHLIGEHHDGVSKANFSIGPMMPVLAGTYRCYGSVPHSPYQLSAPSDPLDMVIIGLYEKPSLSAQPGPTVQAGENVTLSCSSRSSYDMYHLSREGEAHERRLPAVRSINGTFQADFPLGPATHGGTYRCFGSFRDAPYEWSNSSDPLLVSVTGNPSNSWPSPTEPSSKTGNPRHLHVLIGTSVVKIPFTILLFFLLHRWCSDKKNAAVMDQEPAGNRTVNSEDSDEQDHQEVSYA

SEQ ID NO: 173931 - protein, 250 aa, Artificial Sequence
  derived and/or modified sequence
MKLGLLCALLSLLAGHGWADTRAIGAEECRPNSQPWQAGLFHLTRLFCGATLISDRWLLTAAHCRKPYLWVRLGEHHLWKWEGPEQLFRVTDFFPHPGFNKDLSANDHNDDIMLIRLPRQARLSPAVQPLNLSQTCVSPGMQCLISGWGAVSSPKALFPVTLQCANISILENKLCHWAYPGHISDSMLCAGLWEGGRGSCQGDSGGPLVCNGTLAGVVSGGAEPCSRPRRPAVYTSVCHYLDWIQEIMEN

SEQ ID NO: 173932 - DNA, 753 bp, Artificial Sequence
  derived and/or modified sequence
atgaagctaggactactgtgtgctcttttatctctactggccggacacggatgggctgacaccagggcaattggtgccgaggagtgcaggccgaattctcagccctggcaagcaggtttgttccatctaacacggctattctgtggcgctacacttatctctgatcggtggctgttgactgctgcccactgtcgcaaaccttacttgtgggtgcgcctaggcgagcatcatttatggaagtgggaaggacccgaacagctcttcagggttaccgacttttttccccacccagggttcaacaaagacctgtccgctaatgatcataacgatgacatcatgctgattagattgccccgtcaagcacggcttagtcctgctgtccagccactcaatctttcacaaacctgtgtgtcacccggcatgcaatgcctgatctcaggatggggggccgtgtcgagccctaaagccctgttcccagtcaccctccaatgcgcaaacatcagtattctggaaaacaagctctgccactgggcctatcccggacatatcagtgattccatgctctgcgccgggctctgggaaggcggtaggggatcttgtcaaggagattcaggaggaccgctagtctgtaatggcaccctggccggcgttgtaagcggaggcgcagaaccgtgttctaggccaagaaggcccgccgtctatacttccgtctgccattatctggactggatccaggaaatcatggaaaattag

SEQ ID NO: 173933 - DNA, 753 bp, Artificial Sequence
  derived and/or modified sequence
atgaagttgggccttctctgtgctctgctcagccttttggctggccacgggtgggctgacacccgggctatcggggccgaggagtgcaggccaaattcccagccgtggcaggccggcctcttccatctgactagactattctgcggcgctacccttatttccgaccggtggctgctgaccgccgcacactgtcgtaaaccctatctctgggtcaggttgggcgaacatcacctgtggaaatgggaaggacccgaacaactcttcagagtaacagacttcttcccccatcctggctttaataaagacctcagcgccaatgaccacaacgacgacatcatgttgatccgactccctaggcaggcccgattgagccccgccgtgcagcccttaaatctgagccagacctgtgtctcacccggcatgcagtgtctaatctccggatggggtgccgtgtcctcgcctaaggctttgtttccggtgaccctgcagtgtgctaatatcagtatcctcgagaacaaactgtgccactgggcctatcccggccacattagtgactcaatgttgtgtgcagggctatgggaaggggggagaggtagctgccagggggattctggagggccacttgtgtgtaacgggacactagctggagtggtgtctggcggagccgagccctgctccagaccacgcagaccagctgtgtataccagcgtgtgccattacctggactggatccaggagatcatggaaaactag

SEQ ID NO: 173934 - DNA, 186 bp, Artificial Sequence
  derived and/or modified sequence
atgaagctcgggctgctctgtgccctgctcagcctgctcgccggcatatgtggaagtgccctcgagtctacgaccagtgggaacggtagggtgagatcatcgtgctctgggttgcggacatcaagccctacccttgcttccacacgaacctctgctccgatgaccaccatgatgacatcctgctag

SEQ ID NO: 173935 - DNA, 1438 bp, Artificial Sequence
  derived and/or modified sequence
catggaggaggaaggagatggcatggcttaccataaagaagcactggacgccgggtgcacgttccaggatccaggtgcccaggggtcatgaagctgggactcctctgtgctctgctctctctgctggcagggcatggctgggcagacacccgtgccatcggggccgaggaatgtcgccccaactcccagccttggcaggccggcctcttccaccttactcggctcttctgtggggcgaccctcatcagtgaccgctggctgctcacagctgcccactgccgcaagccgtatctgtgggtccgccttggagagcaccacctctggaaatgggagggtccggagcagctgttccgggttacggacttcttcccccaccctggcttcaacaaggacctcagcgccaatgaccacaatgatgacatcatgctgatccgcctgcccaggcaggcacgtctgagtcctgctgtgcagcccctcaacctcagccagacctgtgtctccccaggcatgcagtgtctcatctcaggctggggggccgtgtccagccccaaggcgctgtttccagtcacactgcagtgtgccaacatcagcatcctggagaacaaactctgtcactgggcataccctggacacatctcggacagcatgctctgtgcgggcctgtgggaggggggccgaggttcctgccagggtgactctgggggccccctggtttgcaatggaaccttggcaggcgtggtgtctgggggtgctgagccctgctccagaccccggcgccccgcagtctacaccagcgtatgccactaccttgactggatccaagaaatcatggagaactgagcccgcgcgccacgggggcaccttggaagaccaagagaggccgaagggcacggggtagggggttctcgtagggtcccagcctcaatggttcccgccctggacctccagctgccctgactcccctctggacactaagactccgcccctgaggctccgccccctcacgaggtcaagcaagacacagtcgcgccccctcggaacggagcagggacacgcccttcagagcccgtctctatgacgtcaccgacagccatcacctccttcttggaacagcacagcctgtggctccgccccaaggaaccacttacacaaaatagctccgcccctcggaactttgcccagtgggacttcccctcgggactccaccccttgtggccccgcctccttcaccagagatctcgcccctcgtgatgtcaggggcgcagtagctccgcccacgtggagctcgggcggtgtagagctcagccccttgtggccccgtcctgggcgtgtgctgggtttgaatcctggcggagacctggggggaaattgagggagggtctggatacctttagagccaatgcaacggatgatttttcagtaaacgcgggaaacctca

SEQ ID NO: 173936 - DNA, 1602 bp, Artificial Sequence
  derived and/or modified sequence
ggtgcacgttccaggatccaggtgcccaggggtcatgaagctgggactcctctgtgctctgctctctctgctggcagggcatggctgggcagacacccgtgccatcggggccgaggaatgtcgccccaactcccagccttggcaggccggcctcttccaccttactcggctcttctgtggggcgaccctcatcagtgaccgctggctgctcacagctgcccactgccgcaagccgtatctgtgggtccgccttggagagcaccacctctggaaatgggagggtccggagcagctgttccgggttacggacttcttcccccaccctggcttcaacaaggacctcagcgccaatgaccacaatgatgacatcatgctgatccgcctgcccaggcaggcacgtctgagtcctgctgtgcagcccctcaacctcagccagacctgtgtctccccaggcatgcagtgtctcatctcaggctggggggccgtgtccagccccaaggcgctgtttccagtcacactgcagtgtgccaacatcagcatcctggagaacaaactctgtcactgggcataccctggacacatctcggacagcatgctctgtgcgggcctgtgggaggggggccgaggttcctgccagggtgactctgggggccccctggtttgcaatggaaccttggcaggcgtggtgtctgggggtgctgagccctgctccagaccccggcgccccgcagtctacaccagcgtatgccactaccttgactggatccaagaaatcatggagaactgagcccgcgcgccacgggggcaccttggaagaccaagagaggccgaagggcacggggtagggggttctcgtagggtcccagcctcaatggttcccgccctggacctccagctgccctgactcccctctggacactaagactccgcccctgaggctccgccccctcacgaggtcaagcaagacacagtcgcgccccctcggaacggagcagggacacgcccttcagagcccgtctctatgacgtcaccgacagccatcacctccttcttggaacagcacagcctgtggctccgccccaaggaaccacttacacaaaatagctccgcccctcggaactttgcccagtgggacttcccctcgggactccaccccttgtggccccgcctccttcaccagagatctcgcccctcgtgatgtcaggggcgcagtagctccgcccacgtggagctcgggcggtgtagagctcagccccttgtggccccgtcctgggcgtgtgctgggtttgaatcctggcggagacctggggggaaattgagggagggtctggatacctttagagccaatgcaacggatgatttttcagtaaacgcgggaaacctcaccttctttctgcctgagctgtgagatgagtggagagcaaacgggtgggcggtgaagggcagatgagggaaccggtaccgccttgcaactcccccttaaacccctaacctcaccatgggacgcccccgacctcgtgcggccaagacgtggatgttcctgctcttgctggggggagcctgggcaggacactccagggcacaggaggacaaggtgctggg

SEQ ID NO: 173937 - DNA, 683 bp, Artificial Sequence
  derived and/or modified sequence
catggaggaggaaggagatggcatggcttaccataaagaagcactggacgccgggtgcacgttccaggatccaggtgcccaggggtcatgaagctgggactcctctgtgctctgctctctctgctggcaggtatctgtgggtccgccttggagagcaccacctctggaaatgggagggtccggagcagctgttccgggttacggacttcttcccccaccctggcttcaacaaggacctcagcgccaatgaccacaatgatgacatcatgctgatccgcctgcccaggcaggcacgtctgagtcctgctgtgcagcccctcaacctcagccagacctgtgtctccccaggcatgcagtgtctcatctcaggctggggggccgtgtccagccccaaggcgctgtttccagtcacactgcagtgtgccaacatcagcatcctggagaacaaactctgtcactgggcataccctggacacatctcggacagcatgctctgtgcgggcctgtgggaggggggccgaggttcctgccagggtgactctgggggccccctggtttgcaatggaaccttggcaggcgtggtgtctgggggtgctgagccctgctccagaccccggcgccccgcagtctacaccagcgtatgccactaccttgactggatccaagaaatcatggagaactga

SEQ ID NO: 173938 - DNA, 753 bp, Artificial Sequence
  derived and/or modified sequence
atgaagctgggcctgctgtgtgccctgctgagcctgctggccggccacggctgggccgacacccgggccatcggggctgaggagtgccggcccaacagccagccctggcaggccggcctcttccacctgaccaggctcttctgtggggccaccctcatcagtgaccgctggctgctgacagctgcccactgcaggaagccctacctgtgggtgcggctgggggagcaccacctgtggaagtgggagggccctgagcagctgttccgggtgacagacttcttcccccaccctggcttcaacaaggacctgagcgccaatgaccacaatgatgacatcatgctgatccggctgccccggcaggcccggctgagccctgctgtgcagcccctgaacctgagccagacctgtgtgtccccaggcatgcagtgcctgatcagcggctggggcgctgtgagcagccccaaggccctcttccctgtgaccctgcagtgtgccaacatcagcatcctggagaacaagctgtgccactgggcctacccaggccacatcagtgacagcatgctgtgtgccggcctgtgggagggcggccggggcagctgccagggcgacagcggcggccccctggtgtgcaatggcaccctggccggcgtggtgtctggaggagctgagccctgcagccggcccaggaggcctgctgtgtacacctctgtgtgccactacctggactggatccaggagatcatggagaactag

SEQ ID NO: 173939 - DNA, 186 bp, Artificial Sequence
  derived and/or modified sequence
atgaagctgggcctgctgtgtgccctgctgagcctgctggccggcatctgtggcagcgccctggagagcaccaccagcggaaatggccgggtgcgcagcagctgcagcggcctgcggaccagcagccccaccctggccagcaccaggaccagcgcccccatgaccaccatgatgaccagctgctag

SEQ ID NO: 173940 - DNA, 753 bp, Artificial Sequence
  derived and/or modified sequence
atgaagctgggcctgctgtgcgccctgctgagcctgctggccggccacggctgggctgacacgagagccatcggcgccgaggaatgccgcccgaactctcaaccatggcaggctggcctctttcacctgacccgcttattctgcggagccaccttgatatctgaccgctggttattgaccgccgctcactgccggaagccgtatttgtgggtcagacttggcgagcaccacttgtggaaatgggaaggcccggagcaactgttccgtgtgacagacttctttccccacccaggtttcaacaaagaccttagcgctaatgaccacaacgatgatattatgttaatacgtctccctcggcaggcaaggctgtcacccgccgttcagccactaaacctaagtcaaacctgtgttagcccaggaatgcagtgcctgatctccgggtggggggccgttagctcccctaaggccttgttcccagttacgctgcaatgtgctaatatctccatcttagagaacaaattgtgtcattgggcctacccgggccatatatccgattctatgctctgtgcagggctctgggagggtggcaggggatcctgccagggtgattcgggcggcccattggtgtgcaatggaacgctagccggcgtggtgagcggcggagctgaaccctgttctcggcctcggcgccccgcggtttacacttccgtttgtcactacctggactggatacaagaaattatggaaaattag

SEQ ID NO: 173941 - DNA, 753 bp, Artificial Sequence
  derived and/or modified sequence
atgaagctgggcctgctgtgcgccctgctgagcctgctggccggccacggttgggctgacaccagggcaatcggcgcggaggagtgccgccccaacagccagccctggcaggctggtctgtttcatcttactcgattgttttgcggcgccaccctgatctctgaccggtggctgcttaccgctgctcattgccggaagccgtatctttgggtacggttgggggagcatcacctatggaaatgggaaggtcccgagcagcttttccgggtgaccgacttctttcctcacccggggtttaacaaagaccttagcgctaacgaccacaacgatgacatcatgttgattcgccttccccgccaggccagattgtccccagctgtgcaacccttgaacctgtcccagacctgtgttagccctggtatgcagtgtctcattagcggctggggcgcagtatcatctccaaaagctctgttccccgttactctgcagtgcgcgaacatctcaatcctcgagaacaagctgtgtcactgggcatatcccgggcacatctcagactcaatgttgtgcgcagggctgtgggagggcggcagaggttcgtgccagggcgattctggcggtcccctagtgtgcaacggtactcttgccggtgtggtgagcggtggggctgagccttgtagccgcccccgccgcccagcagtttatacaagtgtctgtcattacctggactggatccaggagataatggaaaattag

SEQ ID NO: 173942 - DNA, 186 bp, Artificial Sequence
  derived and/or modified sequence
atgaagctgggcctgctgtgcgccctgctgagcctgctggccggcatttgcggatccgcacttgaaagtaccaccagtggtaacgggagagtgcggtcaagctgttctggcttgcgcacttccagccccactttggcaagtactagaacatcagctccaatgacaaccatgatgacgagctgttag

SEQ ID NO: 173943 - DNA, 753 bp, Artificial Sequence
  derived and/or modified sequence
atgaaactagggctgctatgcgcgttgctgagtcttctggctggccatggctgggctgacacacgcgcaattggggcagaagaatgccgccctaacagtcagccctggcaagccggactgttccacctgactaggctcttctgtggggctactctgattagtgatcgctggctcctcacagcagcacattgtcggaagccttatctgtgggttagattaggggagcatcatctctggaagtgggaaggcccagagcagctgttccgggtgacggattttttccctcatccgggttttaataaggatttaagcgccaatgaccacaatgacgatatcatgctcatccgacttcccagacaggctcgactgtcgcccgctgtacagcctttgaacctgtctcagacttgcgtgtctcctggcatgcagtgcctcatttctgggtggggagccgtcagcagtccaaaagccctcttccctgtgacgctgcagtgtgccaatattagcattctcgagaacaaattgtgtcattgggcataccccggacacatctccgatagtatgttatgtgccggtctgtgggaaggcggacggggatcgtgtcaaggcgattcagggggtccactggtctgcaatgggaccctggccggagtggtgtcgggcggtgcagagccttgtagtaggcccagacgtcctgcggtgtacacttccgtgtgtcactatctggactggattcaagaaattatggaaaattag

SEQ ID NO: 173944 - DNA, 753 bp, Artificial Sequence
  derived and/or modified sequence
atgaagctgggcttgctatgtgcgcttctctccctgcttgccggtcacggctgggccgataccagagcaatcggcgctgaggagtgcaggcctaatagccaaccatggcaggctggcctctttcatctgacccgcctgttctgcggcgctaccctcatctctgaccggtggcttctgaccgctgctcattgcagaaaaccgtatctttgggtccggctgggagaacaccatctgtggaaatgggagggaccagagcagctgtttagggtcacggattttttccctcaccccggtttcaacaaggatctcagcgcaaacgaccacaacgatgatatcatgttgattaggctcccccgacaagcaaggttgtctcctgcagttcagcctctgaatttgagccaaacatgcgtaagccctggaatgcagtgcctcatctccggttggggggctgtgtcctcaccaaaggccctctttccagtaactctgcagtgtgctaatataagcatattagaaaacaaactatgtcattgggcatacccaggacatatcagtgatagcatgttgtgtgctggcctgtgggaagggggaagaggttcgtgtcagggagacagtggcggtcctctcgtctgtaacgggacactcgccggtgtcgtgtcaggcggagccgagccgtgcagccggcctagacggcctgctgtttatacctctgtgtgccactacctggactggatacaggagattatggaaaactag

SEQ ID NO: 173945 - DNA, 753 bp, Artificial Sequence
  derived and/or modified sequence
atgaagctgggcctgctgtgcgccctgctgagcctgctggccggccacggctgggccgacaccagagccatcggcgccgaggagtgcagacccaacagccagccctggcaggccggcctgttccacctgaccagactgttctgcggcgccaccctgatcagcgacagatggctgctgaccgccgcccactgcagaaagccctacctgtgggtgagactgggcgagcaccacctgtggaagtgggagggccccgagcagctgttcagagtgaccgacttcttcccccaccccggcttcaacaaggacctgagcgccaacgaccacaacgacgacatcatgctgatcagactgcccagacaggccagactgagccccgccgtgcagcccctgaacctgagccagacctgcgtgagccccggcatgcagtgcctgatcagcggctggggcgccgtgagcagccccaaggccctgttccccgtgaccctgcagtgcgccaacatcagcatcctggagaacaagctgtgccactgggcctaccccggccacatcagcgacagcatgctgtgcgccggcctgtgggagggcggcagaggcagctgccagggcgacagcggcggccccctggtgtgcaacggcaccctggccggcgtggtgagcggcggcgccgagccctgcagcagacccagaagacccgccgtgtacaccagcgtgtgccactacctggactggatccaggagatcatggagaactag

SEQ ID NO: 173946 - protein, 146 aa, Artificial Sequence
  derived and/or modified sequence
MVDELVLLLHALLMRHRALSIENSQLMEQLRLLVCERASLLRQVRPPSCPVPFPETFNGESSRLPEFIVQTASYMLVNENRFCNDAMKVAFLISLLTGEAEEWVVPYIEMDSPILGDYRAFLDEMKQCFGWDDDEDDDDEEEEDDY

SEQ ID NO: 173947 - DNA, 1388 bp, Artificial Sequence
  derived and/or modified sequence
ctggccaccaagcgcctccgtggacacgcacttcctgcgaggcctccgtgcgcaccttggccgagccgaaccgagccgagtcctgtccttccaggccgttcgcaatggtggatgagttggtgctgctgctgcacgcgctcctgatgcggcaccgcgccctgagcatcgagaacagccagctcatggaacagctgcggctgctggtgtgcgagagggccagcctgctgcgccaggtacgtccgccgagctgcccggtgcccttccccgaaacgtttaatggcgagagctcccggctccccgagtttatcgtgcagacggcgtcttacatgctcgtgaacgagaaccgattctgcaacgacgccatgaaggtggcattcctaatcagcctcctcaccggggaagccgaggagtgggtggtgccctacatcgagatggatagccccatcctaggtgattaccgggccttcctcgatgagatgaaacagtgctttggctgggatgacgacgaagacgacgacgacgaagaagaggaggatgattattaggccctcgaccctcgggcctcgggggggagggccctgcacgccgccaccccctccccgcagccctcaccccgccaggagccactgctctcccccttgccctccggtccccttacctacccgcgcccgtctgctctctctcttcatttctccgtagtgcttgtctttgttccaggaatagcgctccagttacctgctgctggggtcggggctggagcctcactcactcggaagtgcttggaagtgtcatctaccctggccatccccgggatccctcccctgctaatctgaactgtgtcctgaaccccagctattggccaggcccctgttacaaactgcgcagaccacccatagccctgctgctgccacctgccctgctgccaggcttacatcttcccagagaactatgctgccacttcacatccactcaccacatcccacctacagactaccacctttcgagatcaggaccaacctggaaaatgccagagttggctatgccttttcagacattgatttggacagctcaccaacccctgaaggggccgttcagcctggttagttttctacctactccgagtgtcctcccctgccccaccagattgctgcaggggcgcggtgtgcctggcagccaaattgttgacacttcttttttcctatgcactggttttacacagctgtcatttttctttcaaaattgcagcagtcccacagatgtgtgcatttggacaaatagtacttaaaaacaaaacaaacaagcactcagcccagctcctcaatactacctggaaaaagcattggcattattttcaataaatatcaagcactaaaaaaagaaaaaaaaaa

SEQ ID NO: 173948 - DNA, 441 bp, Artificial Sequence
  derived and/or modified sequence
atggtggatgagctggttctgctgcttcatgcattgttaatgcggcaccgggcactgtccatcgaaaactctcagcttatggagcagttgagacttctagtgtgtgaacgagcatcattgctccgccaggtacggcctccctcctgccccgttccatttccagaaaccttcaatggcgagtcatcacgcttgccggaattcattgttcagactgcatcttacatgctcgtgaatgaaaacagattctgcaacgacgccatgaaggtggcctttttgatttccctgctgacaggcgaagccgaggagtgggtggtgccgtatatagagatggactcaccgattctgggcgactatcgggctttcctggacgaaatgaaacaatgtttcggatgggatgatgatgaggacgacgacgacgaggaggaggaagacgattattag

SEQ ID NO: 173949 - DNA, 441 bp, Artificial Sequence
  derived and/or modified sequence
atggtggatgagctggtgctgctgctgcacgccctgctgatgaggcaccgggccctgagcattgagaacagccagctgatggagcagctgcggctgctggtgtgtgagcgggccagcctgctgcggcaggtgcggccccccagctgccctgtgcccttccctgagaccttcaacggggagagcagccggctgcctgagttcatcgtgcagacagccagctacatgctggtgaatgaaaatcgcttctgcaatgatgccatgaaggtggccttcctgatcagcctgctgactggagaggccgaggagtgggtggtgccctacatcgagatggacagccccatcctgggggactaccgggccttcctggatgagatgaagcagtgcttcggctgggatgatgatgaagatgatgatgatgaggaggaggaggatgactactag

SEQ ID NO: 173950 - DNA, 1370 bp, Artificial Sequence
  derived and/or modified sequence
ctggccaccaagcgcctccgtggacacgcacttcctgcgaggcctccgtgcgcaccttggccgagccgaaccgagccgagtcctgtccttccaggccgttcgcaatggtggatgagttggtgctgctgctgcacgcgctcctgatgcggcaccgcgccctgagcatcgagaacagccagctcatggaacagctgcggctgctggtgtgcgagagggccagcctgctgcgccaggtacgtccgccgagctgcccggtgcccttccccgaaacgtttaatggcgagagctcccggctccccgagtttatcgtgcagacggcgtcttacatgctcgtgaacgagaaccgattctgcaacgacgccatgaaggtggcattcctaatcagcctcctcaccggggaagccgaggagtgggtggtgccctacatcgagatggatagccccatcctaggtgattaccgggccttcctcgatgagatgaaacagtgctttggctgggatgacgacgaagacgacgacgacgaagaagaggaggatgattattaggccctcgaccctcgggcctcgggggggagggccctgcacgccgccaccccctccccgcagccctcaccccgccaggagccactgctctcccccttgccctccggtccccttacctacccgcgcccgtctgctctctctcttcatttctccgtagtgcttgtctttgttccaggaatagcgctccagttacctgctgctggggtcggggctggagcctcactcactcggaagtgcttggaagtgtcatctaccctggccatccccgggatccctcccctgctaatctgaactgtgtcctgaaccccagctattggccaggcccctgttacaaactgcgcagaccacccatagccctgctgctgccacctgccctgctgccaggcttacatcttcccagagaactatgctgccacttcacatccactcaccacatcccacctacagactaccacctttcgagatcaggaccaacctggaaaatgccagagttggctatgccttttcagacattgatttggacagctcaccaacccctgaaggggccgttcagcctggttagttttctacctactccgagtgtcctcccctgccccaccagattgctgcaggggcgcggtgtgcctggcagccaaattgttgacacttcttttttcctatgcactggttttacacagctgtcatttttctttcaaaattgcagcagtcccacagatgtgtgcatttggacaaatagtacttaaaaacaaaacaaacaagcactcagcccagctcctcaatactacctggaaaaagcattggcattattttcaataaatatcaagcact

SEQ ID NO: 173951 - DNA, 441 bp, Artificial Sequence
  derived and/or modified sequence
atggtggacgagctggtgctgctgctgcacgccctgctgatgcggcacagggccctgtccatcgaaaatagccaattgatggagcagctgagattgctagtgtgcgaacgggctagccttctaaggcaagtgcgccctcctagttgtcccgtccccttcccagagactttcaatggtgaaagttcccgcttgccagagtttatagtccaaacggcttcatacatgctggtgaacgaaaacagattttgcaacgacgccatgaaggtggctttcctgatcagtctattaaccggggaagcagaagaatgggtagttccctacatcgagatggatagccccatccttggtgattaccgggcatttttggacgaaatgaaacaatgctttggctgggatgatgacgaagatgatgatgacgaagaagaagaggacgattactag

SEQ ID NO: 173952 - DNA, 441 bp, Artificial Sequence
  derived and/or modified sequence
atggttgacgagctcgtgctgctcctgcacgcgttgttgatgagacacagggcgctgagcattgaaaacagccaattaatggagcaactgagactactggtttgtgaacgcgcatccctccttaggcaggtaaggcccccaagctgccctgtcccttttcccgaaacattcaatggggagtcctcgcgcctccctgaatttatcgttcaaacagcctcttatatgctggtgaatgaaaacagattctgtaacgacgcgatgaaggttgcttttctgatctccctactgactggcgaagccgaggagtgggtggtgccgtatatcgagatggattccccaatcctgggagattacagagctttccttgacgagatgaagcagtgtttcggctgggatgatgatgaagacgatgacgatgaagaagaagaagacgactattag

SEQ ID NO: 173953 - DNA, 441 bp, Artificial Sequence
  derived and/or modified sequence
atggtggacgagctggtgctgctgctgcacgccctgctgatgagacacagagccctgagcatcgagaacagccagctgatggagcagctgagactgctggtgtgcgagagagccagcctgctgagacaggtgagaccccccagctgccccgtgcccttccccgagaccttcaacggcgagagcagcagactgcccgagttcatcgtgcagaccgccagctacatgctggtgaacgagaacagattctgcaacgacgccatgaaggtggccttcctgatcagcctgctgaccggcgaggccgaggagtgggtggtgccctacatcgagatggacagccccatcctgggcgactacagagccttcctggacgagatgaagcagtgcttcggctgggacgacgacgaggacgacgacgacgaggaggaggaggacgactactag

SEQ ID NO: 173954 - protein, 739 aa, Artificial Sequence
  derived and/or modified sequence
MASILLRSCRGRAPARLPPPPRYTVPRGSPGDPAHLSCASTLGLRNCLNVPFGCCTPIHPVYTSSRGDHLGCWALRPECLRIVSRAPWTSTSVGFVAVGPQCLPVRGWHSSRPVRDDSVVEKSLKSLKDKNKKLEEGGPVYSPPAEVVVKKSLGQRVLDELKHYYHGFRLLWIDTKIAARMLWRILNGHSLTRRERRQFLRICADLFRLVPFLVFVVVPFMEFLLPVAVKLFPNMLPSTFETQSLKEERLKKELRVKLELAKFLQDTIEEMALKNKAAKGSATKDFSVFFQKIRETGERPSNEEIMRFSKLFEDELTLDNLTRPQLVALCKLLELQSIGTNNFLRFQLTMRLRSIKADDKLIAEEGVDSLNVKELQAACRARGMRALGVTEDRLRGQLKQWLDLHLHQEIPTSLLILSRAMYLPDTLSPADQLKSTLQTLPEIVAKEAQVKVAEVEGEQVDNKAKLEATLQEEAAIQQEHREKELQKRSEVAKDFEPERVVAAPQRPGTEPQPEMPDTVLQSETLKDTAPVLEGLKEEEITKEEIDILSDACSKLQEQKKSLTKEKEELELLKEDVQDYSEDLQEIKKELSKTGEEKYVEESKASKRLTKRVQQMIGQIDGLISQLEMDQQAGKLAPANGMPTGENVISVAELINAMKQVKHIPESKLTSLAAALDENKDGKVNIDDLVKVIELVDKEDVHISTSQVAEIVATLEKEEKVEEKEKAKEKAEKEVAEVKS

SEQ ID NO: 173955 - protein, 252 aa, Artificial Sequence
  derived and/or modified sequence
MRHTWPFRNVPFGCCTPIHPVYTSSRGDHLGCWALRPECLRIVSRAPWTSTSVGFVAVGPQCLPVRGWHSSRPVRDDSVVEKSLKSLKDKNKKLEEGGPVYSPPAEVVVKKSLGQRVLDELKHYYHGFRLLWIDTKIAARMLWRILNGHSLTRRERRQFLRICADLFRLVPFLVFVVVPFMEFLLPVAVKLFPNMLPSTFETQSLKEERLKKELRVKLELAKFLQDTIEEMALKNKAAKGSATKDFSVFFQK

SEQ ID NO: 173956 - DNA, 2220 bp, Artificial Sequence
  derived and/or modified sequence
atggcctcaatcttattgcggagttgtagaggacgtgcccccgcccgactgccaccacctccacggtacacagtgcctcgaggctccccaggcgatccagcccatttgagctgcgcaagtacacttgggctgaggaactgcctgaatgttccttttggctgctgcactcccatccaccctgtgtatacatcttctagaggcgatcacctcgggtgttgggcccttcggcccgagtgtctcagaatcgtgtcacgggcaccatggacttccacctccgtgggatttgtggccgtgggccctcagtgtctgccggtgaggggctggcactccagcagacccgtccgcgacgattccgtcgtcgagaaaagtcttaaatcactgaaggacaaaaacaagaagctggaggagggtggtcctgtgtatagcccacccgctgaggttgtagtgaaaaagtctctaggccagcgtgttctcgatgagcttaagcactattaccatgggtttagattactatggattgacactaagatcgccgctagaatgctgtggagaatcctgaacggccattccctgacaaggcgggagcgcaggcagtttcttagaatctgtgcagacctgtttaggctcgttcctttcctggtcttcgttgtcgttccttttatggaattcctcctgcccgtggcagtcaaactgttccctaatatgctgcccagtacgttcgagactcagtcactgaaggaggaaaggctgaagaaagagcttcgtgttaagctggagctggctaaatttttgcaagacactatcgaggaaatggctctgaaaaacaaggccgctaaaggatcggcgacgaaagatttctccgttttctttcagaaaattagggagaccggcgaaaggccgtctaacgaggagatcatgcggttcagcaaactgttcgaagacgagctcacactcgataacctgacccgccctcagttggtggccttgtgtaagctattggagcttcaatcaataggcactaacaactttctgaggttccagctcactatgcgtctgcggagtatcaaggcagacgataagctgatagccgaggagggtgtcgattcgttgaacgtcaaggagctccaagctgcttgccgtgccagaggaatgagagctcttggagttaccgaagaccgactcaggggacagctgaaacagtggcttgacttgcatctacaccaggagatcccgacgtcgctgctcattttatctagagctatgtacctgcctgacactctttcaccggccgaccagctcaaaagcaccctgcagacactgcccgagattgtggccaaggaggctcaagttaaggtggcagaggtggaaggcgaacaggtggacaacaaggccaagctagaggccacccttcaggaggaggccgcaattcagcaggagcaccgcgaaaaggaacttcaaaaaagatccgaggtggcgaaggactttgaaccagaacgggtggtggcagctccccagagacctggcaccgaacctcagcctgaaatgccagacacagtgcttcaaagtgagactctcaaggatacagcacccgtgttggaaggactgaaggaagaagagattactaaagaagagatcgacatcctttcagacgcctgctcgaagctgcaggaacagaaaaagagtttgacaaaggagaaagaagagctggagttactcaaggaggatgttcaggattattcagaagatttgcaggagatcaaaaaggaactaagcaagacaggcgaagagaagtatgttgaggaatctaaggctagcaaaagacttacaaagagggtccagcaaatgatcggtcaaatcgacgggctgatctcacagctggagatggaccagcaggcaggtaaactggcccccgcaaacggaatgcctaccggagagaatgttatctcagtcgcggaactgatcaatgcaatgaaacaggtgaaacacatacctgagtctaaactgacctctttggctgccgctttggacgaaaacaaggatggtaaagtgaacattgatgatttggtaaaagtgatcgagctcgtggataaagaagacgttcacatttctacatcacaggtcgctgaaattgtggccacactcgaaaaggaggaaaaagtagaggagaaagaaaaggccaaggagaaagcggaaaaggaagttgccgaagttaagagctag

SEQ ID NO: 173957 - DNA, 2220 bp, Artificial Sequence
  derived and/or modified sequence
atggccagcatcctgctgcggagctgccggggccgggccccagcccggctgcccccaccaccccgctacacagtgccccggggcagccctggggaccctgcccacctgagctgtgccagcaccctgggcctgaggaactgcctgaatgtgcccttcggctgctgcacccccatccaccctgtgtacaccagcagcagaggagaccacctgggctgctgggccctgcggcctgagtgcctgcgcatcgtgtcccgggccccctggaccagcacctctgtgggctttgtggccgtgggcccccagtgcctgcctgtgcggggctggcacagcagcaggcctgtgagagatgacagcgtggtggagaagagcctgaagagcctgaaggacaagaacaagaagctggaggagggcggccctgtgtacagccccccagctgaggtggtggtgaagaagagcctgggccagagggtgctggatgagctgaagcactactaccacggcttccggctgctgtggattgacaccaagattgctgccaggatgctgtggaggatcctgaatggccacagcctgacccggcgggagcggcggcagttcctgcgcatctgtgccgacctcttccggctggtgcccttcctggtgtttgtggtggtgcccttcatggagttcctgctgcctgtggccgtgaagctgttccccaacatgctgcccagcacctttgagacccagagcctgaaggaggagcggctgaagaaggagctgcgggtgaagctggagctggccaagttcctgcaggacaccatcgaggagatggccctgaagaacaaggccgccaagggcagcgccaccaaggacttctctgtgttcttccagaagatccgggagaccggggagcggcccagcaatgaggagatcatgaggttcagcaagctgtttgaagatgagctgaccctggacaacctgacccggccccagctggtggccctgtgcaagctgctggagctgcagagcatcggcaccaacaacttcctgcgcttccagctgaccatgaggctgcggagcatcaaggcagatgacaagctgattgctgaggagggcgtggacagcctgaatgtgaaggagctgcaggccgcctgccgggcccggggcatgagggccctgggcgtgacagaagatcggctgcggggccagctgaagcagtggctggacctgcacctgcaccaggagatccccaccagcctgctgatcctgagccgggccatgtacctgcctgacaccctgagccctgctgaccagctgaagagcaccctgcagaccctgcctgagatcgtggccaaggaggcccaggtgaaggtggccgaggtggagggggagcaggtggacaacaaggccaagctggaggccaccctgcaggaggaggccgccatccagcaggagcaccgggagaaggagctgcagaagaggtctgaggtggccaaggactttgagcctgagcgggtggtggccgccccccagaggcctggaacagagccccagcctgagatgccagacacagtgctgcagagcgagaccctgaaggacacagcccctgtgctggagggcctgaaggaggaggagatcaccaaggaggagattgacatcctgagtgatgcctgcagcaagctgcaggagcagaagaagagcctgaccaaggagaaggaggagctggagctgctgaaggaggatgtgcaggactacagcgaggacctgcaggagatcaagaaggagctgagcaagacaggagaggagaagtatgtggaggagagcaaggccagcaagaggctgaccaagagggtgcagcagatgattggccagattgatggcctcatcagccagctggagatggaccagcaggccggcaagctggccccagccaacggcatgcccactggagaaaatgtcatctctgtggccgagctgatcaatgccatgaagcaggtgaagcacatccctgagagcaagctgaccagcctggccgccgccctggatgagaacaaggatggcaaggtgaacattgatgacctggtgaaggtgattgagctggtggacaaggaggatgtgcacatcagcaccagccaggtggccgagatcgtggccaccctggagaaggaggagaaggtggaggagaaggagaaggccaaggagaaggccgagaaggaggtggccgaggtgaagagctag

SEQ ID NO: 173958 - DNA, 5462 bp, Artificial Sequence
  derived and/or modified sequence
gaaccggtagtccgcggtggcgcggtccgcccctcacctggccagcggcgggcgctgaggggcccaatgggagccgcggcctggccgccccgccccgcgcctccggacgtctgtgccgggacaaggccgccgctggtgccgggtccttgaggagagcgcctcccgtccgaggccagccgcctctgtcagccgtccgcgcgggccgggtctgaagcgccgccgggacggcgaagagccgcggccgccgcggagaaggaggcagcgcaggaggccggagcggccgccgcgcccgagcacatggcgtccatcttactgaggagctgccgcggccgggcgcccgcccgcctcccgccgccgcctcggtacaccgtcccgcggggtagtccaggggatcctgctcatctcagctgtgccagcaccctggggttgaggaactgcctgaatgttccatttggctgctgcactcccatccaccctgtgtacacatcctccagaggcgatcacctcggctgttgggctctgaggcccgagtgccttcgcatagtgtcgagagcgccatggacctctacctctgtgggttttgtggctgtgggacctcagtgccttcctgtgcgtggctggcactcttcgcgccctgttcgcgatgactcggtagtagagaagtccctcaagtccttgaaggacaagaacaagaagctggaggaaggcggcccggtgtacagcccccccgcagaggtggtggtgaagaagtccctggggcagcgggtgctggacgagctgaagcactactaccatggcttccgcctgctatggatcgacaccaagatcgcggcacgcatgctctggcgcatcctcaacggccacagcctgacccgccgggagcgcaggcagtttctccggatctgcgctgacctcttccgcctggtgccgttccttgtgttcgtggtggtgccgttcatggagtttctgctgcctgttgctgtgaagctcttccccaacatgttgccatccacatttgagactcagtcactcaaggaggagaggctgaagaaggagcttcgggtcaagctggagctggccaagttcctccaggacaccatcgaggagatggccttgaagaacaaggcagccaagggcagcgccaccaaagacttctctgtgtttttccagaagatccgggaaacaggggagaggcccagcaatgaggaaatcatgcgtttttccaaattatttgaggatgagctgaccctggacaacctgacacggccgcagctggtggccctgtgcaagctgctggagctacagtccatcggcaccaacaacttcctgcgcttccagcttaccatgcggctgcgctccataaaggcagacgacaagctgattgctgaggaaggggtggacagcctgaatgtcaaggagctgcaggcagcgtgtcgggcacgaggcatgcgggccctgggcgtcacggaagaccgcctgaggggtcagctgaagcagtggctggacctgcacctgcatcaggagatccccacatcgctgctcatcctgtcccgggccatgtacctcccggacaccctctctccagccgaccagctcaagtccacactgcagaccctcccagagattgtggcaaaggaagcacaggtgaaagtggccgaggtggagggcgagcaggtggacaacaaggccaagctggaggccacgctgcaggaggaggcggccatccagcaggagcaccgtgagaaggagctgcagaagcgctcggaggtggcgaaggattttgagcccgaacgtgtggtagctgctccccaaaggccggggaccgagccacagccagaaatgcctgacacagtcctgcagtcagagaccttgaaggacactgccccggtgctggagggcttgaaggaggaagagatcacgaaggaggaaatcgacatcctcagcgatgcctgctctaagctgcaggagcagaagaagtcactcaccaaggagaaggaggagctggagctgctgaaggaggatgtgcaggactacagcgaggacttgcaggagatcaagaaggaactttcaaagactggtgaagaaaagtacgtggaagaatctaaagccagcaagagattgacaaaaagggtgcagcaaatgatcgggcagatcgatggcttgatctcgcagctggagatggaccagcaggctggcaagctggccccggccaacggcatgcccacgggggagaacgtcatcagtgtcgctgagctcatcaacgccatgaagcaagtcaagcacattcccgaaagcaagctcaccagcctggccgcagcactggatgaaaacaaggatggcaaggtcaacatcgacgacctcgtcaaggtgattgagctggtggacaaagaagatgttcacatctccaccagccaggtggctgagattgtagcaacactggaaaaagaggagaaggtggaggagaaggagaaggccaaagagaaggcagagaaggaggtcgcagaggtgaagagctagaaccactggcctgggcacctgtcctcctgctgtgccgtcaccctggcaagggccgtgagggcgattgctttgtggtgattctcagtggctcatctaatattttggctggaataaatcagagacttccataatcaagtaaattttaattttcatcattccacggagattcagtctgtctggaatcccggaacccctccacagaatcgtgtctggatccacactgtggtgtggctgccacggcctcctggctccagaggcagctgggctgggccaaggcaggaaggcgcccccatgtgtgtggcctcagtctcagcatctgactgtgctgccctgtccccagggaagagaatgaggaccacgtggactccgcccacacagagctggctgctgtgcccaccctcaggggcgtcaggagacacagcctggcctcctcagggctgaagatgcctccattcgcctgtggaccttgatttctagatttcagtgtcaatagacctgtcttcctgcacactttcagttggatgtgggtcattgtggagacagaggtgtctgccatctctgtggcctctggagagtgacgtctccctgctgggagtgctggttctcacgtgcggtttcccttgtgtatcggagctctttctcggctttctatttcccccagttctttaagcagtcaattggcacagagtttcccacgggggctgcagtggattcactgtgtcagggatgagcctggcttgggggttggtggggctctgaagcgcatttggggttctttgtagcttctaatgtgaggtttgagtccagtgcgcccacagcagcatgcccttctcaccccttgcagtgttgcaggctcaggcccctgggctccttcagcaagcaggctagtcaatgaggcatgaggatccggcacagggcatcccctggggcttcaagggcaatacccccgtgcttagggtttgccctgtgccctctgggtggggtggcctccccgcactcggcagcatggccaggctggccagggcgtgggcaggtggtgtcctgtggcacctccatcctcctgcccagccggctgtgtcacactcatctttttaaggtcaggttggttcctggcaaaaatgtacctccaggggcctccaagcataggatttggaagacaggaacggcacaggcgtccaggaaagcagctgcactcagacaatgccttctccattacttgaagcttctttctgttcagccattaaagaaacttgacaaaataggaacaggagatatttctcaattgtaaacctttgtgcagggacagttggcttccagaggctttcagctttcagttatttgagaagtttgttttagatccttaactaatatttatgaattctctcaccctgtgtaagtagcctggtgttcgtttgtccaagtgtacttacccttgagaacaagtcttgcagttgccaggtgtgtgcagacgcctctcctgtgagcggcatcgcgggcccagtcagctgccccggctctcatcctcgtcctcactgccttggctgagcactgttgacgtgaacagccactgcaacaggcagcccatcccactgtcccctctgccctggactccgcatggcctccaaaagccagcttgccctccgggtgctgcaggggctttgcaggtggggaaggctctggtgggtgcctttggtggcttccgtgacatcagccgtgctctgatgcaggcttgctccctcgtcattctccctcgtcattctccctcatcgttctgtgtgcatttttctctatgtcctgacctttcttcttgcacctaaaagtggtgtctgggtgcaaatgtaagcagtggtggatccagaaatatgagctttgtgtaataagcttcttaaaacagtcctttcttacacctgcccagggccagaccctcggtcttggcctttttcaggagctaggatatctgcgcctggtgaaaatgaaacgaattcctgatttaggaattcagtgtttcctcctcactccagctaagcactcacttttttttttttttttttttttttttgatacagagtctcgctctgtcacccaggctggagtgcagtggtgcgatctcggctcactgcaagctccacctcccgggttcaagcgattcttctgcctcagcctcctgagtaattgggattacaggcatgcgccaccatgcccagctaatttttttttttttttttgagacagagtcttgctctgtctcccaggctggagtgcaatggcgtgatctcggctcactgccagctccgcttcctgggttcacgccattctcctgcctcagcctcccgagtagccaggactacaagcacccgccaccacacctggctaatttttttgtatttttattagagacagtgttttaccgtgttagccaggatggtctcgatctcctgacttcgtgatctactcacctcggcctcccaaagtgctgggattacgggcaagtttttattagagatggggtttcatcatgttggtcaggctggtcttcaactcctgacctcaggtgatccacccgcctcagcctcccaaagtgctgggattacaggcatgagccaccgcgcccggcctgaactctcagttctaacgcagggattcaggaattgggctttcagactccttctgcagtgtcacagtccagactttttttaaatgaaggacaccccgcagtggctcacagtgggtcccagggctagcaggagcgtgctggggagccggctctgtctttgttcgcagtgggtcccggtgctggcaggagtgtgctggtgagccggctctgtctttgtaaatccttcaggggtcctacggctgactccaccggacagcccgtcctgggccgtgttaagcaccttttgtagaaatcgtatttttattaaaacatcaaatctgtgttcctgtaa

SEQ ID NO: 173959 - DNA, 2227 bp, Artificial Sequence
  derived and/or modified sequence
atgcgacacacatggccttttaggaatgttccatttggctgctgcactcccatccaccctgtgtacacatcctccagaggcgatcacctcggctgttgggctctgaggcccgagtgccttcgcatagtgtcgagagcgccatggacctctacctctgtgggttttgtggctgtgggacctcagtgccttcctgtgcgtggctggcactcttcgcgccctgttcgcgatgactcggtagtagagaagtccctcaagtccttgaaggacaagaacaagaagctggaggaaggcggcccggtgtacagcccccccgcagaggtggtggtgaagaagtccctggggcagcgggtgctggacgagctgaagcactactaccatggcttccgcctgctatggatcgacaccaagatcgcggcacgcatgctctggcgcatcctcaacggccacagcctgacccgccgggagcgcaggcagtttctccggatctgcgctgacctcttccgcctggtgccgttccttgtgttcgtggtggtgccgttcatggagtttctgctgcctgttgctgtgaagctcttccccaacatgttgccatccacatttgagactcagtcactcaaggaggagaggctgaagaaggagcttcgggtcaagctggagctggccaagttcctccaggacaccatcgaggagatggccttgaagaacaaggcagccaagggcagcgccaccaaagacttctctgtgtttttccagaagatccgggaaacaggggagaggcccagcaatgaggaaatcatgcgtttttccaaattatttgaggatgagctgaccctggacaacctgacacggccgcagctggtggccctgtgcaagctgctggagctacagtccatcggcaccaacaacttcctgcgcttccagcttaccatgcggctgcgctccataaaggcagacgacaagctgattgctgaggaaggggtggacagcctgaatgtcaaggagctgcaggcagcgtgtcgggcacgaggcatgcgggccctgggcgtcacggaagaccgcctgaggggtcagctgaagcagtggctggacctgcacctgcatcaggagatccccacatcgctgctcatcctgtcccgggccatgtacctcccggacaccctctctccagccgaccagctcaagtccacactgcagaccctcccagagattgtggcaaaggaagcacaggtgaaagtggccgaggtggagggcgagcaggtggacaacaaggccaagctggaggccacgctgcaggaggaggcggccatccagcaggagcaccgtgagaaggagctgcagaagcgctcggaggtggcgaaggattttgagcccgaacgtgtggtagctgctccccaaaggccggggaccgagccacagccagaaatgcctgacacagtcctgcagtcagagaccttgaaggacactgccccggtgctggagggcttgaaggaggaagagatcacgaaggaggaaatcgacatcctcagcgatgcctgctctaagctgcaggagcagaagaagtcactcaccaaggagaaggaggagctggagctgctgaaggaggatgtgcaggactacagcgaggacttgcaggagatcaagaaggaactttcaaagactggtgaagaaaagtacgtggaagaatctaaagccagcaagagattgacaaaaagggtgcagcaaatgatcgggcagatcgatggcttgatctcgcagctggagatggaccagcaggctggcaagctggccccggccaacggcatgcccacgggggagaacgtcatcagtgtcgctgagctcatcaacgccatgaagcaagtcaagcacattcccgaaagcaagctcaccagcctggccgcagcactggatgaaaacaaggatggcaaggtcaacatcgacgacctcgtcaaggtgattgagctggtggacaaagaagatgttcacatctccaccagccaggtggctgagattgtagcaacactggaaaaagaggagaaggtggaggagaaggagaaggccaaagagaaggcagagaaggaggtcgcagaggtgaagagctagaaccactggcctgggcacctgtcctcctgctgtgccgtcaccctggcaagggccgtgagggcgattgctttgtggtgattctcagtggctcatctaatattttggctggaataaatcagagacttcc

SEQ ID NO: 173960 - DNA, 2220 bp, Artificial Sequence
  derived and/or modified sequence
atggccagcatcctgctgcggagctgccggggccgggcccccgcccgtttacctccccctccacggtacacggtacctaggggaagccccggcgatcctgcccacctgagctgcgcatcgacgttgggcctgcgaaattgtctgaatgtgccattcggctgttgtactcctatccacccagtgtatacgtcaagtcgcggcgaccatctgggctgttgggcactccggcccgaatgtctgaggatagtctccagggctccatggactagtacgagtgtgggatttgtagccgtgggcccccagtgtttgcctgtccgaggatggcatagctcgcgtcctgtgagggatgactctgtggtggagaaatccctgaaaagccttaaagacaaaaacaaaaaactagaagagggaggcccagtctactcaccacccgctgaagtggttgtgaaaaaatccctggggcagagggtgttggatgagctgaagcactactatcacggcttccgcctgctgtggatcgacacgaagattgcagcgcggatgctgtggagaattctgaacgggcactcattgacccgcagggagaggcgacagttcctcaggatctgcgcagatctgttcaggctggtcccattcctggtattcgttgttgttccgttcatggagttcctcttgcccgtggccgtcaaactctttcccaatatgttgccaagcacttttgagactcagtccctgaaggaggagagactcaagaaagagctcagagttaagctagagcttgccaaatttcttcaggatacaatagaggaaatggccctgaagaacaaggccgcaaaaggatcagcaacgaaagacttcagcgtgttcttccagaagattagagagaccggtgagcgcccaagcaacgaagaaatcatgcggttctcgaagctcttcgaggatgaactgactcttgacaatctcacaagaccccaactcgtggcactgtgcaagctgctggagctccaatccattggaaccaataattttcttagatttcagttgaccatgcgcctacggtctatcaaggcggatgataagttgattgcagaagaaggggtggattccctcaacgtgaaggaactccaggcagcctgcagggcccgaggcatgagggcgctgggagtgaccgaggatagattaagaggccagctgaaacagtggttagacttgcacctccaccaagaaattccaacctctctgctcattcttagcagggcgatgtatctgccagacacattatcccccgccgatcagctcaagtcaactcttcagacattgcctgaaatagtggcaaaggaagcccaagtgaaagtagccgaagttgagggcgaacaggtagataataaagcaaaattggaagctacactgcaggaggaagccgcgattcaacaggagcatcgagagaaagaactgcaaaaacgctcggaagttgccaaggatttcgaacccgagcgggtagtggcggccccccagcgacctgggaccgaaccgcagcccgaaatgcccgataccgtcctacagtcggaaactctgaaagatacagcccccgtgctggaaggattgaaggaagaagagatcacgaaggaggaaattgacatcttgtctgacgcatgtagcaaactccaggagcagaagaaaagcctcaccaaagagaaagaagaactcgagctgcttaaagaagacgtacaggattattccgaagatcttcaggagattaaaaaggaactgtcaaagaccggagaagaaaaatatgttgaggagtccaaagcctccaagaggttgaccaagagggtgcagcaaatgattggacaaattgatggcctgataagccaactagaaatggaccagcaagcgggaaaattggcaccggccaatggaatgccaaccggagagaacgtcatctccgtcgccgaactgatcaatgccatgaaacaagttaaacacattcccgagtcaaaattaacaagcttggccgccgccttggacgagaataaggacggtaaggttaatattgacgatctcgtcaaagttatcgaactcgttgataaggaggatgtgcacatcagtactagccaggtagctgagattgtggcaactcttgagaaagaggaaaaagtggaagaaaaggaaaaagccaaagaaaaggctgaaaaggaagtagcggaagtaaaatcatag

SEQ ID NO: 173961 - DNA, 2220 bp, Artificial Sequence
  derived and/or modified sequence
atggcctctatactgctgaggtcgtgcagagggcgtgccccagccaggttaccccctcctccaagatataccgtccctagaggtagccccggtgacccagctcatctaagttgtgcttctactctgggattgcgtaattgcttgaacgtgccctttggttgttgcacccccattcatccagtgtatactagttctcggggagaccatcttgggtgttgggcccttcgcccagagtgtcttagaatagtgagtagagccccatggacctctacaagtgttggttttgtagcggtgggaccgcagtgcttgcctgtgcgcggttggcactcttcaaggcctgtgcgcgacgactccgttgtcgagaagtccctaaaaagcttaaaggacaaaaataaaaagctggaagaggggggaccagtctacagcccgccagctgaagtcgtcgtgaagaagtccctcggtcagcgcgtgttagacgaacttaaacattattatcatggatttcgcctgttgtggattgacacgaagattgccgctcgcatgctgtggagaatcctgaatggacattccctcacacggagagagcggagacagttcctacgcatctgcgcagacctctttcgcttggtcccatttctcgtatttgtggtggttcccttcatggagttcctcctccctgtggctgtgaagctgttccccaacatgttgcccagtactttcgaaacccaaagcttgaaagaggaacggcttaaaaaggagctgcgtgtcaagcttgagctggctaaatttctccaggatactattgaggaaatggctctaaagaacaaagctgccaaggggtctgcaacaaaagacttctctgttttctttcaaaaaatcagggagacaggagagaggccgagtaatgaggagatcatgcggttcagcaaactgtttgaggatgagctgaccctggataacttgactcgccctcagctggtcgcactgtgcaagcttctggaactgcaatcaatcgggacaaataacttcttgcgcttccagttaaccatgagactcaggagcataaaggccgacgataaattgatagccgaggaaggcgtggattctctgaacgtgaaagagctccaggcagcttgtcgcgctcgaggcatgagagcgctaggagttacggaggaccggctgagagggcagctcaagcagtggctcgacttacacttgcaccaggagattcctactagcctcctcattttatcgcgcgcaatgtacctccccgacaccctgagcccggcagaccagctcaagtcaacgttgcaaaccctgcccgaaatagtggcaaaagaggcccaggtgaaagtggcggaggtggaaggcgagcaggtagataacaaggccaaactggaagccacgctgcaggaagaggctgctatccagcaagaacaccgggaaaaggaactgcaaaaacggagcgaagttgcaaaagacttcgagcctgagcgggtggtggcggctcctcagagacccggtaccgagccgcaaccagagatgcctgacaccgtgctccagagcgaaacgctcaaggacaccgcgcctgtccttgagggtttgaaggaggaggaaattaccaaagaggaaatcgacatcctgagcgacgcctgctccaagttacaggagcagaagaagtccctcaccaaagagaaagaagagttggagctactgaaagaggacgtgcaggactatagtgaagacctgcaggaaatcaagaaggagctctccaagacaggggaggagaagtacgttgaggagtctaaagcttctaagaggttaaccaagagagtgcagcagatgattggccagattgatgggttaatcagccagctcgagatggaccaacaggccggaaaactagctccagccaatggtatgcctacaggtgagaacgtgatctccgtagctgagctgattaacgcgatgaaacaggttaaacatatcccggagtctaaacttacctccctagcggctgccctcgacgagaacaaagacgggaaagtgaatattgatgacctagtcaaggtcattgaactcgtcgataaagaggacgtgcatattagcacatcgcaggtcgcagagatagtcgccaccttagaaaaggaagaaaaggtggaagaaaaagaaaaagctaaagaaaaggctgagaaagaagtcgccgaggtcaaaagctag

SEQ ID NO: 173962 - DNA, 2220 bp, Artificial Sequence
  derived and/or modified sequence
atggccagcatcctgctgagaagctgcagaggcagagcccccgccagactgccccccccccccagatacaccgtgcccagaggcagccccggcgaccccgcccacctgagctgcgccagcaccctgggcctgagaaactgcctgaacgtgcccttcggctgctgcacccccatccaccccgtgtacaccagcagcagaggcgaccacctgggctgctgggccctgagacccgagtgcctgagaatcgtgagcagagccccctggaccagcaccagcgtgggcttcgtggccgtgggcccccagtgcctgcccgtgagaggctggcacagcagcagacccgtgagagacgacagcgtggtggagaagagcctgaagagcctgaaggacaagaacaagaagctggaggagggcggccccgtgtacagcccccccgccgaggtggtggtgaagaagagcctgggccagagagtgctggacgagctgaagcactactaccacggcttcagactgctgtggatcgacaccaagatcgccgccagaatgctgtggagaatcctgaacggccacagcctgaccagaagagagagaagacagttcctgagaatctgcgccgacctgttcagactggtgcccttcctggtgttcgtggtggtgcccttcatggagttcctgctgcccgtggccgtgaagctgttccccaacatgctgcccagcaccttcgagacccagagcctgaaggaggagagactgaagaaggagctgagagtgaagctggagctggccaagttcctgcaggacaccatcgaggagatggccctgaagaacaaggccgccaagggcagcgccaccaaggacttcagcgtgttcttccagaagatcagagagaccggcgagagacccagcaacgaggagatcatgagattcagcaagctgttcgaggacgagctgaccctggacaacctgaccagaccccagctggtggccctgtgcaagctgctggagctgcagagcatcggcaccaacaacttcctgagattccagctgaccatgagactgagaagcatcaaggccgacgacaagctgatcgccgaggagggcgtggacagcctgaacgtgaaggagctgcaggccgcctgcagagccagaggcatgagagccctgggcgtgaccgaggacagactgagaggccagctgaagcagtggctggacctgcacctgcaccaggagatccccaccagcctgctgatcctgagcagagccatgtacctgcccgacaccctgagccccgccgaccagctgaagagcaccctgcagaccctgcccgagatcgtggccaaggaggcccaggtgaaggtggccgaggtggagggcgagcaggtggacaacaaggccaagctggaggccaccctgcaggaggaggccgccatccagcaggagcacagagagaaggagctgcagaagagaagcgaggtggccaaggacttcgagcccgagagagtggtggccgccccccagagacccggcaccgagccccagcccgagatgcccgacaccgtgctgcagagcgagaccctgaaggacaccgcccccgtgctggagggcctgaaggaggaggagatcaccaaggaggagatcgacatcctgagcgacgcctgcagcaagctgcaggagcagaagaagagcctgaccaaggagaaggaggagctggagctgctgaaggaggacgtgcaggactacagcgaggacctgcaggagatcaagaaggagctgagcaagaccggcgaggagaagtacgtggaggagagcaaggccagcaagagactgaccaagagagtgcagcagatgatcggccagatcgacggcctgatcagccagctggagatggaccagcaggccggcaagctggcccccgccaacggcatgcccaccggcgagaacgtgatcagcgtggccgagctgatcaacgccatgaagcaggtgaagcacatccccgagagcaagctgaccagcctggccgccgccctggacgagaacaaggacggcaaggtgaacatcgacgacctggtgaaggtgatcgagctggtggacaaggaggacgtgcacatcagcaccagccaggtggccgagatcgtggccaccctggagaaggaggagaaggtggaggagaaggagaaggccaaggagaaggccgagaaggaggtggccgaggtgaagagctag

SEQ ID NO: 173963 - DNA, 2268 bp, Artificial Sequence
  derived and/or modified sequence
atggccagaaagctgagcgtgatcctgatcctgaccttcgccctgagcgtgaccaaccccctgcacgagctgaaggccgccgccttcccccagaccaccgagaagatcagccccaactgggagagcggcatcaacgtggacctggccatcagcaccagacagtaccacctgcagcagctgttctacagatacggcgagaacaacagcctgagcgtggagggcttcagaaagctgctgcagaacatcggcatcgacaagatcaagagaatccacatccaccacgaccacgaccaccacagcgaccacgagcaccacagcgaccacgagagacacagcgaccacgagcaccacagcgagcacgagcaccacagcgaccacgaccaccacagccaccacaaccacgccgccagcggcaagaacaagagaaaggccctgtgccccgaccacgacagcgacagcagcggcaaggaccccagaaacagccagggcaagggcgcccacagacccgagcacgccagcggcagaagaaacgtgaaggacagcgtgagcgccagcgaggtgaccagcaccgtgtacaacaccgtgagcgagggcacccacttcctggagaccatcgagacccccagacccggcaagctgttccccaaggacgtgagcagcagcaccccccccagcgtgaccagcaagagcagagtgagcagactggccggcagaaagaccaacgagagcgtgagcgagcccagaaagggcttcatgtacagcagaaacaccaacgagaacccccaggagtgcttcaacgccagcaagctgctgaccagccacggcatgggcatccaggtgcccctgaacgccaccgagttcaactacctgtgccccgccatcatcaaccagatcgacgccagaagctgcctgatccacaccagcgagaagaaggccgagatcccccccaagacctacagcctgcagatcgcctgggtgggcggcttcatcgccatcagcatcatcagcttcctgagcctgctgggcgtgatcctggtgcccctgatgaacagagtgttcttcaagttcctgctgagcttcctggtggccctggccgtgggcaccctgagcggcgacgccttcctgcacctgctgccccacagccacgccagccaccaccacagccacagccacgaggagcccgccatggagatgaagagaggccccctgttcagccacctgagcagccagaacatcgaggagagcgcctacttcgacagcacctggaagggcctgaccgccctgggcggcctgtacttcatgttcctggtggagcacgtgctgaccctgatcaagcagttcaaggacaagaagaagaagaaccagaagaagcccgagaacgacgacgacgtggagatcaagaagcagctgagcaagtacgagagccagctgagcaccaacgaggagaaggtggacaccgacgacagaaccgagggctacctgagagccgacagccaggagcccagccacttcgacagccagcagcccgccgtgctggaggaggaggaggtgatgatcgcccacgcccacccccaggaggtgtacaacgagtacgtgcccagaggctgcaagaacaagtgccacagccacttccacgacaccctgggccagagcgacgacctgatccaccaccaccacgactaccaccacatcctgcaccaccaccaccaccagaaccaccacccccacagccacagccagagatacagcagagaggagctgaaggacgccggcgtggccaccctggcctggatggtgatcatgggcgacggcctgcacaacttcagcgacggcctggccatcggcgccgccttcaccgagggcctgagcagcggcctgagcaccagcgtggccgtgttctgccacgagctgccccacgagctgggcgacttcgccgtgctgctgaaggccggcatgaccgtgaagcaggccgtgctgtacaacgccctgagcgccatgctggcctacctgggcatggccaccggcatcttcatcggccactacgccgagaacgtgagcatgtggatcttcgccctgaccgccggcctgttcatgtacgtggccctggtggacatggtgcccgagatgctgcacaacgacgccagcgaccacggctgcagcagatggggctacttcttcctgcagaacgccggcatgctgctgggcttcggcatcatgctgctgatcagcatcttcgagcacaagatcgtgttcagaatcaacttctag

SEQ ID NO: 173964 - DNA, 2268 bp, Artificial Sequence
  derived and/or modified sequence
atggcaaggaagctgtcagtgatccttatccttacctttgctctttctgtgacaaatcccctgcatgaacttaaagcagccgcgttcccccaaaccactgagaaaatatcccctaactgggagagcggaattaacgtcgatctggctatttccactcgacagtaccatctgcaacagcttttctatcgatacggcgaaaataactccctatccgtggagggtttcaggaaattgctccagaacatcggaatcgataaaatcaagcgaatccacatccaccacgatcatgaccatcacagtgatcacgaacatcatagtgaccacgagcggcattctgaccatgaacaccacagcgaacacgagcatcacagtgaccatgatcaccactcccaccacaaccatgccgcctccggaaaaaacaaaagaaaagccctttgccccgatcatgattcagattcctcgggaaaagatccgcgcaattcgcaagggaagggggcccacagacctgagcacgccagcgggcggcgcaatgtaaaggactcagtgtctgccagcgaagttacatctacggtttataacactgtgagcgaaggtacacactttctggagactatcgaaaccccgcgtcctggaaagctattccccaaggacgtctctagtagtacccctcccagcgttacctccaagtccagggtgtctagactggccggaagaaaaactaatgaatccgtcagcgaacctagaaagggttttatgtacagcaggaacacaaatgaaaaccctcaggagtgttttaacgccagcaagctgctgactagccacggcatggggattcaggtcccactgaacgccaccgaatttaactacctctgtccagccattatcaatcagattgatgccaggtcatgtctcattcacacaagcgagaaaaaggcagagatccccccaaaaacctatagtctccagattgcttgggtgggtggattcatcgccatcagcattatcagttttttgagccttcttggagtcattctagtcccacttatgaatagagtctttttcaaatttctcctgagcttcttggtcgctttggctgtgggaacattgagcggtgatgcatttttgcacttactgccccattctcacgcgagccaccaccatagtcatagtcacgaggagcccgcaatggaaatgaaacgaggacccctgttttcccatctttcgtcacagaatatagaggaatctgcttacttcgactccacatggaagggcctgaccgccctgggcggcctctatttcatgttcctggtcgaacatgtgcttacactaatcaaacagtttaaagataagaagaaaaaaaaccagaaaaagccagagaatgacgatgatgtcgagatcaagaaacaactctctaagtatgagtctcagctgagcacgaacgaagaaaaggttgacaccgacgaccggactgagggttatttgcgtgctgattcccaggagccgtcccacttcgatagtcagcagcccgcagtcctggaggaagaggaggtgatgatagcacacgctcatccccaggaggtgtataatgaatatgtgcctcgaggttgcaagaacaagtgccattctcatttccacgatacacttggccagtctgacgatttgattcaccatcaccacgactaccaccacatcctacaccaccaccatcaccagaatcaccatcctcacagccatagtcagagatatagccgggaggagctgaaagacgcaggcgtggcaaccctggcttggatggtcattatgggagatggccttcacaatttttcagatggactggctattggggctgcgttcacagaagggttgagctccggactctccacaagtgttgcagtcttttgtcacgagcttcctcatgagctcggcgacttcgccgtgcttctgaaagctggaatgactgtgaaacaagcagtgctgtacaatgctttgagtgctatgctcgcgtatttgggtatggcaactggcattttcattgggcactatgcagagaatgtgagcatgtggattttcgccctcactgccgggctgtttatgtacgtcgcacttgtcgatatggttcccgaaatgttgcacaacgacgctagtgaccacgggtgtagccgctggggatatttttttctccagaacgccggcatgctgctcggatttggaataatgctgcttattagtatatttgagcacaaaatagtctttagaattaatttctag

SEQ ID NO: 173965 - DNA, 2268 bp, Artificial Sequence
  derived and/or modified sequence
atggccaggaagctgagcgtcatcctgatcctgacctttgccctgtctgtgaccaaccccctgcacgagctgaaggctgctgccttcccccagaccacagagaagatcagccccaactgggagagcggcatcaacgtggacctggccatcagcacccggcagtaccacctgcagcagctgttctaccgctacggggagaacaacagcctgtctgtggagggcttcaggaagctgctgcagaacatcggcatcgacaagatcaagaggatccacatccaccacgaccatgaccaccacagcgaccacgagcaccacagcgaccacgagcggcacagcgaccacgagcaccacagcgagcacgagcaccacagcgaccatgaccaccacagccaccacaaccacgccgccagcggcaagaacaagaggaaggccctgtgcccagaccatgacagcgacagcagcggcaaggaccccaggaacagccagggcaagggggcccacaggcctgagcacgccagcggcagaagaaatgtgaaggacagcgtgtctgccagcgaggtgaccagcacagtgtacaacacagtgtctgagggcacccacttcctggagaccatcgagacccccaggcctgggaagctgttccccaaggatgtgagcagcagcaccccaccttctgtgaccagcaagagccgggtgtcccggctggccggcaggaagaccaatgaatctgtgtctgagcccaggaagggcttcatgtacagcaggaacaccaatgaaaacccccaggagtgcttcaatgccagcaagctgctgaccagccacggcatgggcatccaggtgcccctgaatgccacagagttcaactacctgtgcccagccatcatcaaccagattgatgcccggagctgcctgatccacaccagcgagaagaaggccgagatcccccccaagacctacagcctgcagatcgcctgggtgggcggcttcatcgccatcagcatcatctccttcctgagcctgctgggcgtcatcctggtgcccctgatgaacagagtcttcttcaagttcctgctgtccttcctggtggccctggccgtgggcaccctgtctggagatgccttcctgcacctgctgccccacagccacgccagccaccaccacagccacagccatgaggagcccgccatggagatgaagaggggccccctcttcagccacctgagcagccagaacatcgaggagagcgcctactttgacagcacctggaagggcctgacagccctgggcggcctgtacttcatgttcctggtggagcacgtgctgaccctcatcaagcagttcaaggacaagaagaagaagaaccagaagaagccagaaaatgatgatgatgtggagatcaagaagcagctgagcaaatatgagagccagctgagcaccaatgaggagaaggtggacacagatgacagaacagagggctacctgcgggctgacagccaggagcccagccactttgacagccagcagcctgctgtgctggaggaggaggaggtgatgattgcccacgcccacccccaggaggtgtacaatgaatatgtgccccggggctgcaagaacaagtgccacagccacttccatgacaccctgggccagagtgatgacctgatccaccaccaccacgactaccaccacatcctgcaccaccaccaccaccagaaccaccacccccacagccacagccagcgctacagccgggaggagctgaaggatgctggggtggccaccctggcctggatggtgatcatgggagatggcctgcacaacttcagtgatggcctggccatcggggccgccttcacagagggcctgagcagcggcctgagcacctctgtggccgtgttctgccacgagctgccccatgagctgggggactttgctgtgctgctgaaggccggcatgacagtgaagcaggccgtgctgtacaatgccctgagcgccatgctggcctacctgggcatggccaccggcatcttcatcggccactatgcagaaaatgtgtccatgtggatctttgccctgacagctggcctcttcatgtatgtggccctggtggacatggtgcctgagatgctgcacaatgatgccagtgaccacggctgcagccgctggggctacttcttcctgcagaatgccggcatgctgctgggcttcggcatcatgctgctgatcagcatctttgagcacaagatcgtgttccgcatcaacttctag

SEQ ID NO: 173966 - DNA, 2268 bp, Artificial Sequence
  derived and/or modified sequence
atggcccggaagctgagcgtgatcctgatcctgaccttcgccctgagcgtcaccaaccccctgcacgaactgaaggctgcagcattcccccagaccacggaaaagatcagccctaattgggagagtggcatcaacgtggacttggcaatctcaaccaggcagtatcatctgcagcaactattctaccgttatggagaaaacaacagcctctccgtcgaaggattccgcaagttgctgcaaaacattgggattgataagataaaacggatacacatccaccacgatcatgaccaccattccgatcatgagcaccactccgatcacgaacgccactcagatcacgaacatcatagcgagcatgaacatcacagcgatcatgatcaccactctcaccataatcacgccgctagcggcaaaaataagcggaaggccctgtgtccagaccacgatagcgactccagtgggaaggaccctcggaatagccagggaaaaggtgctcaccggccagaacacgcgtcaggcagacgcaatgtaaaagattccgtctcagcaagcgaggttacctctaccgtttacaatacggtgtctgagggcacccacttcttggagacaatcgagacaccgagaccagggaagctgttccctaaggacgtgtcgtcctccactcccccctctgtaactagcaaatctcgggtctctaggcttgcgggcaggaaaacaaacgagagtgtaagtgagccccgaaagggattcatgtacagtagaaacacaaacgaaaacccccaggaatgtttcaacgcaagtaagttgctgacctcccatggcatgggcatccaggtacctctgaacgccacagagtttaattatttatgccccgctataattaatcaaattgatgcacgctcatgtctgattcacacatccgagaagaaagcagaaattcctccaaaaacctactcactgcagattgcttgggtgggagggtttatcgcaattagcattatctccttcctctctcttttgggtgtgatcctggttcctttgatgaacagagttttttttaagtttctcctgtccttcctggtggcccttgccgtcggcactctgagtggagatgcattcctacatctcctgccgcactctcatgccagccatcatcatagccactcgcacgaggaaccagccatggagatgaagaggggccccctattctctcacctcagttcccaaaatattgaggaatcagcctactttgactccacctggaagggattgacggcccttggcggactatacttcatgttccttgttgaacatgttctgacactgatcaaacagttcaaggataaaaagaagaagaatcagaagaagccagaaaacgacgacgacgtggaaatcaaaaagcagctgtccaagtatgagtcccagctctcaaccaacgaagagaaagtagacaccgacgatcgcacggaggggtacctgcgagccgatagccaagagcccagccatttcgattcgcagcagccagccgtgctggaggaggaggaagtcatgatcgcccacgcccacccacaagaagtctacaatgagtacgtgccgcgaggctgcaagaataagtgtcactcacatttccatgatacgctggggcagagcgatgatctgattcaccaccaccacgactatcatcacattctgcatcaccaccaccatcagaaccaccacccacactcacacagccagagatatagtcgagaggagttaaaagacgccggcgtcgctaccttagcatggatggtgattatgggggatggtcttcacaatttttcagacgggcttgccatcggcgccgcctttacagaaggtctttcaagcggtctgtccacctctgtggctgtgttttgtcatgagctccctcatgagttgggcgactttgccgtgctgcttaaggccggtatgaccgttaagcaagctgtgttgtacaacgcactatccgcgatgctcgcctacctgggaatggcgactggcatctttattggtcattacgcggagaatgtgagcatgtggatattcgccttaaccgcaggtctgtttatgtacgttgccctcgtggatatggtccccgaaatgctacacaacgacgcctcggaccatgggtgttcacgctgggggtacttttttctgcagaacgccggtatgctccttggctttggcatcatgctgttgattagcatttttgagcacaagattgtcttccggattaatttctag

SEQ ID NO: 173967 - DNA, 2268 bp, Artificial Sequence
  derived and/or modified sequence
atggcgcgaaaactatccgtgatcctaatcttaacttttgccctatcggtcaccaatccattacatgagctcaaggccgctgcttttccccaaaccactgagaagatatctcctaactgggagtctggcattaatgtagacttggccatctccacccggcagtatcatctgcagcagctgttctatcgctatggggagaacaacagtttatccgttgaaggatttagaaagctcctgcagaacattggcattgataaaatcaagagaattcatattcatcatgatcacgatcatcattccgaccatgaacaccactccgatcacgaaaggcacagtgaccatgagcaccatagcgaacatgaacaccatagcgaccatgaccaccactcacaccacaaccatgctgcctccggtaaaaacaagcgaaaggcactgtgccccgaccacgactctgactctagtggaaaggaccccagaaacagtcaaggaaagggcgcacatcgccctgagcacgcatctggaagaagaaacgtaaaggattctgtgtccgcctctgaagtgacttccactgtgtataacaccgtttccgaaggtacccacttcttggagaccatcgaaactcctaggcccggaaagctgtttcccaaggacgtgagcagctccaccccaccgagcgtcacgtctaaaagtagagtaagcaggctcgcaggccgtaagacaaacgaatctgtttctgagcctcgtaaaggattcatgtatagtcggaacaccaatgagaaccctcaggagtgttttaacgccagcaaactattgacttcgcacgggatgggcattcaggtacccctgaatgccacagaatttaactatctctgcccagctatcataaatcagatcgatgcccgaagctgcctaattcacacctcagagaaaaaagccgagatcccccctaaaacctactccttgcaaatcgcttgggttggaggctttatcgctatcagcatcataagctttctgtccctgctgggggttattcttgtcccactgatgaatcgagtgttcttcaagttcctcctgtcattcctggtagcactagccgtggggaccctgtccggtgatgcctttctccacctgttaccacattcacacgcctctcaccaccactcccactcccacgaggaaccggctatggaaatgaagcggggacccctcttttctcacttatctagccagaatattgaggagagcgcttacttcgacagtacctggaagggcctcacagctctgggtggtctgtatttcatgtttctggtcgagcacgtgctgaccctcattaagcaattcaaagacaagaagaagaagaaccagaagaaaccagagaatgatgatgacgtggagataaagaaacagctgtcaaagtacgagtctcagctttccacaaacgaagaaaaagtcgatactgatgaccgcaccgagggatacttaagggctgactctcaggagccgagccatttcgattctcaacagccagccgtgctagaggaggaagaggtgatgatcgctcacgctcatccccaagaagtctacaacgaatacgtgccgaggggctgtaagaacaaatgccattcgcattttcacgatactcttggacagtctgacgacctgattcaccaccaccacgattatcatcacatcctgcaccaccaccaccaccagaatcaccacccgcacagccattctcagcgctacagcagggaggaactgaaggatgcgggagttgccacactggcatggatggtcatcatgggagatgggctacacaacttcagtgacggcctcgccataggtgcagcattcactgaagggttgtctagcggcctatcaacgtcggtcgccgtgttctgccacgagctgccgcatgagttgggggattttgccgtactcctcaaagctggcatgacagtcaagcaggcggtgctctacaatgctttgagcgcaatgttggcctacttgggtatggcgactgggatcttcatcgggcactacgccgaaaacgtctccatgtggatcttcgctttgaccgccggactcttcatgtacgtggccctcgtcgacatggttccagagatgttgcacaatgacgcctccgatcatggctgctcacggtggggctacttctttcttcagaatgccggaatgctgctcgggttcggcatcatgctgctgatctccattttcgaacataagatcgttttcaggatcaacttttag

SEQ ID NO: 173968 - DNA, 3619 bp, Artificial Sequence
  derived and/or modified sequence
agtcctgggcgaagggggcggtggttccccgcggcgctgcgcgcggcggtaattagtgattgtcttccagcttcgcgaaggctaggggcgcggctgccgggtggctgcgcggcgctgcccccggaccgaggggcagccaacccaatgaaaccaccgcgtgttcgcgcctggtagagatttctcgaagacaccagtgggcccgttccgagccctctggaccgcccgtgtggaaccaaacctgcgcgcgtggccgggccgtgggacaacgaggccgcggagacgaaggcgcaatggcgaggaagttatctgtaatcttgatcctgacctttgccctctctgtcacaaatccccttcatgaactaaaagcagctgctttcccccagaccactgagaaaattagtccgaattgggaatctggcattaatgttgacttggcaatttccacacggcaatatcatctacaacagcttttctaccgctatggagaaaataattctttgtcagttgaagggttcagaaaattacttcaaaatataggcatagataagattaaaagaatccatatacaccatgaccacgaccatcactcagaccacgagcatcactcagaccatgagcgtcactcagaccatgagcatcactcagagcacgagcatcactctgaccatgatcatcactctcaccataatcatgctgcttctggtaaaaataagcgaaaagctctttgcccagaccatgactcagatagttcaggtaaagatcctagaaacagccaggggaaaggagctcaccgaccagaacatgccagtggtagaaggaatgtcaaggacagtgttagtgctagtgaagtgacctcaactgtgtacaacactgtctctgaaggaactcactttctagagacaatagagactccaagacctggaaaactcttccccaaagatgtaagcagctccactccacccagtgtcacatcaaagagccgggtgagccggctggctggtaggaaaacaaatgaatctgtgagtgagccccgaaaaggctttatgtattccagaaacacaaatgaaaatcctcaggagtgtttcaatgcatcaaagctactgacatctcatggcatgggcatccaggttccgctgaatgcaacagagttcaactatctctgtccagccatcatcaaccaaattgatgctagatcttgtctgattcatacaagtgaaaagaaggctgaaatccctccaaagacctattcattacaaatagcctgggttggtggttttatagccatttccatcatcagtttcctgtctctgctgggggttatcttagtgcctctcatgaatcgggtgtttttcaaatttctcctgagtttccttgtggcactggccgttgggactttgagtggtgatgcttttttacaccttcttccacattctcatgcaagtcaccaccatagtcatagccatgaagaaccagcaatggaaatgaaaagaggaccacttttcagtcatctgtcttctcaaaacatagaagaaagtgcctattttgattccacgtggaagggtctaacagctctaggaggcctgtatttcatgtttcttgttgaacatgtcctcacattgatcaaacaatttaaagataagaagaaaaagaatcagaagaaacctgaaaatgatgatgatgtggagattaagaagcagttgtccaagtatgaatctcaactttcaacaaatgaggagaaagtagatacagatgatcgaactgaaggctatttacgagcagactcacaagagccctcccactttgattctcagcagcctgcagtcttggaagaagaagaggtcatgatagctcatgctcatccacaggaagtctacaatgaatatgtacccagagggtgcaagaataaatgccattcacatttccacgatacactcggccagtcagacgatctcattcaccaccatcatgactaccatcatattctccatcatcaccaccaccaaaaccaccatcctcacagtcacagccagcgctactctcgggaggagctgaaagatgccggcgtcgccactctggcctggatggtgataatgggtgatggcctgcacaatttcagcgatggcctagcaattggtgctgcttttactgaaggcttatcaagtggtttaagtacttctgttgctgtgttctgtcatgagttgcctcatgaattaggtgactttgctgttctactaaaggctggcatgaccgttaagcaggctgtcctttataatgcattgtcagccatgctggcgtatcttggaatggcaacaggaattttcattggtcattatgctgaaaatgtttctatgtggatatttgcacttactgctggcttattcatgtatgttgctctggttgatatggtacctgaaatgctgcacaatgatgctagtgaccatggatgtagccgctgggggtatttctttttacagaatgctgggatgcttttgggttttggaattatgttacttatttccatatttgaacataaaatcgtgtttcgtataaatttctagttaaggtttaaatgctagagtagcttaaaaagttgtcatagtttcagtaggtcatagggagatgagtttgtatgctgtactatgcagcgtttaaagttagtgggttttgtgatttttgtattgaatattgctgtctgttacaaagtcagttaaaggtacgttttaatatttaagttattctatcttggagataaaatctgtatgtgcaattcaccggtattaccagtttattatgtaaacaagagatttggcatgacatgttctgtatgtttcagggaaaaatgtctttaatgctttttcaagaactaacacagttattcctatactggattttaggtctctgaagaactgctggtgtttaggaataagaatgtgcatgaagcctaaaataccaagaaagcttatactgaatttaagcaaagaaataaaggagaaaagagaagaatctgagaattggggaggcatagattcttataaaaatcacaaaatttgttgtaaattagaggggagaaatttagaattaagtataaaaaggcagaattagtatagagtacattcattaaacatttttgtcaggattatttcccgtaaaaacgtagtgagcacttttcatatactaatttagttgtacatttaactttgtataatacagaaatctaaatatatttaatgaattcaagcaatatatcacttgaccaagaaattggaatttcaaaatgttcgtgcgggtatataccagatgagtacagtgagtagttttatgtatcaccagactgggttattgccaagttatatatcaccaaaagctgtatgactggatgttctggttacctggtttacaaaattatcagagtagtaaaactttgatatatatgaggatattaaaactacactaagtatcatttgattcgattcagaaagtactttgatatctctcagtgcttcagtgctatcattgtgagcaattgtcttttatatacggtactgtagccatactaggcctgtctgtggcattctctagatgtttcttttttacacaataaattccttatatcagcttg

SEQ ID NO: 173969 - DNA, 1666 bp, Artificial Sequence
  derived and/or modified sequence
agtcctgggcgaagggggcggtggttccccgcggcgctgcgcgcggcggtaattagtgattgtcttccagcttcgcgaaggctaggggcgcggctgccgggtggctgcgcggcgctgcccccggaccgaggggcagccaacccaatgaaaccaccgcgtgttcgcgcctggtagagatttctcgaagacaccagtgggcccgttccgagccctctggaccgcccgtgtggaaccaaacctgcgcgcgtggccgggccgtgggacaacgaggccgcggagactgtttcaatgcatcaaagctactgacatctcatggcatgggcatccaggttccgctgaatgcaacagagttcaactatctctgtccagccatcatcaaccaaattgatgctagatcttgtctgattcatacaagtgaaaagaaggctgaaatccctccaaagacctattcattacaaatagcctgggttggtggttttatagccatttccatcatcagtttcctgtctctgctgggggttatcttagtgcctctcatgaatcgggtgtttttcaaatttctcctgagtttccttgtggcactggccgttgggactttgagtggtgatgcttttttacaccttcttccacattctcatgcaagtcaccaccatagtcatagccatgaagaaccagcaatggaaatgaaaagaggaccacttttcagtcatctgtcttctcaaaacatagaagaaagtgcctattttgattccacgtggaagggtctaacagctctaggaggcctgtatttcatgtttcttgttgaacatgtcctcacattgatcaaacaatttaaagataagaagaaaaagaatcagaagaaacctgaaaatgatgatgatgtggagattaagaagcagttgtccaagtatgaatctcaactttcaacaaatgaggagaaagtagatacagatgatcgaactgaaggctatttacgagcagactcacaagagccctcccactttgattctcagcagcctgcagtcttggaagaagaagaggtcatgatagctcatgctcatccacaggaagtctacaatgaatatgtacccagagggtgcaagaataaatgccattcacatttccacgatacactcggccagtcagacgatctcattcaccaccatcatgactaccatcatattctccatcatcaccaccaccaaaaccaccatcctcacagtcacagccagcgctactctcgggaggagctgaaagatgccggcgtcgccactctggcctggatggtgataatgggtgatggcctgcacaatttcagcgatggcctagcaattggtgctgcttttactgaaggcttatcaagtggtttaagtacttctgttgctgtgttctgtcatgagttgcctcatgaattaggtgactttgctgttctactaaaggctggcatgaccgttaagcaggctgtcctttataatgcattgtcagccatgctggcgtatcttggaatggcaacaggaattttcattggtcattatgctgaaaatgtttctatgtggatatttgcacttactgctggcttattcatgtatgttgctctggttgatatggtaagtttttaagaagtcttattacattattgaccaacaataaaatagagaaaatattc

SEQ ID NO: 173970 - DNA, 1774 bp, Artificial Sequence
  derived and/or modified sequence
aattagtgattgtcttccagcttcgcgaaggctaggggcgcggctgccgggtggctgcgcggcgctgcccccggaccgaggggcagccaacccaatgaaaccaccgcgtgttcgcgcctggtagagatttctcgaagacaccagtgggcccgttccgagccctctggaccgcccgtgtggaaccaaacctgcgcgcgtggccgggccgtgggacaacgaggccgcggagactgtttcaatgcatcaaagctactgacatctcatggcatgggcatccaggttccgctgaatgcaacagagttcaactatctctgtccagccatcatcaaccaaattgatgctagatcttgtctgattcatacaagtgaaaagaaggctgaaatccctccaaagacctattcattacaaatagcctgggttggtggttttatagccatttccatcatcagtttcctgtctctgctgggggttatcttagtgcctctcatgaatcgggtgtttttcaaatttctcctgagtttccttgtggcactggccgttgggactttgagtggtgatgcttttttacaccttcttccacattctcatgcaagtcaccaccatagtcatagccatgaagaaccagcaatggaaatgaaaagaggaccacttttcagtcatctgtcttctcaaaacatagaagaaagtgcctattttgattccacgtggaagggtctaacagctctaggaggcctgtatttcatgtttcttgttgaacatgtcctcacattgatcaaacaatttaaagataagaagaaaaagaatcagaagaaacctgaaaatgatgatgatgtggagattaagaagcagttgtccaagtatgaatctcaactttcaacaaatgaggagaaagtagatacagatgatcgaactgaaggctatttacgagcagactcacaagagccctcccactttgattctcagcagcctgcagtcttggaagaagaagaggtcatgatagctcatgctcatccacaggaagtctacaatgaatatgtacccagagggtgcaagaataaatgccattcacatttccacgatacactcggccagtcagacgatctcattcaccaccatcatgactaccatcatattctccatcatcaccaccaccaaaaccaccatcctcacagtcacagccagcgctactctcgggaggagctgaaagatgccggcgtcgccactctggcctggatggtgataatgggtgatggcctgcacaatttcagcgatggcctagcaattggtgctgcttttactgaaggcttatcaagtggtttaagtacttctgttgctctggttgatatggtacctgaaatgctgcacaatgatgctagtgaccatggatgtagccgctgggggtatttctttttacagaatgctgggatgcttttgggttttggaattatgttacttatttccatatttgaacataaaatcgtgtttcgtataaatttctagttaaggtttaaatgctagagtagcttaaaaagttgtcatagtttcagtaggtcatagggagatgagtttgtatgctgtactatgcagcgtttaaagttagtgggttttgtgatttttgtattgaatattgctgtctgttacaaagtcagttaaaggtacgttttaatatttaagttattctatcttggagataaaatctgtatgtgcaattcaccggtattaccagtttattatgtaaacaagagatttggcatgacatgttctgtatgtttca

SEQ ID NO: 173971 - protein, 412 aa, Artificial Sequence
  derived and/or modified sequence
MGLHLRPYRVGLLPDGLLFLLLLLMLLADPALPAGRHPPVVLVPGDLGNQLEAKLDKPTVVHYLCSKKTESYFTIWLNLELLLPVIIDCWIDNIRLVYNKTSRATQFPDGVDVRVPGFGKTFSLEFLDPSKSSVGSYFHTMVESLVGWGYTRGEDVRGAPYDWRRAPNENGPYFLALREMIEEMYQLYGGPVVLVAHSMGNMYTLYFLQRQPQAWKDKYIRAFVSLGAPWGGVAKTLRVLASGDNNRIPVIGPLKIREQQRSAVSTSWLLPYNYTWSPEKVFVQTPTINYTLRDYRKFFQDIGFEDGWLMRQDTEGLVEATMPPGVQLHCLYGTGVPTPDSFYYESFPDRDPKICFGDGDGTVNLKSALQCQAWQSRQEHQVLLQELPGSEHIEMLANATTLAYLKRVLLGP

SEQ ID NO: 173972 - DNA, 957 bp, Artificial Sequence
  derived and/or modified sequence
atggggctgcacctccggccttacagagtcgggctgctacccgacgggttgttgtttttgttgctgctcctcatgctcctcgccgatcctgcccttcccgcaggtagacacccaccagtcgtccttggctggttcacgacaaagcaccctggcccaccctcctttctgatggtctggatgtacgtgagtcttgctcttggacgccctagccactggtcaagttggactcccgcaaaagccgcatgggtgccgattagcaccccctggtggcgagcactgtgggctggtgctactcacggcgtcagaatgagcgaggggctgcccatgaccggagcagagccccagagacagccacaggcctggaaggataagtacatcagagcctttgtcagcctgggtgctccatggggcggtgtggctaagaccctacgcgttctggcgtcaggcgacaacaatagaattcccgtcatcgggcctctgaaaatcagagagcaacagcgatcggctgtttcaactagctggcttttaccatacaattacacatggtcaccggagaaggtgttcgtgcagactccgacaataaactatacactgagagactatcgtaaatttttccaggatataggatttgaggatggctggctcatgagacaggatacggaaggcttggtagaggcaaccatgccccctggtgtgcagctgcactgcctgtatggaaccggcgtcccgacccctgatagcttttattacgagtcatttccagaccgtgacccaaagatttgtttcggggacggggacggaacagtcaatcttaagtcggcactccaatgtcaagcctggcagagccgacaggaacaccaggtgctgcttcaagagctgccgggaagcgaacatattgagatgctggctaatgccactaccctggcctatctgaaacgtgtgctgctcggaccttag

SEQ ID NO: 173973 - DNA, 1346 bp, Artificial Sequence
  derived and/or modified sequence
gattggccggggggatgcgggggatgcgggcggcggggttaagcgcgtcgccaccgcccccgcctaggcgagagcccagagagctgaacctgcatcccggacctgcggcgaccgtcgtacaccatgggcctccacctccgcccctaccgtgtggggctgctcccggatggcctcctgttcctcttgctgctgctaatgctgctcgcggacccagcgctcccggccggacgtcaccccccagtggtgctgggctggtttacaacaaaacatccagggccacccagtttcctgatggtgtggatgtacgtgtccctggctttgggaagaccttctcactggagttcctggaccccagcaaaagcagcgtgggttcctatttccacaccatggtggagagccttgtgggctggggctacacacggggtgaggatgtccgaggggctccctatgactggcgccgagccccaacggcagccgcaggcctggaaggacaagtatatccgggccttcgtgtcactgggtgcgccctgggggggcgtggccaagaccctgcgcgtcctggcttcaggagacaacaaccggatcccagtcatcgggcccctgaagatccgggagcagcagcggtcagctgtctccaccagctggctgctgccctacaactacacatggtcacctgagaaggtgttcgtgcagacacccacaatcaactacacactgcgggactaccgcaagttcttccaggacatcggctttgaagatggctggctcatgcggcaggacacagaagggctggtggaagccacgatgccacctggcgtgcagctgcactgcctctatggtactggcgtccccacaccagactccttctactatgagagcttccctgaccgtgaccctaaaatctgctttggtgacggcgatggtactgtgaacttgaagagtgccctgcagtgccaggcctggcagagccgccaggagcaccaagtgttgctgcaggagctgccaggcagcgagcacatcgagatgctggccaacgccaccaccctggcctatctgaaacgtgtgctccttgggccctgactcctgtgccacaggactcctgtggctcggccgtggacctgctgttggcctctggggctgtcatggcccacgcgttttgcaaagtttgtgactcaccattcaaggccccgagtcttggactgtgaagcatctgccatggggaagtgctgtttgttatcctttctctgtggcagtgaagaaggaagaaatgagagtctagactcaagggacactggatggcaagaatgctgctgatggtggaactgctgtgaccttaggactggctc

SEQ ID NO: 173974 - DNA, 639 bp, Artificial Sequence
  derived and/or modified sequence
atgggcctgcaccttcgcccttacagagtagggctcttgccagatggcctgctattccttcttctcttacttatgctgctggccgaccccgcacttcctgcaggtaggcaccctcccgtggtgttgggagataataaccggatcccagttattggacctcttaagatcagagaacagcaaagaagcgcagtgtcaacatcctggttgcttccgtataattatacatggtcacccgagaaagtcttcgtccagactccaactatcaattataccctgcgtgattatcgcaagttctttcaggacatcggattcgaggatggatggctcatgcgtcaggacacagagggactggtcgaggcaactatgcctcctggtgtccagctgcactgtctctatgggaccggggtgccgaccccggactccttctattatgaatcttttcctgaccgtgacccgaagatctgctttggtgacggcgatggaacagtaaaccttaaatccgcattacaatgccaggcctggcagagccggcaggaacaccaggtgctactgcaggagttacctggctctgagcatatcgagatgctcgccaatgccacaactttggcctatctaaaacgagtgcttctgggcccttag

SEQ ID NO: 173975 - DNA, 957 bp, Artificial Sequence
  derived and/or modified sequence
atggggctgcacctcaggccatatagagtcgggctgcttcctgatgggctgttgtttcttctgctgttgctcatgctgctggccgatcctgcacttcccgctggccgacaccccccagtggtattaggatggttcacaactaagcaccccgggccacctagctttttgatggtgtggatgtatgtctcccttgcactaggcagaccaagccactggtcaagctggactcccgccaaggccgcttgggtaccaatttctactccatggtggcgggccctctgggctggggccacccatggggtgaggatgtctgaaggtctgccaatgactggagcagagcctcaaagacaaccgcaagcttggaaggacaaatacattagagcatttgtctcacttggggcgccctggggtggagtagccaaaaccctgagagttcttgcttctggagacaataatcgtatcccggtgattggtccactgaaaattcgcgagcagcaaagatctgcagtctccacttcctggctgcttccatacaattatacctggtcccctgaaaaggttttcgtacagactccgaccatcaattataccctgagagattaccgcaagtttttccaggacattggttttgaagacgggtggttgatgcggcaggacacagaaggccttgtggaagctacaatgcccccgggagtgcagctgcactgcttatacggcaccggagtaccaaccccagacagcttctactatgagagtttcccagatcgggacccaaagatttgtttcggagacggagatggcaccgtaaacctaaaatccgcactacagtgtcaggcttggcaatccagacaagagcatcaggtactgctccaggagctgccggggagtgagcatatagagatgctggccaacgcaacaacactcgcttatctgaagcgcgtattgctagggccttag

SEQ ID NO: 173976 - DNA, 639 bp, Artificial Sequence
  derived and/or modified sequence
atgggtcttcacctccggccctaccgagtcggcctcctcccagatggactgctattcttattgctcttactgatgctgcttgccgaccccgctctgccagccggccgccacccacccgtagttctaggagataataatcgcattccggttattggccctttgaagatcagggagcagcagaggtctgccgtaagtacgagttggttgctgccttacaactacacatggtctccagagaaagtgttcgtgcaaaccccaaccataaattacactctacgcgactaccggaagttctttcaggacatcggcttcgaagatggttggttgatgaggcaggacaccgagggccttgtggaggctactatgccccctggagttcagctacactgtctttacggcaccggcgtgccaactcctgactcgttctattacgaaagtttccccgatcgtgatccaaagatctgtttcggcgacggcgacggaactgtcaatctgaaatcagctcttcagtgccaggcatggcaaagcaggcaggagcaccaagtcctgttgcaagagctccccgggtctgagcacatcgagatgcttgccaacgctacaaccctcgcttacctcaaaagggtcctccttggaccgtag

SEQ ID NO: 173977 - DNA, 943 bp, Artificial Sequence
  derived and/or modified sequence
gagagcccagagagctgaacctgcatcccggacctgcggcgaccgtcgtacaccatgggcctccacctccgcccctaccgtgtggggctgctcccggatggcctcctgttcctcttgctgctgctaatgctgctcgcggacccagcgctcccggccggacgtcaccccccagtggtgctgggagacaacaaccggatcccagtcatcgggcccctgaagatccgggagcagcagcggtcagctgtctccaccagctggctgctgccctacaactacacatggtcacctgagaaggtgttcgtgcagacacccacaatcaactacacactgcgggactaccgcaagttcttccaggacatcggctttgaagatggctggctcatgcggcaggacacagaagggctggtggaagccacgatgccacctggcgtgcagctgcactgcctctatggtactggcgtccccacaccagactccttctactatgagagcttccctgaccgtgaccctaaaatctgctttggtgacggcgatggtactgtgaacttgaagagtgccctgcagtgccaggcctggcagagccgccaggagcaccaagtgttgctgcaggagctgccaggcagcgagcacatcgagatgctggccaacgccaccaccctggcctatctgaaacgtgtgctccttgggccctgactcctgtgccacaggactcctgtggctcggccgtggacctgctgttggcctctggggctgtcatggcccacgcgttttgcaaagtttgtgactcaccattcaaggccccgagtcttggactgtgaagcatctgccatggggaagtgctgtttgttatcctttctctgtggcagtgaagaaggaagaaatgagagtctagactcaagggacactggatggcaagaatgctgctgatggtggaactgctgtg

SEQ ID NO: 173978 - DNA, 957 bp, Artificial Sequence
  derived and/or modified sequence
atgggactccatttacgaccctatcgcgttggcctgttgccggacggtctgctcttcctgctgctgctgctaatgctgctggccgaccccgctctccccgccggaaggcacccgcctgtggtcttgggatggttcaccacgaaacaccctgggcctccgtcattcctcatggtatggatgtatgtttccctagcactgggccggcccagtcactggtcatcctggactccagcaaaagcagcttgggtgccgatctcaaccccatggtggagggccctctgggcaggggctacacacggagtgaggatgtctgaaggtctgccaatgactggagcagagcctcaaagacaaccgcaagcttggaaggacaaatacattagagcatttgtctcacttggggcgccctggggtggagtagccaaaaccctgagagttcttgcttctggagacaataatcgtatcccggtgattggtccactgaaaattcgcgagcagcaaagatctgcagtctccacttcctggctgcttccatacaattatacctggtcccctgaaaaggttttcgtacagactccgaccatcaattataccctgagagattacagaaagtttttccaagacatcggattcgaagacggttggttaatgcggcaggacactgagggtttggttgaagcaactatgccacctggagtgcagctacattgcctgtacggtacaggggtacctacgcctgattctttctactacgaatctttcccagaccgggaccctaagatctgcttcggggatggggacggcaccgtgaatctgaagagcgcactccaatgccaggcctggcaatcacgacaagagcaccaagtcttactccaggaattacccggaagcgagcacatcgagatgctcgccaatgctactacacttgcttatcttaaacgtgtgctcctcgggccttag

SEQ ID NO: 173979 - DNA, 639 bp, Artificial Sequence
  derived and/or modified sequence
atgggtcttcacctccggccctaccgagtcggcctcctcccagatggactgctattcttattgctcttactgatgctgcttgccgaccccgctctgccagccggccgccacccacccgtagttctaggagataataatcgcattccggttattggccctttgaagatcagggagcagcagaggtctgccgtaagtacgagttggttgctgccttacaactacacatggtctccagagaaagtgttcgtgcaaaccccaaccataaattacactctacgcgactaccggaagttctttcaggacataggctttgaggacggatggctaatgcggcaagatacagaaggcctagtggaagccaccatgccaccaggtgtgcagcttcattgcctctatggaacaggagtgccaacgcccgattccttttattacgaaagttttccggacagggatcccaagatctgctttggggatggtgatggaacagtcaatttaaagagtgcattacagtgccaggcctggcaaagtagacaggagcaccaggtgctgctgcaggaattgccaggaagtgagcatattgaaatgttagctaatgcgaccactctggcttatctgaaacgagtgttacttggaccatag

SEQ ID NO: 173980 - DNA, 2727 bp, Artificial Sequence
  derived and/or modified sequence
aagcgcgtcgccaccgcccccgcctaggcgagagcccagagagctgaacctgcatcccggacctgcggcgaccgtcgtacaccatgggcctccacctccgcccctaccgtgtggggctgctcccggatggcctcctgttcctcttgctgctgctaatgctgctcgcggacccagcgctcccggccggacgtcaccccccagtggtgctggtccctggtgatttgggtaaccaactggaagccaagctggacaagccgacagtggtgcactacctctgctccaagaagaccgaaagctacttcacaatctggctgaacctggaactgctgctgcctgtcatcattgactgctggattgacaatatcaggctggtttacaacaaaacatccagggccacccagtttcctgatggtgtggatgtacgtgtccctggctttgggaagaccttctcactggagttcctggaccccagcaaaagcagcgtgggttcctatttccacaccatggtggagagccttgtgggctggggctacacacggggtgaggatgtccgaggggctccctatgactggcgccgagccccaaatgaaaacgggccctacttcctggccctccgcgagatgatcgaggagatgtaccagctgtatgggggccccgtggtgctggttgcccacagtatgggcaacatgtacacgctctactttctgcagcggcagccgcaggcctggaaggacaagtatatccgggccttcgtgtcactgggtgcgccctgggggggcgtggccaagaccctgcgcgtcctggcttcaggagacaacaaccggatcccagtcatcgggcccctgaagatccgggagcagcagcggtcagctgtctccaccagctggctgctgccctacaactacacatggtcacctgagaaggtgttcgtgcagacacccacaatcaactacacactgcgggactaccgcaagttcttccaggacatcggctttgaagatggctggctcatgcggcaggacacagaagggctggtggaagccacgatgccacctggcgtgcagctgcactgcctctatggtactggcgtccccacaccagactccttctactatgagagcttccctgaccgtgaccctaaaatctgctttggtgacggcgatggtactgtgaacttgaagagtgccctgcagtgccaggcctggcagagccgccaggagcaccaagtgttgctgcaggagctgccaggcagcgagcacatcgagatgctggccaacgccaccaccctggcctatctgaaacgtgtgctccttgggccctgactcctgtgccacaggactcctgtggctcggccgtggacctgctgttggcctctggggctgtcatggcccacgcgttttgcaaagtttgtgactcaccattcaaggccccgagtcttggactgtgaagcatctgccatggggaagtgctgtttgttatcctttctctgtggcagtgaagaaggaagaaatgagagtctagactcaagggacactggatggcaagaatgctgctgatggtggaactgctgtgaccttaggactggctccacagggtggactggctgggccctggtcccagtccctgcctggggccatgtgtcccccctattcctgtgggcttttcatacttgcctactgggccctggccccgcagccttcctatgagggatgttactgggctgtggtcctgtacccagaggtcccagggatcggctcctggcccctcgggtgacccttcccacacaccagccacagataggcctgccactggtcatgggtagctagagctgctggcttccctgtggcttagctggtggccagcctgactggcttcctgggcgagcctagtagctcctgcaggcaggggcagtttgttgcgttcttcgtggttcccaggccctgggacatctcactccactcctacctcccttaccaccaggagcattcaagctctggattgggcagcagatgtgcccccagtcccgcaggctgtgttccaggggccctgatttcctcggatgtgctattggccccaggactgaagctgcctcccttcaccctgggactgtggttccaaggatgagagcaggggttggagccatggccttctgggaacctatggagaaagggaatccaaggaagcagccaaggctgctcgcagcttccctgagctgcacctcttgctaaccccaccatcacactgccaccctgccctagggtctcactagtaccaagtgggtcagcacagggctgaggatggggctcctatccaccctggccagcacccagcttagtgctgggactagcccagaaacttgaatgggaccctgagagagccaggggtcccctgaggcccccctaggggctttctgtctgccccagggtgctccatggatctccctgtggcagcaggcatggagagtcagggctgccttcatggcagtaggctctaagtgggtgactggccacaggccgagaaaagggtacagcctctaggtggggttcccaaagacgccttcacgctggactgagctgctctcccacagggtttctgtgcagctggattttctctgttgcatacatgcctggcatctgtctccccttgttcctgagtggccccacatggggctctgagcaggctgtatctggattctggcaataaaagtactctggatgctgtaaggtg

SEQ ID NO: 173981 - DNA, 957 bp, Artificial Sequence
  derived and/or modified sequence
atgggcctgcacctgagaccctacagagtgggcctgctgcccgacggcctgctgttcctgctgctgctgctgatgctgctggccgaccccgccctgcccgccggcagacacccccccgtggtgctgggctggttcaccaccaagcaccccggcccccccagcttcctgatggtgtggatgtacgtgagcctggccctgggcagacccagccactggagcagctggacccccgccaaggccgcctgggtgcccatcagcaccccctggtggagagccctgtgggccggcgccacccacggcgtgagaatgagcgagggcctgcccatgaccggcgccgagccccagagacagccccaggcctggaaggacaagtacatcagagccttcgtgagcctgggcgccccctggggcggcgtggccaagaccctgagagtgctggccagcggcgacaacaacagaatccccgtgatcggccccctgaagatcagagagcagcagagaagcgccgtgagcaccagctggctgctgccctacaactacacctggagccccgagaaggtgttcgtgcagacccccaccatcaactacaccctgagagactacagaaagttcttccaggacatcggcttcgaggacggctggctgatgagacaggacaccgagggcctggtggaggccaccatgccccccggcgtgcagctgcactgcctgtacggcaccggcgtgcccacccccgacagcttctactacgagagcttccccgacagagaccccaagatctgcttcggcgacggcgacggcaccgtgaacctgaagagcgccctgcagtgccaggcctggcagagcagacaggagcaccaggtgctgctgcaggagctgcccggcagcgagcacatcgagatgctggccaacgccaccaccctggcctacctgaagagagtgctgctgggcccctag

SEQ ID NO: 173982 - DNA, 639 bp, Artificial Sequence
  derived and/or modified sequence
atgggcctgcacctgagaccctacagagtgggcctgctgcccgacggcctgctgttcctgctgctgctgctgatgctgctggccgaccccgccctgcccgccggcagacacccccccgtggtgctgggcgacaacaacagaatccccgtgatcggccccctgaagatcagagagcagcagagaagcgccgtgagcaccagctggctgctgccctacaactacacctggagccccgagaaggtgttcgtgcagacccccaccatcaactacaccctgagagactacagaaagttcttccaggacatcggcttcgaggacggctggctgatgagacaggacaccgagggcctggtggaggccaccatgccccccggcgtgcagctgcactgcctgtacggcaccggcgtgcccacccccgacagcttctactacgagagcttccccgacagagaccccaagatctgcttcggcgacggcgacggcaccgtgaacctgaagagcgccctgcagtgccaggcctggcagagcagacaggagcaccaggtgctgctgcaggagctgcccggcagcgagcacatcgagatgctggccaacgccaccaccctggcctacctgaagagagtgctgctgggcccctag

SEQ ID NO: 173983 - DNA, 957 bp, Artificial Sequence
  derived and/or modified sequence
atgggcctgcacttgcgcccctacagagtcggactactgccagacggcttgttatttttactgctgctgctcatgctcctggccgatccagctctccccgcaggtagacaccctcccgtagtcctgggctggttcacaacaaagcatccaggccccccctcatttttgatggtctggatgtatgtaagcctcgcgctgggccgaccctctcactggtctagctggaccccagctaaagctgcctgggtacctattagcactccttggtggcgggccctgtgggctggagccacccatggagtcagaatgtcggagggactccctatgaccggggcggaacctcagagacagccccaagcatggaaggacaagtatatccgcgcttttgtctcgctcggcgcgccctgggggggggtcgctaaaaccttacgcgtgctggcctctggagacaataaccgcattccagtgattggtcctttaaaaatcagagagcagcagcgctccgcagtatctacctcgtggctgcttccctataactatacatggtccccagagaaagtgtttgttcagacccccaccatcaactacaccctgagggattatcggaaattcttccaggatattgggttcgaagacggttggctcatgcgccaggacacggagggactggtggaggccactatgccccctggagtgcagttgcactgcctttatggcacgggcgtccctacccccgacagcttttactatgagagcttccctgaccgcgacccaaagatctgttttggagatggcgatggcaccgtgaacttgaaatctgcactgcaatgtcaggcgtggcagagcagacaagagcaccaagtcctcctgcaggaactgccgggaagcgaacacatcgagatgctcgcgaacgccacaacactcgcttatcttaagcgtgtgctactaggcccatag

SEQ ID NO: 173984 - DNA, 639 bp, Artificial Sequence
  derived and/or modified sequence
atgggcctgcacctccgcccttatcgcgtaggtctcctgcccgacgggctgctctttctgctcctgctactcatgctccttgctgatccggcccttcctgcagggaggcatccaccggttgtcctgggagataataatcgaattcccgtgatagggcccctcaagatcagggagcagcagagatcagcagtgagcacttcctggctgctgccgtataactacacatggagccccgagaaggtttttgtgcaaacgcctactatcaattacaccttgcgtgactacaggaagttcttccaggacatagggtttgaagacggatggcttatgaggcaagacactgaaggactggtggaagcgactatgccccccggcgtgcagttgcattgcctatatggcaccggcgtacccacccccgattccttttattacgagtcctttccggacagggaccccaaaatctgtttcggagacggtgacggtactgtgaatctcaaaagcgcattgcagtgccaggcttggcaatctaggcaagagcatcaggtgttgctccaagagttgcccggctctgaacacattgagatgctcgccaatgcaacgaccctcgcctatctgaagcgggtgttgcttgggccgtag

SEQ ID NO: 173985 - DNA, 957 bp, Artificial Sequence
  derived and/or modified sequence
atgggcctgcacctgcggccctacagagtgggcctgctgcctgatggcctgctcttcctgctgctgctgctgatgctgctggccgaccctgccctgcctgctggccgccacccccctgtggtgctgggctggttcaccaccaagcaccctggcccccccagcttcctgatggtgtggatgtatgtgtccctggccctgggccggcccagccactggagctcctggaccccagccaaggccgcctgggtgcccatcagcaccccctggtggagggccctgtgggccggggccacccatggagtgaggatgtctgagggcctgcccatgaccggggctgagccccagaggcagccccaggcctggaaggacaagtacatccgggcctttgtgtccctgggcgccccctggggcggcgtggccaagaccctgcgggtgctggccagcggggacaacaaccgcatccctgtgattggccccctgaagatccgggagcagcagaggtctgctgtgtccacctcctggctgctgccctacaactacacctggagccctgagaaggtgtttgtgcagacccccaccatcaactacaccctgcgggactacaggaagttcttccaggacatcggctttgaagatggctggctgatgaggcaggacacagagggcctggtggaggccaccatgcctcctggggtgcagctgcactgcctgtatggcaccggggtgcccaccccagacagcttctactatgagagcttcccagaccgggaccccaagatctgctttggagatggagatggcaccgtgaacctgaagagcgccctgcagtgccaggcctggcagagccggcaggagcaccaggtgctgctgcaggagctgcccggcagcgagcacatcgagatgctggccaatgccaccaccctggcctacctgaagagggtgctgctgggcccctag

SEQ ID NO: 173986 - DNA, 639 bp, Artificial Sequence
  derived and/or modified sequence
atgggcctgcacctgcggccctacagagtgggcctgctgcctgatggcctgctcttcctgctgctgctgctgatgctgctggccgaccctgccctgcctgctggccgccacccccctgtggtgctgggggacaacaaccgcatccctgtgattggccccctgaagatccgggagcagcagaggtctgctgtgtccacctcctggctgctgccctacaactacacctggagccctgagaaggtgtttgtgcagacccccaccatcaactacaccctgcgggactacaggaagttcttccaggacatcggctttgaagatggctggctgatgaggcaggacacagagggcctggtggaggccaccatgcctcctggggtgcagctgcactgcctgtatggcaccggggtgcccaccccagacagcttctactatgagagcttcccagaccgggaccccaagatctgctttggagatggagatggcaccgtgaacctgaagagcgccctgcagtgccaggcctggcagagccggcaggagcaccaggtgctgctgcaggagctgcccggcagcgagcacatcgagatgctggccaatgccaccaccctggcctacctgaagagggtgctgctgggcccctag

SEQ ID NO: 173987 - DNA, 957 bp, Artificial Sequence
  derived and/or modified sequence
atgggcctgcacctgcggccctaccgggtgggcctgctgcccgacggcctcctctttctgttgctcctcttgatgctactcgcagaccccgccctgcctgcaggccgtcaccctcccgtggtactgggctggtttaccacaaaacaccccggacccccaagcttcctcatggtgtggatgtacgtcagcctcgcccttggacgaccttcccactggtcatcgtggaccccagccaaagcagcctgggtgccaatcagtaccccctggtggcgggcattatgggccggggccactcatggtgttcgaatgtcagaggggcttcccatgactggcgcagaaccccagcggcagcctcaggcatggaaagataaatatatcagagcatttgtttctctgggagcgccctggggtggagttgccaagactctccgagtgttagccagcggggacaacaatagaatccccgtcatcggccccttaaagattcgagaacagcagcggagcgccgtgtctacaagttggctacttccctacaactacacctggtctccagaaaaggtgttcgttcagacacccacaatcaattacactctgcgtgattataggaagtttttccaggatataggtttcgaggatggctggctcatgagacaggatactgaggggctggtggaagctaccatgccccctggggtccagctgcactgcctgtatggaacaggtgtaccaacgccagactctttttattatgagtcttttccagatagggaccccaagatatgtttcggggacggcgacggcacagtgaacctgaagtccgctctgcaatgccaagcttggcagtcccgccaagagcatcaggtgcttttgcaggaacttccgggctctgagcacattgaaatgctggccaacgctacaactcttgcctacttgaaacgcgtgctgctgggaccctag

SEQ ID NO: 173988 - DNA, 639 bp, Artificial Sequence
  derived and/or modified sequence
atgggcctgcacctgcggccctaccgggtgggcctgctgcccgacggccttctgttcctgctgttgcttttgatgctgctggctgacccagccctgcccgctggccgtcacccccccgtggtcttgggagataacaaccgcatcccagtcataggtcctttaaagattcgggagcagcagcggtccgcagtgtctacttcgtggctgctgccgtataactatacatggagcccagagaaagttttcgtacagacccccacaattaattataccctgcgggattataggaagttctttcaggacatcgggttcgaggacggatggctgatgagacaagacacagaaggtctggtcgaggcaactatgccccccggagtgcaactgcattgcctgtacggcaccggggttccaacgcctgactccttctattatgagtcattcccagatcgtgatcccaaaatctgcttcggcgatggcgatggaaccgtcaatctgaaaagcgcactgcagtgtcaggcatggcagtcacggcaagaacatcaggtgctcctgcaggaacttcctggttcggaacatatcgaaatgctggccaacgctaccacattagcatacctcaaacgtgtcctgcttggaccgtag

SEQ ID NO: 173989 - DNA, 1239 bp, Artificial Sequence
  derived and/or modified sequence
atgggcctgcacctgcgcccctacagagtgggcttgctgccagatggcttgctctttctactgctgctccttatgctcctggctgaccccgctctgccagctggccggcaccctccagtagtcctggttcctggagatctgggcaaccaactggaggccaaactggacaagcctacggtggtacattatttgtgcagcaagaagactgagagttacttcacaatctggctgaaccttgagctgctgcttcccgtaataattgattgttggatcgacaacatacggcttgtgtacaataaaacctccagggctacacagttccctgacggggttgatgtaagagtccccggttttgggaaaaccttctctctggagtttctggacccaagcaaaagcagcgtgggctcttactttcacacaatggtcgagtctctggtcggttggggttacacacggggcgaagacgtgagaggagcaccctacgactggaggcgggccccgaatgagaatggcccatacttcttagccctaagagaaatgatcgaagaaatgtatcaactgtacggggggcctgtggtcctcgtggctcacagtatgggaaacatgtatacactgtactttctgcagcgacagcctcaggcttggaaggacaagtatattcgggctttcgtgagcctcggagctccttggggcggagtggccaagactctgcgggttttggccagtggagataacaatcgcatacccgtaatcggacccttgaagattcgagagcagcagcggtctgctgttagcacaagctggctgttgccgtacaattacacatggtcaccggagaaggtattcgttcagacaccaaccattaactacactctgagagactataggaagttctttcaagacatcggtttcgaagatggatggttaatgcgacaagatactgaggggctggttgaggctaccatgcctcccggagtgcagctacattgcttgtatggtacaggcgtcccaaccccagattccttctattatgagtcattcccagacagggaccctaagatctgtttcggggacggtgatggaacagtgaatctaaaatccgcactgcaatgccaggcgtggcagtcacggcaggagcatcaggtgctattgcaagagttgcccggaagtgaacacattgaaatgctggctaatgcaactactttagcatatttaaagcgcgtgttgttagggccttag

SEQ ID NO: 173990 - DNA, 1239 bp, Artificial Sequence
  derived and/or modified sequence
atgggcctgcacctgcggccctacagagtgggcctgctgcctgatggcctgctcttcctgctgctgctgctgatgctgctggccgaccctgccctgcctgctggccgccacccccctgtggtgctggtgcctggggacctgggcaaccagctggaggccaagctggacaagcccaccgtggtgcactacctgtgcagcaagaagacagagagctacttcaccatctggctgaacctggagctgctgctgcccgtcatcatcgactgctggattgacaacatccggctggtgtacaacaagaccagccgggccacccagttcccagatggagtggatgtgcgggtgcccggctttgggaagaccttcagcctggagttcctggaccccagcaagagctctgtgggcagctacttccacaccatggtggagagcctggtgggctggggctacaccagaggagaagatgtgcggggggccccctatgactggaggcgggccccaaatgaaaatggcccctacttcctggccctgcgggagatgattgaggagatgtaccagctgtatggaggccctgtggtgctggtggcccacagcatgggcaacatgtacaccctgtacttcctgcagaggcagccccaggcctggaaggacaagtacatccgggcctttgtgtccctgggcgccccctggggcggcgtggccaagaccctgcgggtgctggccagcggggacaacaaccgcatccctgtgattggccccctgaagatccgggagcagcagaggtctgctgtgtccacctcctggctgctgccctacaactacacctggagccctgagaaggtgtttgtgcagacccccaccatcaactacaccctgcgggactacaggaagttcttccaggacatcggctttgaagatggctggctgatgaggcaggacacagagggcctggtggaggccaccatgcctcctggggtgcagctgcactgcctgtatggcaccggggtgcccaccccagacagcttctactatgagagcttcccagaccgggaccccaagatctgctttggagatggagatggcaccgtgaacctgaagagcgccctgcagtgccaggcctggcagagccggcaggagcaccaggtgctgctgcaggagctgcccggcagcgagcacatcgagatgctggccaatgccaccaccctggcctacctgaagagggtgctgctgggcccctag

SEQ ID NO: 173991 - DNA, 1239 bp, Artificial Sequence
  derived and/or modified sequence
atgggcctgcacctgcggccctaccgggtgggcctgctgcccgacgggctactctttctccttctcctgctgatgctgttagctgacccagccttacctgcaggacgccacccaccggttgtcttagtccctggagacctgggaaatcagttggaagcgaagttggataaacccaccgtagttcactatctctgtagcaagaagaccgaaagctatttcaccatctggctgaatctcgaactcctgctgcccgtgatcattgactgctggattgataatattaggttggtgtacaataagacatccagagccacccagttcccggacggggtggacgtgcgtgtgcccgggtttggaaaaaccttctcactggagtttctcgacccctctaaatctagtgtgggatcctacttccacacgatggtcgaatccctggttgggtggggatacaccaggggcgaggatgttcgtggggccccttacgactggagaagagcccctaatgagaatggtccttacttcctggctctgcgcgaaatgattgaggaaatgtaccagttatacggcggtcctgttgttctggtggctcacagtatgggcaacatgtatactctgtattttctgcagagacagcctcaggcctggaaggacaagtacatacgcgcgtttgtcagcttgggcgcaccatggggcggcgttgctaaaacgctccgtgtgcttgccagtggggataacaatagaatccctgtgattgggcccctgaaaatccgtgagcagcagcgctccgccgtgtcaacttcatggctcctgccttacaactatacatggtccccggaaaaggtattcgttcaaacgcccaccatcaattacacactgcgcgactaccgaaagttcttccaggatataggtttcgaggacggctggcttatgcgacaggacaccgagggcttggtcgaggccactatgccaccaggcgtccagctccactgtctgtacggtaccggagtgccgactcccgattctttttactacgagtcgttcccagatcgggatcctaagatctgtttcggagacggcgatggcaccgtgaatttaaagtcagcactgcagtgccaagcgtggcagtcaagacaagaacatcaggtgctgctgcaggagctgccaggctccgagcacatcgagatgttagcgaatgcgacgacacttgcatatttgaaacgtgtcctgctggggccatag

SEQ ID NO: 173992 - DNA, 1239 bp, Artificial Sequence
  derived and/or modified sequence
atgggcctgcatcttagaccatatagggttggcttgctgcccgatggactcctctttttactgttgcttctcatgctgctcgcggacccagccttgccagccggtagacaccctcctgtagttttagtgccaggcgatctcggaaaccaattggaagctaaactcgacaagcctacggttgtgcactacttatgtagtaaaaaaacagagtcatactttaccatatggctcaatctcgaactattgctgccggtcattatcgattgctggattgataacatccgactggtgtataacaaaactagtcgcgctacacagttcccagacggggtggacgtgagggtgcccggttttggaaaaacgttctccctcgaatttctggatccttctaaaagcagcgttggttcctacttccatactatggtggagtccctagtaggatggggttacactcgcggagaggatgtcaggggggcaccttacgactggcggagagctccaaatgagaacggcccatattttcttgcattacgagagatgatcgaggagatgtatcaactgtatggcggacccgtggtcttggttgctcacagcatgggtaacatgtatacactatatttcctgcaaaggcagcctcaggcttggaaagacaaatatatcagggcctttgtgtcactgggagcaccgtggggaggggtagctaaaacattgcgagtcctggcgagcggcgataacaaccgaatcccggttattgggcctttgaagatccgggagcagcagagaagcgctgtgtctacctcgtggctgttgccatacaattatacatggtcccccgagaaggtgttcgtacagactcccacaattaactacactcttcgggattatcggaaattctttcaggatatcggattcgaggacggatggctcatgaggcaagatacagagggacttgttgaggcgaccatgccacccggagtgcaacttcattgcctgtacggaaccggcgtcccaacacccgactcattctattatgaatcttttcctgatcgcgacccgaaaatctgcttcggcgatggagacggaaccgtgaacttaaagtctgccctgcagtgccaggcatggcaatcgcgacaggaacaccaagtactacttcaggaactgcccggatccgagcacattgaaatgctggcgaacgccacaactttggcatatctgaagcgggtgctcctgggcccatag

SEQ ID NO: 173993 - DNA, 1239 bp, Artificial Sequence
  derived and/or modified sequence
atgggcctccatctccggccataccgagtaggcctactccctgatggattgctgtttctcctgctcctgttgatgctgttagctgaccccgcactccctgcaggacgccatccccctgtcgtactagtccctggtgaccttggcaaccagcttgaggccaaattggacaagccaaccgtggtgcactacttgtgcagtaagaaaactgaatcctacttcaccatttggctgaacttagaattgctgctacctgttattatcgattgctggatagataacattaggctggtttacaataaaacatcgcgtgccacacagtttcccgacggagtagacgtgcgagtgccggggtttggcaagacatttagtctcgaatttctggaccccagcaagtcttcagtgggctcatacttccacacaatggtagagtctcttgttggctggggttacacccgcggtgaagacgtccgaggcgcaccttatgactggcggcgcgctcccaatgagaatggcccctactttctcgcgctcagagagatgattgaagagatgtatcagttgtacggtggacccgtcgttcttgttgctcatagtatgggtaacatgtacaccttatatttcctgcaacggcagccccaggcctggaaggacaaatatattagggcgttcgtgagtctaggcgcaccttggggtggggttgctaagactctgcgggttttggcttctggagacaataacagaattcccgtcatcggtccgttgaagattcgagagcaacaaaggtctgccgtgtctacgtcgtggctcctcccttacaactacacgtggtcacccgaaaaagtctttgtacagactcctaccatcaattacacgttgcgggattatagaaaattcttccaggacatagggtttgaggacggatggctaatgcggcaggatacagagggcctcgttgaggcaacaatgcccccaggggtgcaactgcactgcctttatgggactggagtgccgaccccagattcattctattatgaatcctttcccgatagagaccctaaaatctgtttcggcgacggagatggaacagtcaatctgaagtctgccctgcagtgccaggcttggcagtcgagacaggagcaccaagtcctgctgcaggagctgccaggatctgaacatatcgaaatgctggcaaatgccacgactctggcttatttgaagcgggtgttgctcggaccatag

SEQ ID NO: 173994 - DNA, 1239 bp, Artificial Sequence
  derived and/or modified sequence
atgggcctccatctccggccataccgagtaggcctactccctgatggattgctgtttctcctgctcctgttgatgctgttagctgaccccgcactccctgcaggacgccatccccctgtcgtactagtccctggtgaccttggcaaccagcttgaggccaaattggacaagccaaccgtggtgcactacttgtgcagtaagaaaactgaatcctacttcaccatttggctgaacttagaattgctgctacctgttattatcgattgctggatagataacattaggctggtttacaataaaacaagtagagcaacacagtttcccgacggagttgacgtacgcgtgccgggtttcggcaaaacattctctctggaattcctcgatccctccaagagcagtgttgggagttatttccataccatggttgagtcactagtagggtgggggtacactcgtggcgaggacgttcgtggggctccctatgattggagaagagcaccaaacgagaacggtccgtactttcttgccctgagagaaatgattgaagaaatgtaccagctgtatggcggaccggtggtcctggttgcgcactcaatgggaaacatgtacacactttacttcttgcagaggcaacctcaggcttggaaagacaaatacatcagggccttcgtctcgttaggggcaccttggggaggagtcgcaaaaactctcagggtgctggcaagcggggataacaataggattcctgtcattggacctttaaaaattagagagcaacagcgatctgcagtgtctacttcttggctgctgccctataactacacatggtcaccggagaaagtgtttgtccagacacccactattaactacaccttgcgcgactatcgaaaattcttccaggatattggttttgaagacggatggctgatgaggcaggacactgaaggactcgtggaggccaccatgccccctggcgttcagctgcactgtctttacggaacaggcgtgccaacacctgactcattctactatgaatcattccctgatcgcgaccccaaaatttgctttggcgatggtgatggcacagtcaatctgaagtcagctttacagtgtcaggcttggcagtctagacaggaacatcaggtactcctacaagaactccctggttccgaacatatagagatgctcgcaaacgcaacgactttggcatacctcaagagagttttacttggcccgtag

SEQ ID NO: 173995 - DNA, 1239 bp, Artificial Sequence
  derived and/or modified sequence
atgggcctgcacctgagaccctacagagtgggcctgctgcccgacggcctgctgttcctgctgctgctgctgatgctgctggccgaccccgccctgcccgccggcagacacccccccgtggtgctggtgcccggcgacctgggcaaccagctggaggccaagctggacaagcccaccgtggtgcactacctgtgcagcaagaagaccgagagctacttcaccatctggctgaacctggagctgctgctgcccgtgatcatcgactgctggatcgacaacatcagactggtgtacaacaagaccagcagagccacccagttccccgacggcgtggacgtgagagtgcccggcttcggcaagaccttcagcctggagttcctggaccccagcaagagcagcgtgggcagctacttccacaccatggtggagagcctggtgggctggggctacaccagaggcgaggacgtgagaggcgccccctacgactggagaagagcccccaacgagaacggcccctacttcctggccctgagagagatgatcgaggagatgtaccagctgtacggcggccccgtggtgctggtggcccacagcatgggcaacatgtacaccctgtacttcctgcagagacagccccaggcctggaaggacaagtacatcagagccttcgtgagcctgggcgccccctggggcggcgtggccaagaccctgagagtgctggccagcggcgacaacaacagaatccccgtgatcggccccctgaagatcagagagcagcagagaagcgccgtgagcaccagctggctgctgccctacaactacacctggagccccgagaaggtgttcgtgcagacccccaccatcaactacaccctgagagactacagaaagttcttccaggacatcggcttcgaggacggctggctgatgagacaggacaccgagggcctggtggaggccaccatgccccccggcgtgcagctgcactgcctgtacggcaccggcgtgcccacccccgacagcttctactacgagagcttccccgacagagaccccaagatctgcttcggcgacggcgacggcaccgtgaacctgaagagcgccctgcagtgccaggcctggcagagcagacaggagcaccaggtgctgctgcaggagctgcccggcagcgagcacatcgagatgctggccaacgccaccaccctggcctacctgaagagagtgctgctgggcccctag

SEQ ID NO: 173996 - RNA, 957 nt, Artificial Sequence
  derived and/or modified sequence
auggggcugcaccucaggccauauagagucgggcugcuuccugaugggcuguuguuucuucugcuguugcucaugcugcuggccgauccugcacuucccgcuggccgacaccccccagugguauuaggaugguucacaacuaagcaccccgggccaccuagcuuuuugaugguguggauguaugucucccuugcacuaggcagaccaagccacuggucaagcuggacucccgccaaggccgcuuggguaccaauuucuacuccaugguggcgggcccucugggcuggggccacccauggggugaggaugucugaaggucugccaaugacuggagcagagccucaaagacaaccgcaagcuuggaaggacaaauacauuagagcauuugucucacuuggggcgcccugggguggaguagccaaaacccugagaguucuugcuucuggagacaauaaucguaucccggugauugguccacugaaaauucgcgagcagcaaagaucugcagucuccacuuccuggcugcuuccauacaauuauaccugguccccugaaaagguuuucguacagacuccgaccaucaauuauacccugagagauuaccgcaaguuuuuccaggacauugguuuugaagacgggugguugaugcggcaggacacagaaggccuuguggaagcuacaaugcccccgggagugcagcugcacugcuuauacggcaccggaguaccaaccccagacagcuucuacuaugagaguuucccagaucgggacccaaagauuuguuucggagacggagauggcaccguaaaccuaaaauccgcacuacagugucaggcuuggcaauccagacaagagcaucagguacugcuccaggagcugccggggagugagcauauagagaugcuggccaacgcaacaacacucgcuuaucugaagcgcguauugcuagggccuuag

SEQ ID NO: 173997 - RNA, 639 nt, Artificial Sequence
  derived and/or modified sequence
augggucuucaccuccggcccuaccgagucggccuccucccagauggacugcuauucuuauugcucuuacugaugcugcuugccgaccccgcucugccagccggccgccacccacccguaguucuaggagauaauaaucgcauuccgguuauuggcccuuugaagaucagggagcagcagaggucugccguaaguacgaguugguugcugccuuacaacuacacauggucuccagagaaaguguucgugcaaaccccaaccauaaauuacacucuacgcgacuaccggaaguucuuucaggacaucggcuucgaagaugguugguugaugaggcaggacaccgagggccuuguggaggcuacuaugcccccuggaguucagcuacacugucuuuacggcaccggcgugccaacuccugacucguucuauuacgaaaguuuccccgaucgugauccaaagaucuguuucggcgacggcgacggaacugucaaucugaaaucagcucuucagugccaggcauggcaaagcaggcaggagcaccaaguccuguugcaagagcuccccgggucugagcacaucgagaugcuugccaacgcuacaacccucgcuuaccucaaaaggguccuccuuggaccguag

SEQ ID NO: 173998 - RNA, 957 nt, Artificial Sequence
  derived and/or modified sequence
augggacuccauuuacgacccuaucgcguuggccuguugccggacggucugcucuuccugcugcugcugcuaaugcugcuggccgaccccgcucuccccgccggaaggcacccgccuguggucuugggaugguucaccacgaaacacccugggccuccgucauuccucaugguauggauguauguuucccuagcacugggccggcccagucacuggucauccuggacuccagcaaaagcagcuugggugccgaucucaaccccaugguggagggcccucugggcaggggcuacacacggagugaggaugucugaaggucugccaaugacuggagcagagccucaaagacaaccgcaagcuuggaaggacaaauacauuagagcauuugucucacuuggggcgcccugggguggaguagccaaaacccugagaguucuugcuucuggagacaauaaucguaucccggugauugguccacugaaaauucgcgagcagcaaagaucugcagucuccacuuccuggcugcuuccauacaauuauaccugguccccugaaaagguuuucguacagacuccgaccaucaauuauacccugagagauuacagaaaguuuuuccaagacaucggauucgaagacgguugguuaaugcggcaggacacugaggguuugguugaagcaacuaugccaccuggagugcagcuacauugccuguacgguacagggguaccuacgccugauucuuucuacuacgaaucuuucccagaccgggacccuaagaucugcuucggggauggggacggcaccgugaaucugaagagcgcacuccaaugccaggccuggcaaucacgacaagagcaccaagucuuacuccaggaauuacccggaagcgagcacaucgagaugcucgccaaugcuacuacacuugcuuaucuuaaacgugugcuccucgggccuuag

SEQ ID NO: 173999 - RNA, 639 nt, Artificial Sequence
  derived and/or modified sequence
augggucuucaccuccggcccuaccgagucggccuccucccagauggacugcuauucuuauugcucuuacugaugcugcuugccgaccccgcucugccagccggccgccacccacccguaguucuaggagauaauaaucgcauuccgguuauuggcccuuugaagaucagggagcagcagaggucugccguaaguacgaguugguugcugccuuacaacuacacauggucuccagagaaaguguucgugcaaaccccaaccauaaauuacacucuacgcgacuaccggaaguucuuucaggacauaggcuuugaggacggauggcuaaugcggcaagauacagaaggccuaguggaagccaccaugccaccaggugugcagcuucauugccucuauggaacaggagugccaacgcccgauuccuuuuauuacgaaaguuuuccggacagggaucccaagaucugcuuuggggauggugauggaacagucaauuuaaagagugcauuacagugccaggccuggcaaaguagacaggagcaccaggugcugcugcaggaauugccaggaagugagcauauugaaauguuagcuaaugcgaccacucuggcuuaucugaaacgaguguuacuuggaccauag

SEQ ID NO: 174000 - protein, 139 aa, Artificial Sequence
  derived and/or modified sequence
MLPLSLLKTAQNHPMLVELKNGETYNGHLVSCDNWMNINLREVICTSRDGDKFWRMPECYIRGSTIKYLRIPDEIIDMVKEEVVAKGRGRGGLQQQKQQKGRGMGGAGRGVFGGRGRGGIPGTGRGQPEKKPGRQAGKQ

SEQ ID NO: 174001 - DNA, 420 bp, Artificial Sequence
  derived and/or modified sequence
atgcttcccttgagcctgctgaaaaccgcacagaaccaccccatgctggtagagctcaaaaatggagaaacatacaatggccacctggtgtcttgcgataactggatgaatatcaacctgagggaggtgatttgcacttcccgggatggagacaagttttggagaatgcccgagtgttacatcaggggcagtactatcaaatacctccgaataccagacgaaataatcgatatggttaaggaagaagttgtagccaaagggcggggaagaggcggcctgcagcagcaaaaacaacagaaaggcagaggcatgggcggagccggtaggggtgtcttcggaggccgagggagagggggtattcccggaacaggcaggggccagccagagaagaaacctgggagacaggcaggcaagcaatag

SEQ ID NO: 174002 - DNA, 420 bp, Artificial Sequence
  derived and/or modified sequence
atgctccctctgagcctgctgaagaccgcccagaaccaccctatgctggtggagctcaaaaatggggagacatataatggccacctcgtatcttgtgacaattggatgaacattaacttaagggaagtcatatgcaccagccgagacggagataagttttggaggatgccagagtgctacatccgtgggtcaacaattaagtacttacggatcccggatgagatcatagatatggtaaaggaggaggtcgtcgccaaggggcgcggtcgcggcggtctgcagcagcagaaacagcagaaaggtcgcgggatgggaggcgctggtaggggggtcttcggtggccggggaagaggtggaatacccggcactggccgcgggcagccagagaagaaacccggccggcaggctggaaaacaatag

SEQ ID NO: 174003 - DNA, 420 bp, Artificial Sequence
  derived and/or modified sequence
atgctgcccctgagcctgctgaagacagcccagaaccaccccatgctggtggagctgaagaatggagagacctacaacggccacctggtgtcctgtgacaactggatgaacatcaacctgcgggaggtgatctgcaccagcagagatggagacaagttctggaggatgcctgagtgctacatccggggcagcaccatcaagtacctgcgcatcccagatgagatcatcgacatggtgaaggaggaggtggtggccaagggccggggccggggcggcctgcagcagcagaagcagcagaagggccggggcatgggcggggccggccggggcgtgtttggaggccggggccggggcggcatccctggcaccggccggggccagcctgagaagaagccaggccggcaggccggcaagcagtag

SEQ ID NO: 174004 - DNA, 1908 bp, Artificial Sequence
  derived and/or modified sequence
attacaagccgcggcactttacggctctcgtcctcgttcctccggcgggaacacggcccgccccgccctttcgcccagcgggccccgccctactccgcgtggattggttgaccgcccttcgagcccggtgctgactggcttgcgtctctgccactttctttcagcttagtggcgcgcggcgcggcgacgaccgccgggagcgtgtgcagcggcggcggcggaagtggccggcgagcccggtccccgccggcaccatgcttcccttgtcactgctgaagacggctcagaatcaccccatgttggtggagctgaaaaatggggagacgtacaatggacacctggtgagctgcgacaactggatgaacattaacctgcgagaagtcatctgcacgtccagggacggggacaagttctggcggatgcccgagtgctacatccgcggcagcaccatcaagtacctgcgcatccccgacgagatcatcgacatggtcaaggaggaggtggtggccaagggccgcggccgcggaggcctgcagcagcagaagcagcagaaaggccgcggcatgggcggcgctggccgaggtgtgtttggtggccggggccgaggtgggatcccgggcacaggcagaggccagccagagaagaagcctggcagacaggcgggcaaacagtgagcgcccacccagaccggctgctgcgccccctcctgccagggtggcgattccgctccacagtctcggacggatctgctcagaaaggaagaggcaggcgccagggggaacccccttcgtgttttgtgaccctcccttttaggtgaagcccctttttcttgctaaaaccggcaattctccggttagaaatgttacttggtgttttttggttttgtgaaacggccgtcccaaaactggctggattcctagaagagtctgtgttgaaggcatctttcaagccctcgctctggttctcagggcagcattttccaggcgggtttgttttgcatttcttggagcctctccgagcagcaaccagacgggagatttttattttaagctgttcatgctgggactgacagcctgcagggtttccttgggcgcggccccaaaattgccttcaaaacaaacccgggacggttgaaagccttcgaaccgtgcaggggatgcctcgggccctggcccttcgcttcctctcttgtgttatggaaataaaaacaaataaaactacacactgcacatccactgttccttttgagcttctgggtgcacctagcgggtctcctgccctctgtccatcgctggactctcaggaaatccccgttcccgtaagggaagcttccttttgagagttctcaccaggtgtcagcggcacagtgaggcactgatgtccttttacaaaaggcaagaccagcatctggacagtgggggctcttgagagtccccggcgccccccacaccaggttgtcctataaccctctcccctctgtggagacgttaatgccaaggggtgtgtggggagggaagtcccaggcaggggccacgcatggtccccatcaccccctcctgggtggcctggactccatcatctatcctcatctgtccacactggcgttcacacagagaagacaggacaggaatcccctcggaagatgctcatggaagattctcacgaggctcctgccccctttctgagccaggccgggtttgccactcctcgggcgcgcacctgagacactgagtcagcgctttcgagaaaggctccgggtagcatctgtggaccgtgaagaaaccagagggaagccctgagccaggcagcggcccgtccccctgcatagccttctcttcagggtcctcgttcggagacctattttgagaggtgattggaataaaaggtcccgtccgtgaggaactcttt

SEQ ID NO: 174005 - DNA, 1145 bp, Artificial Sequence
  derived and/or modified sequence
cccgccctactccgcgtggattggttgaccgcccttcgagcccggtgctgactggcttgcgtctctgccactttctttcagcttagtggcgcgcggcgcggcgacgaccgccgggagcgtgtgcagcggcggcggcggaagtggccggcgagcccggtccccgccggcaccatgcttcccttgtcactgctgaagacggctcagaatcaccccatgttggtggagctgaaaaatggggagacgtacaatggacacctggtgagctgcgacaactggatgaacattaacctgcgagaagtcatctgcacgtccagggacggggacaagttctggcggatgcccgagtgctacatccgcggcagcaccatcaagtacctgcgcatccccgacgagatcatcgacatggtcaaggaggaggtggtggccaagggccgcggccgcggaggcctgcagcagcagaagcagcagaaaggccgcggcatgggcggcgctggccgaggtgtgtttggtggccggggccgaggtgggatcccgggcacaggcagaggccagccagagaagaagcctggcagacaggcgggcaaacagtgagcgcccacccagaccggctgctgcgccccctcctgccagggtggcgattccgctccacagtctcggacggatctgctcagaaaggaagaggcaggcgccagggggaacccccttcgtgttttgtgaccctcccttttaggtgaagcccctttttcttgctaaaaccggcaattctccggttagaaatgttacttggtgttttttggttttgtgaaacggccgtcccaaaactggctggattcctagaagagtctgtgttgaaggcatctttcaagccctcgctctggttctcagggcagcattttccaggcgggtttgttttgcatttcttggagcctctccgagcagcaaccagacgggagatttttattttaagctgttcatgctgggactgacagcctgcagggtttccttgggcgcggccccaaaattgccttcaaaacaaacccgggacggttgaaagccttcgaaccgtgcaggggatgcctcgggccctggcccttcgcttcctctcttgtgttatggaaataaaaacaaataaaactacacactgc

SEQ ID NO: 174006 - DNA, 420 bp, Artificial Sequence
  derived and/or modified sequence
atgctgcccctgagcctgctgaagaccgcccagaaccaccccatgctggtcgagctgaagaacggagagacctataatggtcatcttgtgtcttgcgacaattggatgaacattaacctgcgggaagtcatatgcacgtctagagatggcgacaaattttggcgcatgcccgagtgttacatcagggggtcaaccattaagtaccttcgtatccccgacgagataatagacatggtcaaagaggaagtcgttgccaagggacgcgggcggggaggtctgcaacagcaaaaacagcagaaaggcagaggaatgggaggggctgggagaggtgtgtttggcggccgaggccgaggcggcatccccgggacaggtaggggccagcccgagaagaagcccgggcgccaagctgggaagcaatag

SEQ ID NO: 174007 - DNA, 420 bp, Artificial Sequence
  derived and/or modified sequence
atgctgcccctgagcctgctgaagaccgcccagaaccaccccatgctggtcgaattgaagaatggcgagacttataatggacatttggtatcttgcgataactggatgaatattaatctcagagaagtcatatgcacaagccgggacggcgacaagttctggaggatgcccgaatgttacattaggggcagcaccattaagtacctgcgcatccccgacgaaattatcgatatggtaaaagaagaggtggtggccaaaggacgtggacgagggggactccaacaacaaaagcagcagaagggccgaggcatgggcggcgccggacgcggcgtttttgggggccgcggaaggggcggcatccctggcaccggccgagggcagcctgagaagaagccaggccggcaggccggcaaacagtag

SEQ ID NO: 174008 - DNA, 420 bp, Artificial Sequence
  derived and/or modified sequence
atgctcccactgagcctactcaaaactgcacagaaccatcctatgcttgtcgagctgaagaacggagagacgtacaatgggcacctcgtcagctgtgacaattggatgaacatcaatctgcgggaggttatatgcacctcacgggacggagataagttctggaggatgcctgagtgctacatccgaggctccacaatcaagtatctgaggattccggacgagatcattgacatggtgaaggaagaagttgtagctaaaggacgtggtcggggaggtctccaacagcagaagcagcaaaagggtcggggaatggggggtgccggtcgcggagtttttggcggtcggggaagagggggtatccccggaactggcaggggccaaccagagaagaaaccgggtagacaggccggtaagcagtag

SEQ ID NO: 174009 - DNA, 420 bp, Artificial Sequence
  derived and/or modified sequence
atgctgccgctgagcctgctgaaaactgcccaaaatcaccccatgttggttgagttaaaaaatggggaaacctacaatgggcatctcgtctcgtgcgataattggatgaacattaacttaagggaagtgatctgcacctctagagatggagacaagttttggaggatgcccgaatgttacattagaggttcaaccatcaaatacctgagaatcccagatgagatcattgacatggtcaaagaagaggtggtggccaagggacgaggaaggggagggcttcaacaacaaaagcagcagaaggggcgaggcatgggcggtgcagggagaggggtctttggagggagagggcgtggcggaatccccggaactggacgtgggcagccagagaagaagccaggtcggcaagctgggaaacagtag

SEQ ID NO: 174010 - DNA, 420 bp, Artificial Sequence
  derived and/or modified sequence
atgctgcccctgagcctgctgaagaccgcccagaaccaccccatgctggtggagctgaagaacggcgagacctacaacggccacctggtgagctgcgacaactggatgaacatcaacctgagagaggtgatctgcaccagcagagacggcgacaagttctggagaatgcccgagtgctacatcagaggcagcaccatcaagtacctgagaatccccgacgagatcatcgacatggtgaaggaggaggtggtggccaagggcagaggcagaggcggcctgcagcagcagaagcagcagaagggcagaggcatgggcggcgccggcagaggcgtgttcggcggcagaggcagaggcggcatccccggcaccggcagaggccagcccgagaagaagcccggcagacaggccggcaagcagtag

SEQ ID NO: 174011 - protein, 91 aa, Artificial Sequence
  derived and/or modified sequence
MAANATTNPSQLLPLELVDKCIGSRIHIVMKSDKEIVGTLLGFDDFVNMVLEDVTEFEITPEGRRITKLDQILLNGNNITMLVPGGEGPEV

SEQ ID NO: 174012 - DNA, 276 bp, Artificial Sequence
  derived and/or modified sequence
atggcagccaacgctactacaaatccgtcccagctcctgcccctcgagttggtggacaagtgtattggaagtcggatccacatcgtcatgaagagcgataaagaaatcgttggcactctgttgggcttcgatgactttgtcaacatggtgttggaagatgtaacagaattcgaaataacccccgagggaaggaggatcaccaaacttgatcagatcctgctcaacggaaacaatatcaccatgttggtcccaggaggcgagggacctgaggtgtag

SEQ ID NO: 174013 - DNA, 276 bp, Artificial Sequence
  derived and/or modified sequence
atggccgccaatgccaccaccaaccccagccagctgctgcccctggagctggtggacaagtgcatcggcagccgcatccacatcgtgatgaagagtgacaaggagatcgtgggcaccctgctgggctttgatgactttgtgaacatggtgctggaggatgtgacagaatttgagatcaccccagagggccgccgcatcaccaagctggaccagatcctgctgaatggaaacaacatcaccatgctggtgcctggaggagagggccctgaggtgtag

SEQ ID NO: 174014 - DNA, 2251 bp, Artificial Sequence
  derived and/or modified sequence
gcttttcaaagtcgtcccaccatcaatgaaggcaggccacttccggcgtagccatggcggctaacgctactaccaacccgtcgcagctgctgcccttagagcttgtggacaaatgtataggatcaagaattcacatcgtgatgaagagtgataaggaaattgttggtactcttctaggatttgatgactttgtcaatatggtactggaagatgtcactgagtttgaaatcacaccagaaggaagaaggattactaaattagatcagattttgctaaatggaaataatataacaatgctggttcctggaggagaaggacctgaagtgtgaatgagtttccttgacttacactagattttgttttggcttataatgacaagaaaatggaattttttttcccactttctaatgtttaaatcccataaagctaagtttcccgttaaagggaagtgctttgaagatgtgtacccatttttgtaagttaatcatgattatcctggaaaaagaagaaaagagcttcttctttgcagatgaaaataaaggtgtttttggttaactgtcattttgtttattctactgcagtagccagtggaacaaagtttgtagttattttgccacttacttttctgtcattatatgcttatttgttttgtcatttacgtgaccatttgattctcaaacaaaagttgttccaaacaaaatgatgaactttgatttgaacaggtgcatttaaacaaccggaaatgatcacttagaaaattcaattaaaatgctgttgttttgtaatgaggatttttcttctgatttcaaattccatgaactcctattgaaaacaaacaatgtacaggtaatatatgcacattgtagaaatgcaggaattatctattggaattaccctaaagatagaaattttatctatttgcttataaaattgattcagaaggttattaccttaatgtagttattactgaattgccaggaaatgagtggagacagagctttaagataaaggatactaaaagcagctaagaactccaggactcaggtcaaatcaaggaactgataataagatcattgaactgtataaattaagtcaaagaactcctattaaaaacaaacaggtaatatatgcacatcgtagaattgtaggtaagcaaaaaggagaaggttgatcatgctttgctgtatgtcttcgtagactttctcagtccactctcagtacacgttttattttacttgctcatcctgattatactgtttttaccctccacttaagtcattttttgaatttaaatggtgaatatctttctgtgtcaaatatttcaacattaatatgtacatagtattaaatggatttactataaattatttagcctattcttactggccacagtagtctaactagatctttatacatttgtatttttctagaataaactcaaaaatgtgtaagatcaaagggtatatattgtgttgccaagaaaaagtttgtgccaatgtatatttttgccaggagtctttcatagtaccatttatatccttcccagcattagctgtgttctaccttctctcctctttgccatttttacaagaaaaccgggcatgtctaaagttttcttttcctttttttttttttttttttttttttggagagtctcactggaatgcagtggcatgatcttggctccctgcaacctccagtcaggctggtgtgccttgtcgcgatatcaacgcgacctccgcctcccaggttcaagtgattgtcctgcctcaccctcctgagtagctgggattacaggtgggcgccaccactcccatctaatttttatatttttagagagatggggttttaccttgttggccaggctggtcttgaactcctgacctctagtgatccacctgcctcagcctcccaaagtgccggtattaaaggcatgagccaccaggcctggcctaaaattttcttgattaattttgatctcatttgtattttgtaaatgacttatctgttgaggcttttgccattgagatgtttgtctttttcttactaatttgtaagaattcttgatgggtttctgttagtcatgtattttgctaataatttccctagtttgtagtttgccacttagtgctatttttgacataaatgatgtattttaatgtagttgcatgttgacctagtccattatggtttttgtatttggtccacgtggattggaaaacctttgctttgattatacttttctttgggc

SEQ ID NO: 174015 - DNA, 276 bp, Artificial Sequence
  derived and/or modified sequence
atggccgccaacgccaccaccaaccccagccagctgctgcccctggaacttgttgataaatgcattggctcccggattcatatcgtgatgaaatccgataaggaaattgtcgggactttactcggcttcgacgatttcgttaacatggtgcttgaggatgtgaccgaattcgagattacacccgaaggaaggagaattaccaagttagatcaaatccttttgaacggaaacaatatcacaatgctcgtccccgggggggagggcccagaggtgtag

SEQ ID NO: 174016 - DNA, 276 bp, Artificial Sequence
  derived and/or modified sequence
atggctgccaacgcaacaaccaacccaagccagctgctacctctcgaattggtggacaaatgcatcggttctagaatccatattgtgatgaaatcggacaaagagatcgtcggtactttactcggtttcgacgatttcgttaacatggtacttgaagacgtcaccgaattcgaaatcacgccggaggggaggcggatcacaaaactggaccagatactgctgaatggaaacaatataactatgctggtccccggaggcgaaggtcctgaggtttag

SEQ ID NO: 174017 - DNA, 276 bp, Artificial Sequence
  derived and/or modified sequence
atggccgccaacgccaccaccaaccccagccagctgctgcccctggagctggtggacaagtgcatcggcagcagaatccacatcgtgatgaagagcgacaaggagatcgtgggcaccctgctgggcttcgacgacttcgtgaacatggtgctggaggacgtgaccgagttcgagatcacccccgagggcagaagaatcaccaagctggaccagatcctgctgaacggcaacaacatcaccatgctggtgcccggcggcgagggccccgaggtgtag

SEQ ID NO: 174018 - protein, 823 aa, Artificial Sequence
  derived and/or modified sequence
MADRAEMFSLSTFHSLSPPGCRPPQDISLEEFDDEDLSEITDDCGLGLSYDSDHCEKDSLSLGRSEQPHPICSFQDDFQEFEMIDDNEEEDDEDEEEEEEEEEGDGEGQEGGDPGSEAPAPGPLIPSPSVEEPHKHRPTTLRLTTLGAQDSLNNNGGFDLVRPASWQETALCSPAPEALRELPGPLPATDTGPGGAQSPVRPGCDCEGNRPAEPPAPGGTSPSSDPGIEADLRSRSSGGRGGRRSSQELSSPGSDSEDAGGRLGRMISSISETELELSSDGGSSSSGRSSHLTNSIEEASSPASEPEPPREPPRRPAFLPVGPDDTNSEYESGSESEPDLSEDADSPWLLSNLVSRMISEGSSPIRCPGQCLSPAPRPPGEPVSPAGGAAQDSQDPEAAAGPGGVELVDMETLCAPPPPAPAAPRPGPAQPGPCLFLSNPTRDTITPLWAAPGRAARPGRACSAACSEEEDEEDDEEEEDAEDSAGSPGGRGTGPSAPRDASLVYDAVKYTLVVDEHTQLELVSLRRCAGLGHDSEEDSGGEASEEEAGAALLGGGQVSGDTSPDSPDLTFSKKFLNVFVNSTSRSSSTESFGLFSCLVNGEEREQTHRAVFRFIPRHPDELELDVDDPVLVEAEEDDFWFRGFNMRTGERGVFPAFYAHAVPGPAKDLLGSKRSPCWVERFDVQFLGSVEVPCHQGNGILCAAMQKIATARKLTVHLRPPASCDLEISLRGVKLSLSGGGPEFQRCSHFFQMKNISFCGCHPRNSCYFGFITKHPLLSRFACHVFVSQESMRPVAQSVGRAFLEYYQEHLAYACPTEDIYLE

SEQ ID NO: 174019 - protein, 546 aa, Artificial Sequence
  derived and/or modified sequence
MADRAEMFSLSTFHSLSPPGCRPPQDISLEEFDDEDLSEITDDCGLGLSYDSDHCEKDSLSLGRSEQPHPICSFQDDFQEFEMIDDNEEEDDEDEEEEEEEEEGDGEGQEGGDPGSEAPAPGPLIPSPSVEEPHKHRPTTLRLTTLGAQDSLNNNGGFDLVRPASWQETALCSPAPEALRELPGPLPATDTGPGGAQSPVRPGCDCEGNRPAEPPAPGGTSPSSDPGIEADLRSRSSGGRGGRRSSQELSSPGSDSEDAGGRLGRMISSISETELELSSDGGSSSSGRSSHLTFSKKFLNVFVNSTSRSSSTESFGLFSCLVNGEEREQTHRAVFRFIPRHPDELELDVDDPVLVEAEEDDFWFRGFNMRTGERGVFPAFYAHAVPGPAKDLLGSKRSPCWVERFDVQFLGSVEVPCHQGNGILCAAMQKIATARKLTVHLRPPASCDLEISLRGVKLSLSGGGPEFQRCSHFFQMKNISFCGCHPRNSCYFGFITKHPLLSRFACHVFVSQESMRPVAQSVGRAFLEYYQEHLAYACPTEDIYLE

SEQ ID NO: 174020 - DNA, 2472 bp, Artificial Sequence
  derived and/or modified sequence
atggccgatcgcgcggaaatgtttagtttgtcaacctttcattctttgagcccacctggatgccgccctccacaggacatcagcctggaggaattcgatgacgaagacctgtctgagattaccgacgattgcgggctaggactaagctatgactccgaccattgcgagaaggattccctgagcttgggcaggagtgagcagccacatccaatatgtagcttccaagatgacttccaggagttcgagatgatcgatgacaatgaagaggaagatgatgaagatgaggaggaggaagaggaagaggaagagggagacggcgaaggacaggaggggggcgacccaggatctgaggcaccagcgcccgggcccctcatcccctccccctcggtggaggagccccacaagcaccggccaacaacactcaggctgaccactctcggggctcaagattcacttaacaacaacggtgggttcgacctggtcaggcccgccagttggcaggagaccgccctgtgctcacccgctcccgaggcccttagagagctgccaggccccctgcccgccacagacaccggacccggcggagctcagagtcccgtgaggcccggctgcgattgtgaaggaaatcggccagccgaaccaccagccccgggcggaacatccccttccagcgaccccgggatcgaggccgatctgaggtcaaggtcctcaggcggaagagggggcaggaggagcagtcaggagctgtcatccccaggctctgattccgaggacgcaggtggccgactgggacgcatgatcagtagcatctctgagactgagctagagttgtcgtccgacgggggctcctcatctagtggccggtcttcgcacctcaccaactcgatcgaggaagccagttcaccagccagcgagcctgaacccccacgcgaacctccaaggagaccagcttttctgcctgtgggacccgatgatacaaacagtgagtacgaatctggatctgaatccgagcctgacctatcggaagacgccgacagtccgtggctcctcagtaatctggtatctcgcatgattagcgagggcagctcgccgatcagatgtccgggacagtgtctgtctcctgcaccaagacctcccggcgaaccggtgtcgcctgccggcggggccgcacaagactctcaggatcccgaggctgctgctggaccaggtggagtcgagcttgttgacatggagactctgtgcgccccccccccccccgcacctgcagccccccggccaggacctgcccagcctggcccttgcctattcctaagcaatccaaccagagacacaatcacgcccctttgggccgctcctggtcgagctgccaggcccgggcgggcctgctctgccgcctgcagcgaagaggaggatgaggaggacgacgaagaagaagaggacgcagaagatagcgcaggctcccctggcggccgaggcaccggtccctcggcaccacgcgacgcatctctcgtgtatgatgccgttaaatatactctcgtagtggatgaacatacccagctggagctggtcagccttcgccgatgcgccgggctcggacacgattcagaggaggatagcggaggagaggccagcgaagaggaggccggagccgcgttgctcggcggcggccaggtctccggggatacctctccagattctcctgatttgactttttccaagaaattcctgaatgtctttgtgaacagcacctcaagatcttcctctacagagtcctttggtctgttcagctgcttggttaatggagaggagagggagcagacacacagagctgtgtttcgattcatcccccgacaccctgatgagttggagctggatgtggacgacccagtgttagtggaggctgaagaggacgatttttggttccgtggattcaacatgcggaccggagagcgaggggtcttccccgctttctatgcccatgctgtgcctgggcctgctaaagatctactcggctcgaagcgctctccttgttgggtagaacgcttcgacgtgcagttcttgggtagtgtagaggtgccatgccatcagggaaatggtatcctttgcgccgccatgcagaagattgccaccgcacgaaagttaacagtccacttacggcctccggcctcatgtgacctggagatatcacttcggggcgtcaagctctctttaagcggcggggggcccgaattccaacgctgcagtcacttcttccagatgaagaatatttccttctgcggctgtcaccctcggaatagctgttatttcgggttcatcactaaacatccgctgctctccagattcgcctgtcacgtgttcgtcagtcaggagtcaatgcgccctgttgctcaatcagtgggcagggccttcctggagtattaccaggagcatcttgcgtatgcatgtccgacagaggacatttacctggagtag

SEQ ID NO: 174021 - DNA, 2472 bp, Artificial Sequence
  derived and/or modified sequence
atggctgacagagctgagatgttcagcctgagcaccttccacagcctgagccccccaggctgcaggcctccccaggacatcagcctggaggagtttgatgatgaggacctgtctgagatcacagatgactgtggcctgggcctgtcctatgacagcgaccactgtgagaaggacagcctgagcctgggccgctctgagcagccccaccccatctgcagcttccaggatgacttccaggagtttgagatgattgatgacaatgaggaggaggatgatgaagatgaggaggaggaggaggaggaggaggagggagatggagagggccaggagggcggggaccccggcagcgaggccccagcccctggccccctcatccccagccccagcgtggaggagccccacaagcaccggcccaccaccctgcggctgaccaccctgggcgcccaggacagcctgaacaacaatggaggctttgacctggtgcggcctgcctcctggcaggagacagccctgtgcagccctgcccctgaggccctgcgggagctgcccggccccctgcctgccacagacaccggccctggaggagcccagagccctgtgcggcccggctgtgactgtgagggcaacagacctgctgagcccccagcccctgggggcaccagccccagcagtgaccccggcatcgaggccgacctgcggagccgcagcagcggcggccggggcggcagaagaagcagccaggagctgagcagccctggcagtgacagtgaagatgctgggggccgcctgggccgcatgatcagcagcatcagcgagacagagctggagctgagcagtgatggcggcagcagcagcagcggccgcagcagccacctgaccaacagcattgaggaggccagcagccctgccagcgagcctgagcccccccgggagcccccccggcggcctgccttcctgcctgtgggcccagatgacaccaacagtgaatatgagagcggcagcgagagcgagccagacctgtctgaagatgctgacagcccctggctgctgagcaacctggtgtccaggatgatcagcgagggcagcagccccatccgctgccccggccagtgcctgagccctgccccccggcccccaggagagcctgtgtccccagctgggggcgccgcccaggacagccaggaccctgaggccgccgccggccctgggggcgtggagctggtggacatggagaccctgtgtgcccctcctcctccagccccagctgccccccggcccggccctgcccagcccggcccctgcctcttcctgagcaaccccacccgggacaccatcacccccctgtgggccgcccctggccgggccgcccggcccggccgggcctgcagcgctgcctgcagcgaggaggaggatgaagaagatgatgaggaggaggaggatgctgaggacagcgctggcagccctgggggccggggcaccggccccagcgcccccagagatgccagcctggtgtatgatgctgtgaagtacaccctggtggtggatgagcacacccagctggagctggtgtccctgcggcgctgtgccggcctgggccatgattctgaagaagattctggaggagaggccagcgaggaggaggccggggccgccctgctgggcggcggccaggtgtctggggacaccagcccagacagcccagacctgaccttcagcaagaagttcctgaatgtgtttgtgaacagcaccagccgcagcagcagcacagagagctttggcctcttcagctgcctggtgaatggagaggagcgggagcagacccacagagctgtgttccgcttcatccccaggcacccagatgagctggagctggatgtggatgatcctgtgctggtggaggccgaggaggatgacttctggttccggggcttcaacatgaggactggagagcggggcgtcttccctgccttctacgcccatgctgtgcccggccctgccaaggacctgctgggcagcaagaggagcccctgctgggtggagagatttgatgtgcagttcctgggctctgtggaggtgccctgccaccagggcaatggcatcctgtgtgccgccatgcagaagatcgccacagccaggaagctgactgtgcacctgcggcccccagccagctgtgacctggagatcagcctgcggggcgtgaagctgagcctgagcggcggcggccctgagttccagcgctgcagccacttcttccagatgaagaacatctccttctgtggctgccaccccaggaacagctgctacttcggcttcatcaccaagcaccccctgctgagcagatttgcctgccacgtgtttgtgtcccaggagagcatgaggcctgtggcccagagcgtgggccgggccttcctggagtactaccaggagcacctggcctatgcctgccccacagaggacatctacctggagtag

SEQ ID NO: 174022 - DNA, 3358 bp, Artificial Sequence
  derived and/or modified sequence
cgcggggcggacgccgcagggcgtgtcacgaggtgagcggggcgggccgagcgccggcgcggggcgcggcgaggctcccgcaccccccgccgcagtcgcgggcctctcccggagaagatggcggatcgcgcggagatgttttctctctccaccttccactcgctgtcgccgccgggctgcaggcctccccaggacataagcctggaagaatttgacgacgaagatctgtctgagatcactgatgactgtggcctgggcctcagctacgactcagaccactgtgagaaggacagcctctccctggggcgctcggagcagccgcaccccatctgctccttccaggatgacttccaggagtttgagatgatcgatgacaatgaagaggaggacgatgaggacgaggaagaggaggaggaggaggaggagggagatggggaaggccaggagggaggagaccctggctcagaggcacctgcccccgggccccttatcccctccccttccgtggaggagccccacaagcaccggcccaccaccctccgtctgaccacactgggggcccaggactccctaaacaacaacggaggctttgacctggtgcgtccggcctcctggcaggagacagcgctatgctcacccgccccggaggccctcagagagctcccgggccccctccctgccacggacaccgggcccggcggggcgcagtcgccagtgcgcccgggttgcgactgcgaagggaaccggcctgcggaaccccctgcgccaggggggacttcgccctcctcagatcccggcatcgaggctgacctgagaagccgctcgagcggcggccgcgggggacgtcgcagcagccaggagctgtcctcgcccggctccgactcggaggacgcgggcggccgcctggggcgcatgatctcgtccatctcggagacggagctggagctgagcagcgatggcggaagcagcagcagcggccgctcctcgcacctcaccaactccatcgaggaggcctcgtcgcccgcctcggagccggagcccccgcgcgaacccccgcgccgccccgccttcctgcccgtgggccccgacgacaccaacagcgagtacgagtcggggtcggagtcggagccggacctcagcgaggacgcggactcgccctggctgctcagcaacctggtgagccgcatgatctccgagggctcctcgcccatccgctgccccggccagtgcctgtctcctgcgccgcgcccgcccggggagcccgtgtcgccggccggcggggccgcccaggactcccaggaccccgaggcggccgcggggcccggcggcgtggagctggtggacatggagacgctgtgcgcgccgccgccgcccgcgcccgccgcgcctcgacccggccccgcgcagcccgggccctgcctattcctcagcaaccccacgcgtgacaccatcacgccgctgtgggccgcgcccggccgcgccgcccgcccgggacgagcctgctccgccgcctgctccgaggaggaggacgaagaggacgacgaggaagaggaggatgccgaggacagtgcggggtcccccgggggcaggggcacgggcccctcggcgccgcgggacgcgtcgctggtgtacgacgcggtcaagtacacgctggtggtggatgagcacacgcagctggagctggtgagcctgcggcgctgtgctgggctgggccacgacagcgaagaggacagcggcggggaggccagcgaggaggaggcgggcgcggcgctgctaggcggcggtcaggtctcgggggacacctcgccggacagccctgacctcactttctccaagaagttcctcaatgtcttcgtcaacagcacatctcggtcctccagcaccgagtcctttggccttttctcctgtctggtcaacggcgaggagcgagagcagactcaccgggctgtgttcaggttcatcccgcggcatccagacgagctggagctggatgtggatgaccctgtgttggtggaggccgaggaggacgacttctggttccgtggcttcaacatgcgcacgggggagcgcggtgtgtttcctgccttctacgcccatgcggtgcccggccctgccaaggacctgctggggagtaagcggagcccctgctgggtggagcgctttgacgtgcagttcctgggctccgtggaggtgccctgccaccagggcaacggcatcctgtgtgcagccatgcagaagattgccactgcccggaaactgaccgtccacctgcgccctcctgcctcctgtgacctcgagatctctcttcggggggtcaagctgagtctgagcggaggagggcccgagttccagcgctgcagccatttcttccagatgaagaacatctccttctgcggctgccatccccgcaacagctgctatttcggcttcatcaccaaacaccccctgctgagccgcttcgcctgccacgtctttgtctcccaggagtccatgaggccggtggcgcagagtgtgggccgcgccttcctggagtactaccaagagcacctggcgtacgcctgccccacggaggacatctacctggagtagcctgcccaccgctctgtctcctggccgtctgctccaggcgcagctggggctgaggatgtctcaagaggccaccatggctttggcaaggactggattggggggacatgggaccttacgcttgtgggggtctgcgggctgggaactctcgtcctcggtccccagggcgcagctgttggggctgcgggggagtggagcccccgtgcccctgcttttcctcagatccgttctttctctgtgttgtcctcctccttcccttcccagtctcccttttctctctcctggtgtctctgcccctctctgtgcctgcaaaccttatcctctattcttcactttggggtcagaacttcgggggtgtggaggaggtgcggctctagggacaggtaatgtcggcttccaagtgatgccctcctgccactcccctgcgatttataagggaattttaatttttatagtgaatctcaagggatcatcccatccttgaccacagggacaagaggggccccctcgccccagccccaccccacatggagctcagggggaagcagggaggggttcccaaaagagccctgcggaggctaggagtggttcttgatgctcacctgaagcccctagacgctgctaggagggggggccctcctgggcccccaatacccctccgcttgccgctgctagcgcacccctgcagtccagcgtgcatccaccccacgcacgccccgtgctgtgttcctgggccctgcccatggcctcaataaactctctgcttggtgtg

SEQ ID NO: 174023 - DNA, 2472 bp, Artificial Sequence
  derived and/or modified sequence
atggccgaccgggccgagatgttcagcctgagcaccttccacagcctctcccctccagggtgccgacctccacaagacatttcattggaggaattcgacgacgaagatctgtcagagattaccgatgactgcggcctggggctgtcttatgactcggaccattgcgagaaggattctctttccctcggaaggtctgaacagcctcaccctatttgttccttccaggacgacttccaggagtttgagatgatcgatgataatgaggaagaagacgatgaggatgaggaggaggaagaggaggaggaggaaggagacggcgaagggcaggaaggaggggatcctggctcagaggctcctgctcccggcccactgattccgtcacctagtgtggaagagccccacaagcacagacccactaccctaagattgacaacattgggagcccaggatagcctcaacaataacggcggcttcgaccttgtccgccccgcgtcctggcaagagactgcattatgctcacccgctccagaggctctgagagagctgcccggccctttgcccgcgacagataccgggccaggcggcgctcagtcacccgtgaggcctggttgcgattgcgaggggaatcgcccagccgaacctcccgctcctgggggtacctccccatccagcgacccgggcattgaggctgacctgaggtcacggtcaagcgggggcagagggggccggcgctcctcacaggagctctcaagtcccggtagcgattccgaagatgctggcgggcgcctcggaaggatgattagtagcatcagcgaaactgagctcgagctgagttccgacggcggaagtagctcctcaggccgaagctctcatctgaccaattccatcgaggaggcttcttcaccagcgtcagagccagagcctcctcgggaacctcccaggcggcccgcatttctgcctgtgggccccgatgacactaatagtgaatacgagtctggctcagagtcagaaccagacctgagtgaggacgcagatagtccttggttattgagcaatctggtgtcacgtatgatttccgaggggagttctccaatcagatgccccgggcagtgcctgtcccctgctccccggccaccaggcgagccagtgtcccccgccgggggggccgcgcaggatagccaggatccagaagccgccgctggtccaggaggggtagagctggttgatatggagaccttgtgcgctccaccccctcccgcccccgctgcaccccgacctggtccggctcaacccgggccctgcctgtttctgtctaaccccacccgagatacaattacccccctatgggctgccccaggtagggctgctcgccccggtcgcgcctgcagcgctgcttgctcagaggaggaggacgaggaagacgacgaggaagaagaagacgccgaagattcagcgggatcaccgggagggcggggaaccgggccctctgcccccagggacgcctcattggtttacgatgctgtgaagtatacgctggtggtggatgagcatactcagttggagctggtttccttgcgccgctgcgccggacttgggcatgactcagaagaggactcagggggtgaggcctcagaagaggaggcaggcgcggcattgctgggcggagggcaagtctcgggagataccagccctgatagtcccgatcttacattcagtaagaaattcctgaatgtgttcgtaaatagcacgtctagatcgtctagcacagagagctttggtctctttagctgcctggttaatggggaggagcgcgaacagacacatcgtgcagtattccggtttatcccaaggcaccccgatgaattagagctcgatgtggacgacccggtgctggtagaagcggaagaggacgacttctggttccggggctttaatatgcgcacgggcgagcgaggggtttttcccgcattttatgcacatgctgtgcccggcccagcaaaagatctcctcggttcaaagaggagcccgtgctgggtggaaaggttcgacgttcaattccttggcagcgttgaggtcccatgccaccagggcaatggtatcctctgcgccgccatgcagaaaatagcaaccgctcggaaactgaccgtgcacctgagaccacccgcatcctgtgacttggagatttccttaagaggggtgaagctcagcctgtcaggcggcggccccgagtttcagcggtgcagtcactttttccagatgaaaaatatcagcttttgcgggtgccaccctaggaacagttgctattttggatttatcactaaacatccgctccttagtagatttgcctgccatgtgttcgtctctcaggagtctatgcgccccgtggctcagtcagtcggtcgagcttttcttgagtattatcaggaacacctggcatacgcatgcccgaccgaagatatttacctggaatag

SEQ ID NO: 174024 - DNA, 2472 bp, Artificial Sequence
  derived and/or modified sequence
atggccgatcgagccgagatgttttctctgagcacattccacagcctctcaccgccaggttgcagaccccctcaggacatctcattggaagagttcgatgatgaggacctgagcgaaatcacagacgactgcggactgggcctcagttacgactcagaccattgcgagaaagactctttgagtctcggacgctcagagcagccccatcccatttgcagctttcaagacgacttccaggaattcgaaatgatcgacgacaacgaggaggaagatgacgaagacgaggaagaagaggaagaggaggaagaaggtgatggcgagggacaagagggcggagaccctggatctgaggcacccgcacccggtcctctcatccctagcccctcagtggaggaaccacacaaacatagaccaacaaccctccggctcacaacactgggcgcacaggacagtcttaacaacaacgggggttttgacctggttcgcccagcctcttggcaagaaactgcgttatgttcccccgctcccgaggctctcagagaactgccgggaccactccccgctactgacactggccctggcggtgctcaatccccagtgagacccggttgtgattgtgaaggaaacaggccagccgagccaccagccccaggaggaacaagtcctagctccgatcctggcatagaggccgacttgcgatctcggtcgagcggtgggaggggcggacgcaggagtagtcaggagctgtcttcacccggatcagactctgaggacgccggtgggagattggggagaatgattagttctattagtgaaactgaacttgagttgtcaagcgatgggggatcctctagttccggcaggtcaagtcacctgacaaatagtatcgaagaagcaagctccccggcatcagaaccagagccccctagagaaccgcctcgccgaccggcattccttcccgttgggccagatgatactaattcggaatatgagagcggatccgagtccgagccggacctcagtgaggatgcagattcgccttggctactgtcaaaccttgtgagtcgaatgatctcagaggggtcaagtcccatcaggtgtcccggacagtgtctatctcctgctccgaggccacccggtgaacctgtgagccctgctggaggtgcagctcaggattctcaagaccctgaagctgcggctgggccaggcggagtcgagctggttgatatggagactctctgtgcaccacccccaccagcccctgctgccccacggccaggcccagcacaaccaggaccatgcttgttcctgtccaaccctacgcgggataccattacccccctatgggcagcacctggaagggccgcacggccaggaagggcttgcagcgcagcttgtagcgaggaagaagacgaggaggatgacgaggaagaagaggatgctgaggattctgccggttcaccaggcggtcggggtactggtccctcagccccacgagacgcatcactagtttacgatgcagttaaatatacactcgtcgtggatgagcatacacagctggaattggtgagtttaaggagatgcgctggtctcggacacgattccgaagaggatagcggtggcgaggctagcgaagaggaggccggtgctgccctgctcgggggtggccaagtctcgggggacactagcccagattctcccgacctgaccttcagcaagaaattcttgaatgtgtttgtcaactcaacttctcggtcttcatcaacagaaagctttggtttattctcctgtctagtcaacggagaggaacgggagcagacacatcgggcagtgtttagattcatccccagacaccccgatgagctagagcttgatgttgacgatcccgtactggtcgaagcggaggaggatgatttctggtttcgcggattcaatatgagaacaggtgagagaggtgttttccctgcattctatgcccacgcggtgcctggcccagcgaaagatttgttgggctccaagagatctccatgctgggtagaaaggttcgacgtacagtttctgggcagtgtggaggtgccctgtcatcagggaaacggcatattgtgcgctgcaatgcagaagatcgcgactgcccgtaagctgaccgttcacttgaggccacccgctagctgcgacctagaaattagcctcaggggtgtgaaactcagtctgtcagggggaggaccagaattccagcggtgttcccatttcttccagatgaagaacatttctttctgcggctgccaccccagaaactcctgctattttgggtttataactaagcatcctctgctgagccgctttgcgtgtcatgtcttcgttagtcaggaatcgatgcgcccagttgcccagagcgtcggtagggcctttctcgaatactaccaggaacatctggcatacgcttgtcccacagaagatatatatctggaatag

SEQ ID NO: 174025 - DNA, 2472 bp, Artificial Sequence
  derived and/or modified sequence
atggccgacagagccgagatgttcagcctgagcaccttccacagcctgagcccccccggctgcagacccccccaggacatcagcctggaggagttcgacgacgaggacctgagcgagatcaccgacgactgcggcctgggcctgagctacgacagcgaccactgcgagaaggacagcctgagcctgggcagaagcgagcagccccaccccatctgcagcttccaggacgacttccaggagttcgagatgatcgacgacaacgaggaggaggacgacgaggacgaggaggaggaggaggaggaggaggagggcgacggcgagggccaggagggcggcgaccccggcagcgaggcccccgcccccggccccctgatccccagccccagcgtggaggagccccacaagcacagacccaccaccctgagactgaccaccctgggcgcccaggacagcctgaacaacaacggcggcttcgacctggtgagacccgccagctggcaggagaccgccctgtgcagccccgcccccgaggccctgagagagctgcccggccccctgcccgccaccgacaccggccccggcggcgcccagagccccgtgagacccggctgcgactgcgagggcaacagacccgccgagccccccgcccccggcggcaccagccccagcagcgaccccggcatcgaggccgacctgagaagcagaagcagcggcggcagaggcggcagaagaagcagccaggagctgagcagccccggcagcgacagcgaggacgccggcggcagactgggcagaatgatcagcagcatcagcgagaccgagctggagctgagcagcgacggcggcagcagcagcagcggcagaagcagccacctgaccaacagcatcgaggaggccagcagccccgccagcgagcccgagccccccagagagccccccagaagacccgccttcctgcccgtgggccccgacgacaccaacagcgagtacgagagcggcagcgagagcgagcccgacctgagcgaggacgccgacagcccctggctgctgagcaacctggtgagcagaatgatcagcgagggcagcagccccatcagatgccccggccagtgcctgagccccgcccccagaccccccggcgagcccgtgagccccgccggcggcgccgcccaggacagccaggaccccgaggccgccgccggccccggcggcgtggagctggtggacatggagaccctgtgcgccccccccccccccgcccccgccgcccccagacccggccccgcccagcccggcccctgcctgttcctgagcaaccccaccagagacaccatcacccccctgtgggccgcccccggcagagccgccagacccggcagagcctgcagcgccgcctgcagcgaggaggaggacgaggaggacgacgaggaggaggaggacgccgaggacagcgccggcagccccggcggcagaggcaccggccccagcgcccccagagacgccagcctggtgtacgacgccgtgaagtacaccctggtggtggacgagcacacccagctggagctggtgagcctgagaagatgcgccggcctgggccacgacagcgaggaggacagcggcggcgaggccagcgaggaggaggccggcgccgccctgctgggcggcggccaggtgagcggcgacaccagccccgacagccccgacctgaccttcagcaagaagttcctgaacgtgttcgtgaacagcaccagcagaagcagcagcaccgagagcttcggcctgttcagctgcctggtgaacggcgaggagagagagcagacccacagagccgtgttcagattcatccccagacaccccgacgagctggagctggacgtggacgaccccgtgctggtggaggccgaggaggacgacttctggttcagaggcttcaacatgagaaccggcgagagaggcgtgttccccgccttctacgcccacgccgtgcccggccccgccaaggacctgctgggcagcaagagaagcccctgctgggtggagagattcgacgtgcagttcctgggcagcgtggaggtgccctgccaccagggcaacggcatcctgtgcgccgccatgcagaagatcgccaccgccagaaagctgaccgtgcacctgagaccccccgccagctgcgacctggagatcagcctgagaggcgtgaagctgagcctgagcggcggcggccccgagttccagagatgcagccacttcttccagatgaagaacatcagcttctgcggctgccaccccagaaacagctgctacttcggcttcatcaccaagcaccccctgctgagcagattcgcctgccacgtgttcgtgagccaggagagcatgagacccgtggcccagagcgtgggcagagccttcctggagtactaccaggagcacctggcctacgcctgccccaccgaggacatctacctggagtag

SEQ ID NO: 174026 - protein, 268 aa, Artificial Sequence
  derived and/or modified sequence
MAVNVYSTSVTSDNLSRHDMLAWINESLQLNLTKIEQLCSGAAYCQFMDMLFPGSIALKKVKFQAKLEHEYIQNFKILQAGFKRMGVDKIIPVDKLVKGKFQDNFEFVQWFKKFFDANYDGKDYDPVAARQGQETAVAPSLVAPALNKPKKPLTSSSAAPQRPISTQRTAAAPKAGPGVVRKNPGVGNGDDEAAELMQQVNVLKLTVEDLEKERDFYFGKLRNIELICQENEGENDPVLQRIVDILYATDEGFVIPDEGGPQEEQEEY

SEQ ID NO: 174027 - DNA, 807 bp, Artificial Sequence
  derived and/or modified sequence
atggcagtgaatgtttatagcacatcagtgacctccgataatttatctcggcatgacatgctggcatggattaatgagtctctgcagttgaatctgaccaaaattgaacagctgtgttcgggcgccgcctattgccagtttatggatatgttgttcccgggctctatcgcactcaagaaggtcaagtttcaagctaaactggagcatgagtatatccagaatttcaagatcctgcaagccgggtttaagcgtatgggcgtcgataaaattattccagttgataaactggtgaaaggcaagttccaggacaattttgaatttgtgcagtggttcaaaaagttcttcgacgccaactatgacgggaaggactacgatcctgtcgccgctcgccagggccaagaaaccgcagtcgctcctagtcttgtggcacccgcgctgaacaagcctaagaaaccgctcaccagcagcagcgcggccccacaaagacccatctcaacgcagcggacagccgccgctccaaaagctgggcctggcgtggtgcggaaaaatccaggtgttgggaatggtgatgatgaggctgctgaactgatgcaacaggtcaacgtcctaaagctgaccgtcgaagacctcgagaaggagagggatttctacttcggcaagctccgcaacattgagttaatctgccaggagaacgaaggagagaatgatccagttctgcagaggattgtcgatatcctttatgcaaccgatgaaggattcgtgataccagatgagggaggtcctcaggaggaacaggaggagtactag

SEQ ID NO: 174028 - DNA, 807 bp, Artificial Sequence
  derived and/or modified sequence
atggctgtgaatgtgtacagcacctctgtgaccagtgacaacctgagcagacatgacatgctggcctggatcaatgaaagcctgcagctgaacctgaccaagattgagcagctgtgcagcggggccgcctactgccagttcatggacatgctgtttcctggcagcatcgccctgaagaaggtgaagttccaggccaagctggagcacgagtacatccagaacttcaagatcctgcaggccggcttcaagaggatgggcgtggacaagatcatccctgtggacaagctggtgaagggcaagttccaggacaactttgaatttgtgcagtggttcaagaagttctttgatgccaactatgatggcaaggactatgaccctgtggccgcccggcagggccaggagacagctgtggcccccagcctggtggccccagccctgaacaagcccaagaagcccctgaccagcagcagcgctgccccccagaggcccatcagcacccagaggacagctgctgcccccaaggccggccctggggtggtgaggaagaaccctggggtgggcaatggagatgatgaagctgctgagctgatgcagcaggtgaatgtgctgaagctgactgtggaggacctggagaaggagcgggacttctactttgggaagctgaggaacatcgagctgatctgccaggagaatgaaggagaaaatgaccctgtgctgcagagaattgtggacatcctgtatgccacagatgagggctttgtgatcccagatgaaggaggcccccaggaggagcaggaggagtactag

SEQ ID NO: 174029 - DNA, 2623 bp, Artificial Sequence
  derived and/or modified sequence
ctttacgtcggcgcgtaacgagggggtgcgtgtgaggtcatcgcgcgggcgggcgggcggggtctggcggtttgaacgagacgaagacggaaccggagccggttgcgggcagtggacgcggttctgccgagagccgaagatggcagtgaacgtatactcaacgtcagtgaccagtgataacctaagtcgacatgacatgctggcctggatcaatgagtctctgcagttgaatctgacaaagatcgaacagttgtgctcaggggctgcgtattgtcagtttatggacatgctgttccctggctccattgccttgaagaaagtgaaattccaagctaagctagaacacgagtacatccagaacttcaaaatactacaagcaggttttaagagaatgggtgttgacaaaataattcctgtggacaaattagtaaaaggaaagtttcaggacaattttgaattcgttcagtggttcaagaagtttttcgatgcaaactatgatggaaaagactatgaccctgtggctgccagacaaggtcaagaaactgcagtggctccttcccttgttgctccagctctgaataaaccgaagaaacctctcacttctagcagtgcagctccccagaggcccatctcaacacagagaaccgctgcggctcctaaggctggccctggtgtggtgcgaaagaaccctggtgtgggcaacggagacgacgaggcagctgagttgatgcagcaggtcaacgtattgaaacttactgttgaagacttggagaaagagagggatttctacttcggaaagctacggaacattgaattgatttgccaggagaacgagggggaaaacgaccctgtattgcagaggattgtagacattctgtatgccacagatgaaggctttgtgatacctgatgaagggggcccacaggaggagcaagaagagtattaacagcctggaccagcagagcaacatcggaattcttcactccaaatcatgtgcttaactgtaaaatactcccttttgttatccttagaggactcactggtttcttttcataagcaaaaagtacctcttcttaaagtgcactttgcagacgtttcactccttttccaataagtttgagttaggagcttttaccttgtagcagagcagtattaacacctagttggttcacctggaaaacagagaggctgaccgtggggctcaccatgcggatgcgggtcacactgaatgctggagagatgttatgtaatatgctgaggtggcgacctcagtggagaaatgtaaagactgaattgaattttaagctaatgtgaaatcagagaatgttgtaataagtaaatgccttaagagtatttaaaatatgcttccacatttcaaaatataaaatgtaacatgacaagagattttgcgtttgacattgtgtctgggaaggaagggccagaccttggaacctttggaacctgctgtcaacaggtcttacagggctgcttgaaccctcataggcctaggctttggtctaaaaggaacatttaaaaagttgccctgtaaagttatttggtgtcattgaccaattgcatcccagctaaaaagcaagaggcatcgttgcctggataatagaggatgtgtttcagccctgagatgttacagttgaagagcttggttttcattgagcatttctctatttttccagttatccccgaaatttctatgtattatattttttggggaagtgaggtgtgcccagttttttaatctaacaactacttttggggacttgcccacatctctgggatttgaatggggattgtatcccattttactgtcttttaggtttacatttaccacgtttctcttctctgctccccttgcccactggggactcctctttggctccttgaagtttgctgcttagagttggaagtgcagcaggcaggtgatcatgctgcaagttctttctggacctctggcaaagggagtggtcagtgaaggccatcgttaccttgggatctgccaggctggggtgttttcggtatctgctgttcacagctctccactgtaatccgaatactttgccagtgcactaatctctttggagataaaattcattagtgtgttactaaatgttaattttcttttgcggaaaatacagtaccgtgtctgaattaattattaatatttaaaatacttcattccttaactctccctcatttgctttgcccacagcctattcagttcctttgtttggcaggattctgcaaaatgtgtctcacccactactgagattgttcagcccctgatgtatttgtattgatttgtttctggtggtagcttgtcctgaaatgtgtgtagaaagcaagtattttatgataaaaatgttgtgtagtgcatgctctgtgtggaattcagaggaaaacccagattcagtgattaacaatgccaaaaaatgcaagtaactagccattgttcaaatgacagtggtgctatttctcttttgtggccttttagacttttgttgccctaaaattccattttattgggaacccattttccacctggtctttcttgacagggtttttttctactttaaacagtttctaaataaaattctgtatttcaagagta

SEQ ID NO: 174030 - DNA, 807 bp, Artificial Sequence
  derived and/or modified sequence
atggccgtgaacgtgtacagcaccagcgtgaccagcgacaacctgagccggcatgatatgctggcctggatcaacgagtcccttcagttgaacctgaccaagatcgagcagctctgttccggtgctgcgtactgtcagttcatggatatgctcttccccggtagtattgccctgaaaaaggttaagttccaagcaaaactcgagcacgaatatatacagaattttaaaattcttcaggcggggttcaagcggatgggggtggataaaattatacctgtagacaagctcgtcaagggcaagtttcaagataatttcgagttcgtgcagtggttcaaaaaatttttcgacgcgaattatgatggaaaggactatgaccctgtagcagcacgacaggggcaggaaacggcggtcgcgccgagtctggttgcgccagcccttaacaaacctaagaagcctctcacttccagcagtgccgctcctcaacgcccaatctctacacagagaactgctgccgcccccaaagcaggtcctggcgtggtgagaaagaaccccggcgtaggaaatggggacgatgaagctgcggaacttatgcaacaggtgaacgtcctgaaattgactgtggaagacctggagaaggagagggacttttattttggtaagctgcggaacatcgagttgatttgtcaggaaaatgaaggggagaacgatccagtcctgcagagaatcgtcgatatcttatatgcgaccgacgaggggttcgtgattcctgacgaaggcgggccccaagaagagcaggaggaatattag

SEQ ID NO: 174031 - DNA, 807 bp, Artificial Sequence
  derived and/or modified sequence
atggccgtcaacgtctactccacgtcagtaacttcagataacctgagtcggcatgacatgctggcttggattaatgaaagcttgcagttgaatctcaccaagattgaacagctgtgttccggagcagcttactgtcaatttatggacatgctctttcctggcagcatagccctgaagaaggtgaaattccaggctaagctggaacacgagtacatccagaattttaaaatcttgcaggcaggattcaagagaatgggagtcgataaaatcatacctgttgataagctggtaaagggcaaattccaggataactttgaatttgtgcagtggtttaaaaagttttttgatgctaactacgatggtaaagattacgatcccgtcgccgcaagacaggggcaggagaccgcagtcgcaccgtccctggtggctcccgctttgaataagccgaagaaacctctgactagtagttccgccgcaccccagcgcccaatatcaactcagaggactgctgcagcccctaaagctggccctggcgtcgtgagaaagaaccctggggttggcaacggagacgacgaagctgccgaactgatgcagcaggttaacgtgctgaagctgacagtggaagacctagagaaggagcgagacttctacttcgggaagctccgtaatatcgaactgatctgccaggagaacgaaggggaaaacgatcccgtgcttcagaggatcgtcgacatcctttatgctactgatgaaggattcgttattccagatgagggcggtccccaggaagagcaggaggagtactag

SEQ ID NO: 174032 - DNA, 807 bp, Artificial Sequence
  derived and/or modified sequence
atggccgtgaacgtgtacagcaccagcgtgaccagcgacaacctgagcagacacgacatgctggcctggatcaacgagagcctgcagctgaacctgaccaagatcgagcagctgtgcagcggcgccgcctactgccagttcatggacatgctgttccccggcagcatcgccctgaagaaggtgaagttccaggccaagctggagcacgagtacatccagaacttcaagatcctgcaggccggcttcaagagaatgggcgtggacaagatcatccccgtggacaagctggtgaagggcaagttccaggacaacttcgagttcgtgcagtggttcaagaagttcttcgacgccaactacgacggcaaggactacgaccccgtggccgccagacagggccaggagaccgccgtggcccccagcctggtggcccccgccctgaacaagcccaagaagcccctgaccagcagcagcgccgccccccagagacccatcagcacccagagaaccgccgccgcccccaaggccggccccggcgtggtgagaaagaaccccggcgtgggcaacggcgacgacgaggccgccgagctgatgcagcaggtgaacgtgctgaagctgaccgtggaggacctggagaaggagagagacttctacttcggcaagctgagaaacatcgagctgatctgccaggagaacgagggcgagaacgaccccgtgctgcagagaatcgtggacatcctgtacgccaccgacgagggcttcgtgatccccgacgagggcggcccccaggaggagcaggaggagtactag

SEQ ID NO: 174033 - protein, 223 aa, Artificial Sequence
  derived and/or modified sequence
MATPQSIFIFAICILMITELILASKSYYDILGVPKSASERQIKKAFHKLAMKYHPDKNKSPDAEAKFREIAEAYETLSDANRRKEYDTLGHSAFTSGKGQRGSGSSFEQSFNFNFDDLFKDFGFFGQNQNTGSKKRFENHFQTRQDGGSSRQRHHFQEFSFGGGLFDDMFEDMEKMFSFSGFDSTNQHTVQTENRFHGSSKHCRTVTQRRGNMVTTYTDCSGQ

SEQ ID NO: 174034 - DNA, 672 bp, Artificial Sequence
  derived and/or modified sequence
atggccacaccccagtctatcttcattttcgcaatctgcatactgatgataacggaactcattctggcctccaaatcatattatgacattctgggggtacctaaaagcgcaagcgagaggcagattaaaaaggcgtttcacaaactggcgatgaagtaccaccccgataaaaacaagagtccagacgcagaggccaaattccgggaaatcgcagaagcttacgaaaccctgagcgatgcgaacagaagaaaggaatacgatactctcggccatagcgcgtttacaagcggaaaaggccagcgcgggtctggaagcagtttcgaacaatccttcaatttcaactttgacgatttgttcaaggactttggcttcttcgggcaaaatcagaatacagggagcaagaagaggtttgaaaaccacttccaaactaggcaggatgggggaagttccagacaacgccaccacttccaggaatttagttttggcggggggcttttcgatgatatgtttgaggacatggaaaagatgtttagctttagtgggttcgactccacaaatcagcacacggttcagaccgaaaataggtttcatggctccagcaagcattgtagaactgtcacacagcggcggggcaatatggtaacaacctacactgattgctccggacagtag

SEQ ID NO: 174035 - DNA, 672 bp, Artificial Sequence
  derived and/or modified sequence
atggccaccccccagagcatcttcatctttgccatctgcatcctgatgatcacagagctgatcctggccagcaagagctactatgacatcctgggcgtgcccaagagcgccagcgagcggcagatcaagaaggccttccacaagctggccatgaagtaccacccagacaagaacaagagcccagatgctgaggccaagttccgggagattgctgaggcctatgagaccctgagtgatgccaacagaaggaaggagtatgacaccctgggccacagcgccttcaccagcggcaagggccagaggggcagcggcagcagctttgagcagagcttcaacttcaactttgatgacctcttcaaggactttggcttcttcggccagaaccagaacacaggcagcaagaagagatttgagaaccacttccagacccggcaggacggcggcagcagccggcagaggcaccacttccaggagttctcctttggaggcggcctgtttgatgacatgtttgaggacatggagaagatgttctccttcagcggctttgacagcaccaaccagcacacagtgcagacagaaaatcgcttccacggcagcagcaagcactgcaggacagtgacccagaggcggggcaacatggtgaccacctacacagactgcagcggccagtag

SEQ ID NO: 174036 - DNA, 672 bp, Artificial Sequence
  derived and/or modified sequence
atggccaccccccagagcatcttcatcttcgccatctgcatcctgatgattacagagcttattctggcatccaagagttactacgatattcttggagtacccaagtcagcatctgagcgccagatcaagaaggccttccataaactcgcaatgaagtatcatccggacaagaataagtcacctgacgctgaagcaaagtttcgcgaaatcgccgaggcctacgagacgctctcggatgccaacaggaggaaggagtacgacactctggggcactctgccttcacctctggcaaaggccagcgcgggagcggatcctcatttgaacagagctttaactttaatttcgatgacctgttcaaagacttcggattttttgggcaaaatcagaataccggatccaagaagcgattcgagaatcacttccagaccaggcaggacggtggcagctcccggcagcggcaccacttccaggagttctcattcgggggtggtctgtttgatgacatgttcgaagacatggagaagatgttctcatttagcggttttgatagcaccaatcagcatacagttcaaacagaaaaccggttccacggatcttcaaagcactgccgaaccgtcacccagcgcaggggcaatatggtgactacatatacagattgctccggtcaatag

SEQ ID NO: 174037 - DNA, 672 bp, Artificial Sequence
  derived and/or modified sequence
atggcaacaccacagtctatcttcatttttgccatatgcattctgatgatcaccgagctgatccttgccagtaagagctactatgatattctgggtgtgccaaaatccgcttctgagcggcagatcaagaaggcgtttcacaaactcgccatgaagtatcatcctgacaagaacaagtcgccagacgcagaagcaaaatttcgggaaatcgcagaagcctatgagaccctgtcagacgctaatcgaaggaaagaatatgatacactcggccactccgcattcacaagtgggaaggggcagcggggttccgggtcgtctttcgaacaatctttcaattttaactttgatgacttgttcaaggacttcggatttttcggacagaatcagaatactggttctaagaaacggttcgagaatcattttcagactaggcaggacgggggttcctcacgtcagcggcaccatttccaggaatttagtttcggcggtggcctgtttgatgacatgttcgaggatatggaaaaaatgttttctttttccggatttgactctaccaaccagcacactgtacaaaccgaaaacagatttcacggatcaagtaaacactgccggaccgtgacccagcgacgcggaaacatggtcaccacttacaccgattgttcaggacaatag

SEQ ID NO: 174038 - DNA, 672 bp, Artificial Sequence
  derived and/or modified sequence
atggccaccccccagagcatcttcatcttcgccatctgcatcctgatgatcaccgagctgatcctggccagcaagagctactacgacatcctgggcgtgcccaagagcgccagcgagagacagatcaagaaggccttccacaagctggccatgaagtaccaccccgacaagaacaagagccccgacgccgaggccaagttcagagagatcgccgaggcctacgagaccctgagcgacgccaacagaagaaaggagtacgacaccctgggccacagcgccttcaccagcggcaagggccagagaggcagcggcagcagcttcgagcagagcttcaacttcaacttcgacgacctgttcaaggacttcggcttcttcggccagaaccagaacaccggcagcaagaagagattcgagaaccacttccagaccagacaggacggcggcagcagcagacagagacaccacttccaggagttcagcttcggcggcggcctgttcgacgacatgttcgaggacatggagaagatgttcagcttcagcggcttcgacagcaccaaccagcacaccgtgcagaccgagaacagattccacggcagcagcaagcactgcagaaccgtgacccagagaagaggcaacatggtgaccacctacaccgactgcagcggccagtag

SEQ ID NO: 174039 - DNA, 2715 bp, Artificial Sequence
  derived and/or modified sequence
atgactcgggtgaggcccctggagaccggggccggcgacggatgcagggcggccctcctcactgaggatgcgccacaggtccaggcctctcgagcccctgcgcctgcgctagcattctgccgggaaagccgcctcgtctgtcgactcacttccgcctcctccggtttaagcaccgccttttcgggggttgaagccggaagtggcgcacagccctagcagcaacaacagttttccacgtgcgcgtagggcgccgggatcacgtggggaggcagaagccaatggggaagcgtttcgtgtaggtcttctgaggtggtggcgccagcggctacctcctgcctgtgaggagctggctgagaggggactgggcgccggcggggaaggaggagcgctaggtcggtgtacgaccgagattagggtgcgtgccagctccgggaggccgcggtgaggggccgggcccaagctgccgacccgagccgatcgtcagggtcgccagcgcctcagctctgtggaggagcagcagtagtcggagggtgcaggatattagaaatggctactccccagtcaattttcatctttgcaatctgcattttaatgataacagaattaattctggcctcaaaaagctactatgatatcttaggtgtgccaaaatcggcatcagagcgccaaatcaagaaggcctttcacaagttggccatgaagtaccaccctgacaaaaataagagcccggatgctgaagcaaaattcagagagattgcagaagcatatgaaacactctcagatgctaatagacgaaaagagtatgatacacttggacacagtgcttttactagtggtaaaggacaaagaggtagtggaagttcttttgagcagtcatttaacttcaattttgatgacttatttaaagactttggcttttttggtcaaaaccaaaacactggatccaagaagcgttttgaaaatcatttccagacacgccaggatggtggttccagtagacaaaggcatcatttccaagaattttcttttggaggtggattatttgatgacatgtttgaagatatggagaaaatgttttcttttagtggttttgactctaccaatcagcatacagtacagactgaaaatagatttcatggatctagcaagcactgcaggactgtcactcaacgaagaggaaatatggttactacatacactgactgttcaggacagtagttcttattctattctcactaaatccaactggttgactcttcctcattatctttgatgctaaacaattttctgtgaactattttgacaagtgcatgatttcactttaaacaatttgatatagctattaaatatatttaagggttttttttttttgacaaattcaacattcaacgagtagacaaaatgctaattatttccctgattaggaaagtttctttaaaaaacacgtaattttgcctagtgctttttctctacctgcccttgggctcactaatatcaccagtattattaccaagaaaatattgagtttacctgattaaactttaaaagttaattgtagatttaaattgtgtgaacctaatgatttttgcagtgaaacctttactaattcaaagttgcatgttctatgacatctgtgacttgcgttgcagagtgtacatgaaactgtataattgagtcattcagtaaaggagaacagtatcttggttaattgctactgaaaggttgagaaaggaatggtttgatatttaccacagcgctgtgcctttctacagtagaactggggtaaaggaaatggttttattgcccatagtcatttaggctggaaaaaagttgaaaacttaacgaaatattgccaagagattgttatgtgtttggttccagcctaaaaatgattttgtagtgttgaaatcatagctacttacatagctttttcatatttctttcttagttgttggcactcttaggtcttagtatggatttatgtgtttgtgtgtgtgtagtttatcctctctctcatctttatctagagattgactgatacctcattctgtttgtaaaaccagccagtaatttctgtgcaaccttactatgtgcaatatttttaaatcctgagaaatgtgtgcttttgttttcggatagacttatttctttagttctgcacttttccacattatactccatatgagtattaatcctatggatacatattaaaacaagtgtctcatacaacattgtatgtgagagaaatataaatatttacaacctgatattcgttgttgttttattgttaaaagtttattatgcaactctggaggtatagagggcatataagctatgggacatatgctgatcacaggctatattcatgaagttacttttgaccaacctgaaaactgataggattttgtttgtcatttggtaatttctactgcattcttaccatccttctctcacaaattttgatagcttgaagatctttttaattataattttgttgtatttgtttcctaggagcaagtgttcctgctgccagttctttcctctttaggcgtggttgagaaaaagcagaaactttacataaagctgtatttcttaatcatctttaatttgaaacttaagaaaatgaatttattctgttatatttatgtaacttatttcctggaagttatatctactagttttgtttgataataataaaattagctataccttgaa

SEQ ID NO: 174040 - protein, 238 aa, Artificial Sequence
  derived and/or modified sequence
MRFKNRFQRFMNHRAPANGRYKPTCYEHAANCYTHAFLIVPAIVGSALLHRLSDDCWEKITAWIYGMGLCALFIVSTVFHIVSWKKSHLRTVEHCFHMCDRMVIYFFIAASYAPWLNLRELGPLASHMRWFIWLMAAGGTIYVFLYHEKYKVVELFFYLTMGFSPALVVTSMNNTDGLQELACGGLIYCLGVVFFKSDGIIPFAHAIWHLFVATAAAVHYYAIWKYLYRSPTDFMRHL

SEQ ID NO: 174041 - DNA, 717 bp, Artificial Sequence
  derived and/or modified sequence
atgagattcaagaacagattccagagattcatgaaccacagagcccccgccaacggcagatacaagcccacctgctacgagcacgccgccaactgctacacccacgccttcctgatcgtgcccgccatcgtgggcagcgccctgctgcacagactgagcgacgactgctgggagaagatcaccgcctggatctacggcatgggcctgtgcgccctgttcatcgtgagcaccgtgttccacatcgtgagctggaagaagagccacctgagaaccgtggagcactgcttccacatgtgcgacagaatggtgatctacttcttcatcgccgccagctacgccccctggctgaacctgagagagctgggccccctggccagccacatgagatggttcatctggctgatggccgccggcggcaccatctacgtgttcctgtaccacgagaagtacaaggtggtggagctgttcttctacctgaccatgggcttcagccccgccctggtggtgaccagcatgaacaacaccgacggcctgcaggagctggcctgcggcggcctgatctactgcctgggcgtggtgttcttcaagagcgacggcatcatccccttcgcccacgccatctggcacctgttcgtggccaccgccgccgccgtgcactactacgccatctggaagtacctgtacagaagccccaccgacttcatgagacacctgtag

SEQ ID NO: 174042 - DNA, 717 bp, Artificial Sequence
  derived and/or modified sequence
atgcgctttaaaaaccgatttcagaggttcatgaatcacagggcaccagcaaacggccgctataagccaacttgctacgagcacgccgctaattgttacacacatgcatttcttatcgtccctgccatagttgggtccgccctgctgcaccggctctctgacgattgttgggaaaaaatcactgcctggatttacggaatgggactgtgcgccctttttatcgtctctaccgtgttccatatagtgagctggaagaagtcccatttacgcacagtggaacattgtttccacatgtgtgatcgcatggtaatatacttcttcatcgccgcttcatatgccccttggctgaatctgcgcgaattgggccctctcgcttcacacatgagatggtttatatggctgatggcagccggtggcacgatctacgtcttcttgtaccacgagaaatataaggtggtggaactgttcttttatctcacaatgggattctccccggccctggtggtgacctccatgaataatacagatgggctgcaggaactggcctgcggaggcttaatctactgcctcggtgtggttttctttaaaagtgatggcattattcccttcgcccatgccatctggcaccttttcgtggccacggcagctgcggtgcactactacgcgatttggaagtacctgtacaggagtcccacagacttcatgcggcacttatag

SEQ ID NO: 174043 - DNA, 717 bp, Artificial Sequence
  derived and/or modified sequence
atgaggttcaagaaccgcttccagcgcttcatgaaccaccgggccccagccaacggccgctacaagcccacctgctatgagcacgccgccaactgctacacccacgccttcctgattgtgcctgccatcgtgggcagcgccctgctgcaccggctgagtgatgactgctgggagaagatcacagcctggatctacggcatgggcctgtgtgccctcttcatcgtgtccacagtgttccacatcgtgtcctggaagaagagccacctgaggacagtggagcactgcttccacatgtgtgacaggatggtgatctacttcttcatcgccgccagctatgccccctggctgaacctgcgggagctgggccccctggccagccacatgcgctggttcatctggctgatggctgctgggggcaccatctacgtgttcctgtaccacgagaagtacaaggtggtggagctgttcttctacctgaccatgggcttctccccagccctggtggtgacctccatgaacaacacagatggcctgcaggagctggcctgtggcggcctcatctactgcctgggcgtggtgttcttcaagagtgatggcatcatcccctttgcccacgccatctggcacctgtttgtggccacagctgctgctgtgcactactatgccatctggaagtacctgtaccgcagccccacagacttcatgaggcacctgtag

SEQ ID NO: 174044 - DNA, 717 bp, Artificial Sequence
  derived and/or modified sequence
atgcggttcaagaaccggttccagcggttcatgaaccaccgggcccccgcaaatggtcgatacaaaccaacttgctacgagcacgctgctaactgctatactcatgcctttctcatagtgcccgccattgtgggtagtgcattgttgcaccgcctaagcgatgattgttgggaaaagatcactgcctggatctacgggatgggactctgcgccttgtttatcgtttccacagtgtttcatattgtaagttggaaaaaaagccacctgcgtaccgtggagcattgcttccatatgtgtgatcgcatggtgatctatttttttatagcagccagttatgccccatggctcaacctgagggaactcggacccctggcatctcacatgagatggttcatctggttgatggctgcgggcggtacaatatacgttttcttgtatcacgaaaagtacaaggttgttgagctgttcttttaccttactatgggattctctcccgctctcgtggttacatcaatgaacaatacagatgggctccaagagctggcatgtggggggctcatctattgtttgggcgtggtctttttcaagagcgacggcattattccttttgcgcacgccatttggcacctgttcgttgcaaccgcagcggccgtgcattattacgccatttggaagtacttgtaccgatcacctaccgatttcatgcggcatttgtag

SEQ ID NO: 174045 - DNA, 2723 bp, Artificial Sequence
  derived and/or modified sequence
gggcggggcgcaggagccccggggcggaggagccggggaggcgggaggcgggaggcgggaggtgttggggccgttgaagcggcctccctcccgcccccagccgcccggtctggccccagccctgtcccgacccccggcctggcccactccgaccctacccggccgaagggttccgctggacacgcaggcggcctccggagcagcccaagcccatgagggccgcgcgcccggccgccggtgctgacgagacggagctcctggcccccgaggaggagcagaggatcaatgcggttcaagaatcgattccagcggttcatgaaccatcgagctccagccaatggccgctacaagccaacttgctatgaacatgctgctaactgttacacacacgcattcctcattgttccggccatcgtgggcagtgccctcctccatcggctgtctgatgactgctgggaaaagataacagcatggatttatggaatgggactctgtgccctcttcatcgtttctacagtatttcacattgtatcatggaaaaagagccacttaaggacagtggagcattgttttcacatgtgtgatagaatggttatctatttcttcattgctgcttcttatgctccatggttaaatcttcgtgaacttggacccctggcatctcatatgcgttggtttatctggctcatggcagctggaggaaccatttatgtatttctctaccatgaaaaatataaggtggttgaactctttttctatctcacaatgggattctctccagccttggtggtgacatcaatgaacaacaccgatggacttcaggaacttgcctgtgggggcttaatttattgcttgggagttgtgttcttcaagagtgatggcatcattccatttgcccacgccatctggcacctgtttgtggccacggcagctgcagtgcattactacgccatttggaaatacctttaccgaagtcctacggactttatgcggcatttatgaccaatctgtactaattctccaaaccagtattatttcaattatggcacttgggagtggggtgagagctaaacattgcacagggaaagaaaaaaaataactgcactgactttatatcttttgaatataattactgtgaaagtataaaggctgtgttctggaattttctgcctcacagcaaataaataaggtagtgaattaattattcattccattccactatcatgaaggactctgaatagacttggccaactgatgtttacaaaccagacttttatattttaattttacagattttactacatgatttttctaaattactatgtcaggttgtaaaagtcagtgcaataacaaaccttcctttttaagaagaaaattgtttctattactttcccattcactaggtaaagaatcatggacagaacttacactactttttaccatgtttcatcttggcataacatggttcttttttaaatagaaactttagttttttgtaaatttttaaaaaaatatttcattgatatgcatctctgcaggtcctcattcatgttgtaaatttttgcagcaagcagtcaacattccacaaacgaacaaacattatacctcttctgatagttttattaagcatggagaaattgccaatttttaaaaactgcagttttccaaacttttctgccaacctcttactctgaattcagtgctgctttgggacatatacttgacctagcttggtttaccagtgatggaaaagtattttgatatcattaactttttcaaaagatccaactttttctctatgcctttgccacattctcttcagggtctctttccacagtggataaatgttttttctgtattatgacagtattgttgtgatggccatctgctggaaactcctgaagagcattatgtattacagtgagcagttgtattgcctgtttggtgcccaatggttaagtcattgtcacttagctttatattgtcagtttgatatttattttaaattgtggaactagatgcataaattcacatttctgcctttcctttgcatcttctcatatattgtgtttttttttttttttcctagaaaaaatatttaaagcattgtttgacaggtagaaactcatgtatctgtagtccatgagttatatcctggctcagtggagtgatatttatgtattatttttacttttctctcagtgtcttatattaagattaacatgttgttaatagttgctttgttgattaatctctcttgttggtgttttaataaatgaaataggcttgcctttagatcgggtgctgatattgcctgtttcctagtaatgggctgatcaaatgatcagtggaattcttggtttgatgataaccttattaattgaaattttttactgatgtggctttaaaagaggtttattttgtatatgtttagaactctctgattttgatgaattatatgggaatgagaaacagaagaagtggtatttgctggcgagttaaataggcaaggtacccagtgataacaccaaccaaaccactcctatctgcatgattctgaacatctggatgcctgttgttttactgtgtatattttatttttaatatattaactttgtggattcatttaaggtctactcaaaagtaacactgtcaaaaccactaatatgtatgtaaaaattgtgctgtatactacaataaagttgttacttggatttgttcca

SEQ ID NO: 174046 - DNA, 717 bp, Artificial Sequence
  derived and/or modified sequence
atgcggtttaagaacaggtttcagagattcatgaatcatagagctccggctaacggtcgatataaacctacctgctacgaacatgcagcgaactgctacacccacgcctttcttatagtgcccgcaatcgttggatccgccctgctgcatagactcagtgatgactgctgggagaaaatcacagcctggatctacggtatgggtttgtgcgcactattcatagtgtctaccgtttttcatattgtgtcctggaaaaaatcccatctgaggacagtggaacattgctttcacatgtgcgatcggatggtaatttactttttcatagccgctagttatgccccatggcttaacctcagggaattaggcccattggcatctcatatgcggtggttcatctggctcatggctgccggtgggaccatttacgttttcctgtaccacgagaaatacaaggtggtcgagctgtttttctacctgacaatgggcttttccccggctctggtggttacatctatgaataacaccgatggacttcaggagcttgcctgcggaggcctgatttattgtctgggagtcgtgttctttaagagcgatggcattatccccttcgcacacgccatatggcacctattcgttgcaactgcggctgccgtccattactacgccatctggaagtatctgtatagatcgcccacagacttcatgcggcatttgtag

SEQ ID NO: 174047 - protein, 235 aa, Artificial Sequence
  derived and/or modified sequence
MLSATRRACQLLLLHSLFPVPRMGNSASNIVSPQEALPGRKEQTPVAAKHHVNGNRTVEPFPEGTQMAVFGMGCFWGAERKFWVLKGVYSTQVGFAGGYTSNPTYKEVCSEKTGHAEVVRVVYQPEHMSFEELLKVFWENHDPTQGMRQGNDHGTQYRSAIYPTSAKQMEAALSSKENYQKVLSEHGFGPITTDIREGQTFYYAEDYHQQYLSKNPNGYCGLGGTGVSCPVGIKK

SEQ ID NO: 174048 - protein, 169 aa, Artificial Sequence
  derived and/or modified sequence
MAVFGMGCFWGAERKFWVLKGVYSTQVGFAGGYTSNPTYKEVCSEKTGHAEVVRVVYQPEHMSFEELLKVFWENHDPTQGMRQGNDHGTQYRSAIYPTSAKQMEAALSSKENYQKVLSEHGFGPITTDIREGQTFYYAEDYHQQYLSKNPNGYCGLGGTGVSCPVGIKK

SEQ ID NO: 174049 - DNA, 708 bp, Artificial Sequence
  derived and/or modified sequence
atgttgtcagcgactaggcgagcttgtcagctgctgcttctacactcacttttccctgtgccccggatgggcaatagcgcaagtaatatcgtgagcccccaggaggccttgccaggtagaaaagagcagacacccgtggccgccaaacaccacgtgaatgggaaccgaacagttgaaccattcccggaagggactcagatggcggtcttcggcatggggtgcttttggggcgcggaacggaagttctgggtcctcaagggggtttatagcactcaggtgggatttgctggaggctatacaagcaaccctacttataaggaggtgtgtagcgagaaaacggggcatgccgaagtcgtgcgggtagtgtaccaaccggaacatatgtcttttgaggagctcctgaaagtgttctgggagaaccatgatccaactcaggggatgaggcaaggaaatgaccatggcacacagtatagatccgccatctatcccacctccgccaaacagatggaagctgccttgagttctaaagagaactatcagaaggtactgtccgagcatggattcggccccatcaccacggacattagagaggggcagactttctactatgctgaagactatcatcagcagtacctgagtaaaaatccaaatggttattgtggcttaggtggcaccggagtgtcatgtcccgttgggattaaaaagtag

SEQ ID NO: 174050 - DNA, 708 bp, Artificial Sequence
  derived and/or modified sequence
atgctgagcgccacccggcgggcctgccagctgctgctgctgcacagcctcttccctgtgcccaggatgggcaacagcgccagcaacatcgtgagcccccaggaggccctgcccggcaggaaggagcagacccctgtggccgccaagcaccacgtgaatggaaacagaacagtggagcccttccctgagggcacccagatggctgtgtttggcatgggctgcttctggggcgctgagaggaagttctgggtgctgaagggcgtgtacagcacccaggtgggctttgctgggggctacaccagcaaccccacctacaaggaggtgtgcagcgagaagacaggccacgccgaggtggtgcgggtggtgtaccagcctgagcacatgagctttgaggagctgctgaaggtgttctgggagaaccacgaccccacccagggcatgaggcagggcaatgaccacggcacccagtacagaagtgccatctaccccaccagcgccaagcagatggaggccgccctgagcagcaaagaaaactaccagaaggtgctgtctgagcacggcttcggccccatcaccacagacatccgggagggccagaccttctactatgcagaggactaccaccagcagtacctgagcaagaaccccaacggctactgcggcctgggcggcactggagtgtcctgccctgtgggcatcaagaagtag

SEQ ID NO: 174051 - DNA, 708 bp, Artificial Sequence
  derived and/or modified sequence
atgctgagcgccacccggcgggcctgccagctgctgctgctgcactctctgttccccgtcccacggatgggaaatagcgcttccaacattgtgtcaccacaggaggcattacctgggcgcaaggagcaaacccctgtggccgcgaagcatcacgtgaacggtaatagaaccgtggagccattccccgaggggacccagatggcggttttcggaatgggatgcttttggggcgctgagagaaaattctgggttttgaagggcgtatacagtactcaggtcggctttgcggggggctatacttctaatccaacctacaaagaagtctgttccgagaagaccggacatgccgaagtggtccgggtcgtttaccagccagagcacatgagctttgaggagctgctgaaggtgttctgggagaatcatgatccaactcagggcatgcggcagggcaatgaccacgggacgcaataccgcagcgcaatctacccaaccagtgctaagcagatggaagcagcgctgtcgtccaaggagaactaccagaaggtgctgtccgaacacggctttggcccaattacaactgacatcagggaaggccagaccttttattatgctgaggactatcatcagcagtacctgagcaaaaacccaaacggctactgcggcttaggggggacaggcgtttcttgtcctgtggggataaaaaaatag

SEQ ID NO: 174052 - DNA, 708 bp, Artificial Sequence
  derived and/or modified sequence
atgctgagcgcaactagaagggcctgtcagctgctcctcctccactcattattccctgtgcccaggatggggaactctgctagtaatatcgtatccccacaggaggcgctacccggacggaaagaacagacaccggtggcagctaaacaccatgttaacggtaatcgcaccgtcgagcctttccctgaaggcacacagatggccgtctttggaatgggttgcttctggggagccgaaagaaagttttgggtcctgaaaggggtatactccacccaagtcggcttcgcaggtggatacacatcaaaccccacatataaggaagtgtgttcagaaaaaaccgggcacgccgaggttgtgcgcgtggtatatcagcccgagcatatgagttttgaagagcttcttaaggtgttttgggagaaccatgatccgacacaggggatgcgccaaggcaacgaccacggaactcagtatcgtagcgccatctacccgactagcgcgaaacaaatggaagccgctctttcctctaaggagaactatcagaaggttctatcagagcatggcttcggcccaattacaaccgatatccgcgaaggtcagaccttttactacgcagaagactaccaccagcagtacctctccaagaaccccaacggttactgcggactgggaggtactggcgtatcgtgcccagtaggaatcaaaaaatag

SEQ ID NO: 174053 - DNA, 1536 bp, Artificial Sequence
  derived and/or modified sequence
ggaactcgccgggccacaccccctgtccagggaaggaacacgcccccggtgacagccggtacggccccgggtttgggcaacctcgattacgggcggcctccagccccgccagcagcgccccgcgcccgcccgcccgcgcccctgccgccccccggttccggccgcggaccccactctctgccgttccggctgcggctccgctgccggtagcgccgtcccccgggaccacccttcggctggcgccctcccatgctctcggccacccggagggcttgccagctcctcctcctccacagcctctttcccgtcccgaggatgggcaactcggcctcgaacatcgtcagcccccaggaggccttgccgggccggaaggaacagacccctgtagcggccaaacatcatgtcaatggcaacagaacagtcgaacctttcccagagggaacacagatggctgtatttggaatgggatgtttctggggagctgaaaggaaattctgggtcttgaaaggagtgtattcaactcaagttggttttgcaggaggctatacttcaaatcctacttataaagaagtctgctcagaaaaaactggccatgcagaagtcgtccgagtggtgtaccagccagaacacatgagttttgaggaactgctcaaggtcttctgggagaatcacgacccgacccaaggtatgcgccaggggaacgaccatggcactcagtaccgctcggccatctacccgacctctgccaagcaaatggaggcagccctgagctccaaagagaactaccaaaaggttctttcagagcacggcttcggccccatcactaccgacatccgggagggacagactttctactatgcggaagactaccaccagcagtacctgagcaagaaccccaatggctactgcggccttgggggcaccggcgtgtcctgcccagtgggtattaaaaaataatttctccccacatggtgggcctttgaggttccagtaaaaatgctttcaacaaattgggcaatgcttgtgtgattcacaatcgtggcatttaaagtgcacaaagtacaaaggaatttatacagattgggtttaccgaagtataatctataggaggcgcgatggcaagttgataaaatgtgacttatctcctaataagttatggtgggagtggagctgtgcagtttcctgtgtcttctggggtctgagtgaagatagcagggatgctgtgttcacccttcttggtagaagctaaggtgtgagctgggaggttgctggacaggatgggggaccccagaagtcctttatctgtgctctctgcccgccagtgccttacaatttgcaaacgtgtatagcctcagtgactcattcgctgaaatccttcgctttaccaaatctagacatacataaggggctttctctcccttttcagccctctctgtgcagagaaaagatgtgagtccgcttgatgaattctaatgctttgcttagagctatgagaaatgtttgttttaataaaaacctacagtccaataatgccaa

SEQ ID NO: 174054 - DNA, 708 bp, Artificial Sequence
  derived and/or modified sequence
atgctgagcgccaccagaagagcctgccagctgctgctgctgcacagcctgttccccgtgcccagaatgggcaacagcgccagcaacatcgtgagcccccaggaggccctgcccggcagaaaggagcagacccccgtggccgccaagcaccacgtgaacggcaacagaaccgtggagcccttccccgagggcacccagatggccgtgttcggcatgggctgcttctggggcgccgagagaaagttctgggtgctgaagggcgtgtacagcacccaggtgggcttcgccggcggctacaccagcaaccccacctacaaggaggtgtgcagcgagaagaccggccacgccgaggtggtgagagtggtgtaccagcccgagcacatgagcttcgaggagctgctgaaggtgttctgggagaaccacgaccccacccagggcatgagacagggcaacgaccacggcacccagtacagaagcgccatctaccccaccagcgccaagcagatggaggccgccctgagcagcaaggagaactaccagaaggtgctgagcgagcacggcttcggccccatcaccaccgacatcagagagggccagaccttctactacgccgaggactaccaccagcagtacctgagcaagaaccccaacggctactgcggcctgggcggcaccggcgtgagctgccccgtgggcatcaagaagtag

SEQ ID NO: 174055 - protein, 2058 aa, Artificial Sequence
  derived and/or modified sequence
MDNFFTEGTRVWLRENGQHFPSTVNSCAEGIVVFRTDYGQVFTYKQSTITHQKVTAMHPTNEEGVDDMASLTELHGGSIMYNLFQRYKRNQIYTYIGSILASVNPYQPIAGLYEPATMEQYSRRHLGELPPHIFAIANECYRCLWKRHDNQCILISGESGAGKTESTKLILKFLSVISQQSLELSLKEKTSCVERAILESSPIMEAFGNAKTVYNNNSSRFGKFVQLNICQKGNIQGGRIVDYLLEKNRVVRQNPGERNYHIFYALLAGLEHEEREEFYLSTPENYHYLNQSGCVEDKTISDQESFREVITAMDVMQFSKEEVREVSRLLAGILHLGNIEFITAGGAQVSFKTALGRSAELLGLDPTQLTDALTQRSMFLRGEEILTPLNVQQAVDSRDSLAMALYACCFEWVIKKINSRIKGNEDFKSIGILDIFGFENFEVNHFEQFNINYANEKLQEYFNKHIFSLEQLEYSREGLVWEDIDWIDNGECLDLIEKKLGLLALINEESHFPQATDSTLLEKLHSQHANNHFYVKPRVAVNNFGVKHYAGEVQYDVRGILEKNRDTFRDDLLNLLRESRFDFIYDLFEHVSSRNNQDTLKCGSKHRRPTVSSQFKDSLHSLMATLSSSNPFFVRCIKPNMQKMPDQFDQAVVLNQLRYSGMLETVRIRKAGYAVRRPFQDFYKRYKVLMRNLALPEDVRGKCTSLLQLYDASNSEWQLGKTKVFLRESLEQKLEKRREEEVSHAAMVIRAHVLGFLARKQYRKVLYCVVIIQKNYRAFLLRRRFLHLKKAAIVFQKQLRGQIARRVYRQLLAEKREQEEKKKQEEEEKKKREEEERERERERREAELRAQQEEETRKQQELEALQKSQKEAELTRELEKQKENKQVEEILRLEKEIEDLQRMKEQQELSLTEASLQKLQERRDQELRRLEEEACRAAQEFLESLNFDEIDECVRNIERSLSVGSEFSSELAESACEEKPNFNFSQPYPEEEVDEGFEADDDAFKDSPNPSEHGHSDQRTSGIRTSDDSSEEDPYMNDTVVPTSPSADSTVLLAPSVQDSGSLHNSSSGESTYCMPQNAGDLPSPDGDYDYDQDDYEDGAITSGSSVTFSNSYGSQWSPDYRCSVGTYNSSGAYRFSSEGAQSSFEDSEEDFDSRFDTDDELSYRRDSVYSCVTLPYFHSFLYMKGGLMNSWKRRWCVLKDETFLWFRSKQEALKQGWLHKKGGGSSTLSRRNWKKRWFVLRQSKLMYFENDSEEKLKGTVEVRTAKEIIDNTTKENGIDIIMADRTFHLIAESPEDASQWFSVLSQVHASTDQEIQEMHDEQANPQNAVGTLDVGLIDSVCASDSPDRPNSFVIITANRVLHCNADTPEEMHHWITLLQRSKGDTRVEGQEFIVRGWLHKEVKNSPKMSSLKLKKRWFVLTHNSLDYYKSSEKNALKLGTLVLNSLCSVVPPDEKIFKETGYWNVTVYGRKHCYRLYTKLLNEATRWSSAIQNVTDTKAPIDTPTQQLIQDIKENCLNSDVVEQIYKRNPILRYTHHPLHSPLLPLPYGDINLNLLKDKGYTTLQDEAIKIFNSLQQLESMSDPIPIIQGILQTGHDLRPLRDELYCQLIKQTNKVPHPGSVGNLYSWQILTCLSCTFLPSRGILKYLKFHLKRIREQFPGSEMEKYALFTYESLKKTKCREFVPSRDEIEALIHRQEMTSTVYCHGGGSCKITINSHTTAGEVVEKLIRGLAMEDSRNMFALFEYNGHVDKAIESRTVVADVLAKFEKLAATSEVGDLPWKFYFKLYCFLDTDNVPKDSVEFAFMFEQAHEAVIHGHHPAPEENLQVLAALRLQYLQGDYTLHAAIPPLEEVYSLQRLKARISQSTKTFTPCERLEKRRTSFLEGTLRRSFRTGSVVRQKVEEEQMLDMWIKEEVSSARASIIDKWRKFQGMNQEQAMAKYMALIKEWPGYGSTLFDVECKEGGFPQELWLGVSADAVSVYKRGEGRPLEVFQYEHILSFGAPLANTYKIVVDERELLFETSEVVDVAKLMKAYISMIVKKRYSTTRSASSQGSSR

SEQ ID NO: 174056 - DNA, 4248 bp, Artificial Sequence
  derived and/or modified sequence
atgcctgatcagttcgaccaagctgtggtcctgaatcaattgagatacagcggaatgctcgagacagtgaggattcggaaggcaggatacgcagtgagacggccatttcaggatttctataaaagatataaggtcctgatgagaaacttggccctgcctgaggacgtccgcggtaaatgcacttccctactccagctgtatgacgcttcaaattcagagtggcaactcggaaaaactaaagtgttcctgcgcgaaagtttagagcagaaactagaaaagcggcgagaagaggaagtctcacacgctgcaatggtgattcgggctcacgttcttggcttcttggcacggaagcaatatcgaaaggtcctgtactgcgtggtgatcattcagaaaaactacagggcatttctcctgagaaggaggttcttacacctgaagaaggcagcgatagtgttccagaagcagctgcggggacagatcgcgcgccgagtctatagacaacttctggccgagaaaagggagcaagaagaaaagaagaagcaagaagaggaagagaagaaaaagcgggaggaagaagaaagagaaagggagcgcgaacgtcgcgaggccgaattgagggcccagcaggaagaggagacacgcaagcagcaggagttggaagcactccaaaaaagtcagaaagaggccgagctcacacgtgaacttgaaaaacaaaaggagaacaaacaggttgaggagatcctgcgcctggaaaaagagattgaggatctccagagaatgaaggagcagcaggagctttccttgactgaggcgtcgctgcagaagttacaagagaggagggaccaggaactcaggagattagaagaggaggcatgtcgggccgcccaggagtttttagagtcactcaatttcgacgagattgacgagtgtgtgcgaaatatcgagagaagtctatccgtgggcagtgaatttagtagtgagcttgctgagagcgcgtgcgaagagaaacccaatttcaatttcagccagccctaccccgaggaagaggttgatgagggtttcgaagcagatgacgatgcatttaaggattctccgaatccaagtgaacacggacattccgaccagaggactagcggcattagaacatccgacgatagctctgaggaggacccctatatgaatgatacagtcgtgcctacctccccgtcggctgactcaacagtgttattggcaccttctgtacaggatagcggaagccttcacaactctagcagcggggaatcaacctactgtatgcctcagaacgctggcgatctgcccagccccgacggtgattatgattacgatcaggacgactacgaggacggagctataacttcagggagctcagtcacattttcaaactcctatggatcccagtggtccccagactatcggtgtagcgtagggacctacaactcctccggtgcctaccgtttcagttctgagggcgcccagagctcattcgaggattctgaggaagatttcgattcaaggttcgataccgatgacgaattgtcttataggcgggattcagtatactcatgtgtgacacttccttattttcactcatttttgtatatgaaggggggtctgatgaattcctggaagcgcagatggtgcgtgctgaaggacgagaccttcctatggtttcggagcaagcaggaggcgctgaagcagggctggctgcacaagaagggcggcggatcttcaaccttaagtcgaaggaactggaaaaagcgatggtttgtcctccggcagtctaagctgatgtatttcgagaacgatagtgaggagaagcttaagggtactgtcgaagttaggacagccaaagagatcatcgataatactaccaaggagaatggtatcgatatcatcatggccgacaggacgttccatttgatcgcagaaagtcctgaggacgccagtcaatggttcagcgtcttaagccaggttcacgcctctaccgaccaagagatccaggaaatgcacgatgaacaggctaatccgcagaatgctgtggggactctggacgtgggattaatagattcagtgtgcgcttccgacagtcccgacaggcccaactcttttgtgattattaccgcaaatagggttttgcattgcaatgccgacactccggaggaaatgcaccattggatcactctgttgcaaagaagcaagggggacactcgggtcgaaggccaggagttcatcgtgcgggggtggttacacaaggaagtgaaaaacagccctaaaatgagctcactgaaattaaaaaagcgctggttcgtcttaacacacaatagtctggactactacaaaagcagcgaaaaaaatgccttaaaactggggacgctggtcctcaatagcctctgcagtgttgttcccccagacgagaaaatctttaaagagacagggtattggaacgtgaccgtgtatggaagaaaacactgttatagactgtacacaaagctcctcaatgaagcgacccggtggagtagcgctatacaaaacgtgactgatacaaaggccccaatcgataccccaacccagcaactgatacaagatatcaaagaaaattgcctgaatagcgacgttgtcgagcagatttacaaaaggaatcctatcctccgttacacgcatcatcctttgcactctccgctcctcccgctgccgtatggtgacatcaacctcaacctgctgaaagacaaaggttacacaaccctacaagacgaggcaatcaagattttcaacagcctgcagcaactcgaatccatgtctgatcctatcccaatcattcaggggatacttcagactggccacgacctacgccctttacgggatgaattgtactgtcagttgattaagcaaactaacaaggtgccccatcccgggagtgtgggaaacttgtactcttggcagatcctcacatgcctgtcctgtacttttctgccttcccgaggaattctgaaatacctgaagttccacctgaaacgtatccgggaacagtttcctggatcagaaatggagaaatacgcactgtttacctacgaatccctgaagaagacaaaatgtcgggagtttgtgccgtcccgagacgagattgaggccctgatccatcggcaggagatgacctctaccgtgtattgccacggggggggttcatgtaagatcactattaattcccatacaaccgccggtgaggttgtcgagaagctgattcgggggctggcaatggaagactcccggaacatgttcgccctgttcgagtataatggacatgtggataaggctatcgagtctagaacagtggtggccgatgtgctggctaaattcgaaaaattagcagcgacaagtgaagtgggggatcttccgtggaagttttactttaaactttattgcttcctggatacagacaatgtccccaaggatagcgtcgagtttgcctttatgtttgagcaggcccatgaggctgttattcatggacaccaccctgcaccagaggagaatctccaggtcttggctgccctgcggcttcagtatcttcagggggattacaccttacacgctgcgattccaccgcttgaggaggtgtacagcctgcagaggctaaaagccaggattagccagtccacgaagacatttactccatgcgagcgtctcgagaagaggcgtacgagcttcctggagggcacattgagacgctcttttagaacaggttcagtggtgcgacaaaaagtcgaggaggaacaaatgctagacatgtggataaaagaggaggtgtcaagtgctagagcctctattatcgataagtggagaaagttccaggggatgaatcaagagcaggccatggcaaagtatatggccctaattaaagagtggcctggctatgggagcactctgtttgatgttgaatgcaaagaaggcggtttcccccaagagctgtggctgggtgtgtctgcagacgccgtctccgtctacaagcgcggagaggggaggccacttgaggtttttcagtacgagcacatcttgtctttcggagcccctcttgctaatacatacaagatcgtggtggatgaaagagaactgctgttcgagacttccgaagttgtcgacgtggcgaaactgatgaaagcctacatctccatgatcgtgaagaaaaggtacagtacgacaaggtcggccagtagccaaggaagttcccgatag

SEQ ID NO: 174057 - DNA, 4248 bp, Artificial Sequence
  derived and/or modified sequence
atgccggaccagttcgaccaggcagttgtgctgaatcaactcaggtatagcggcatgctggaaacagtgaggatccgaaaggcagggtacgccgtgcgtcggcctttccaagatttctacaaacgctataaggtactgatgcgcaatttggccctaccagaagatgttcgaggtaagtgcaccagcctgctccaactttatgacgcctctaatagtgagtggcagctgggcaagactaaagtgtttttacgtgaatctctggaacagaagttggagaagcggagggaggaggaagtgtcacatgctgccatggtgattagggcacacgtcctcggtttcctagcccgtaagcagtatagaaaggtcctctattgtgtggtaatcatccagaagaattaccgtgctttcctgttgcgtcgtcggtttctccatctgaagaaggcagccattgtatttcagaaacaattgcgcggccaaatagcgcgccgtgtgtatcgccagctactggcggagaagcgggagcaagaggaaaagaagaaacaggaggaagaggagaaaaagaagcgcgaagaagaggaacgcgaacgagaaagagaaaggagggaagctgaactgagagcccagcaggaagaggagacccgtaagcagcaggagctcgaggcactccagaaaagccagaaggaggcggaactcacccgagagttggagaaacaaaaggagaataaacaggtcgaagaaattctgcgcctggaaaaggagatcgaggacctacagaggatgaaggagcagcaggaactgtctctcactgaggccagcctccagaaattacaagaaaggagggatcaggagctacgccggttggaggaagaggcctgcagggctgcacaggagttcttggaatcccttaatttcgacgaaatagatgagtgcgtgagaaacatagagaggtctctgagtgtgggatccgaattctcaagcgaacttgcagagtctgcctgtgaggagaaacctaactttaacttcagccagccctaccccgaagaggaggtagatgagggatttgaggccgacgatgatgcttttaaggatagcccgaatcctagcgagcacgggcacagcgaccaacggactagtggcatcagaacatcggatgatagttctgaggaggatccctatatgaatgatactgtggtgcctacttcaccctccgccgactcgacagtactgttggccccgagcgtccaggacagcgggtccctccataactcctcgtctggcgaatctacctattgcatgcctcaaaatgctggcgatcttccgtcccctgacggagactatgactacgaccaggacgactacgaagacggggccatcacatcgggttcgtcagtgacattttccaattcctacggatctcagtggtcaccagactatcgttgctccgtgggtacctacaactctagtggagcctaccgtttctcaagcgagggtgcccagtcaagcttcgaagattccgaagaggacttcgactccagattcgacacagacgatgaactgtcatatagacgagacagtgtgtacagctgcgtaactctaccttacttccacagctttctgtacatgaaggggggtctaatgaacagctggaaacgccgctggtgtgtgctcaaagacgaaacattcctttggttcaggtcaaagcaggaggcgctgaagcagggctggttgcataagaagggcggtggcagctcaaccctgtcacgccgtaattggaaaaagcgatggttcgtgctcagacaatctaaacttatgtatttcgagaatgacagtgaagagaagctgaaagggaccgtggaagtgaggacagctaaggaaattattgataacacaactaaggagaatggcatagacatcataatggccgatcgcacctttcacctcattgccgaatccccggaggacgccagccagtggtttagtgtgctgagccaggtgcatgctagcactgatcaggagatacaggagatgcatgatgagcaggcaaatccacagaatgctgtgggcactctggacgttggactgatagattccgtctgcgcgagcgattcgccggatcgtcccaactcctttgtcataataaccgcaaatcgtgtgctgcattgtaatgcagacacacctgaggaaatgcaccactggatcactttgctgcagagaagcaagggggatacaagggttgagggccaggagttcatcgtcaggggatggctgcacaaggaggtaaagaattcaccaaagatgtctagtctcaaactgaagaagagatggttcgttctcactcacaacagcctggattattataaatcatcagagaagaacgccctgaagctgggcactttggtgctgaatagcctgtgctccgttgtgcctcccgacgagaaaatcttcaaagagacagggtattggaatgtgacggtttacgggcgcaagcattgctaccgcctgtacacaaagctcctaaatgaggcgactcggtggtccagcgcgatccagaacgtgaccgacacgaaggcaccaatcgacaccccaacccagcaattgattcaagatataaaagagaactgccttaattcagatgtggtagagcagatttacaagcggaatccaatattgagatacacacatcacccgctgcattccccacttctgccactgccctacggagatatcaatctgaatctcctgaaagataaaggctacaccaccctgcaggacgaagccattaagatatttaacagcctgcagcagctggagtcaatgagtgatccaatacctataatccaggggatcctgcaaactggacacgacctgcgtcccctgcgagacgaactatattgtcagctgatcaaacaaacgaacaaggtaccgcatccaggatcagtcggcaacctctatagctggcaaattttgacctgcctctcctgcacctttctgccctcccggggcatactgaagtatctcaagtttcacttgaaaaggatccgcgagcaattccctggaagcgaaatggagaaatatgctctttttacctacgagagcctgaagaagacgaagtgcagggagtttgtgccgagtagggacgaaattgaggccctgatacaccggcaggagatgacatcaacagtctactgtcacggagggggctcttgcaagatcactataaattcccatacaactgctggcgaagtagtcgaaaaactgatcaggggccttgccatggaggatagccgtaacatgtttgctctattcgagtacaatggccacgttgataaagcaatagaatctagaaccgtggtggcagacgtccttgccaagtttgagaagttagcggccacctccgaggtgggtgatctgccgtggaagttctatttcaagctgtactgtttcctggataccgacaatgtcccaaaggactcagtggagttcgctttcatgttcgaacaggcacacgaagcagtcattcatggtcatcatcccgccccggaggagaatctgcaggtgttagcagccctcaggttacagtacctccagggcgattacactctgcatgctgcaatcccacccctcgaggaggtttactcactgcagcggcttaaagcccgaatttcacagtcaaccaagacgttcacgccatgtgagaggctcgagaagagacggacatcatttctcgaaggcaccctgcgacgctcattcaggaccggctcagtcgttcggcaaaaggtggaggaggaacagatgctggatatgtggattaaagaagaagtgtcatctgctagggcttctattatagataagtggcggaagtttcaaggaatgaatcaggaacaggccatggctaaatatatggccctgattaaggaatggccaggttatggctccacgctctttgacgttgaatgtaaagagggtggatttccccaggaactgtggttaggcgtcagtgcagatgcagttagtgtatacaagcggggcgaggggaggcctctggaggtctttcagtacgaacacatcctgtcattcggtgccccgctcgccaatacgtataaaatcgttgtcgatgagcgggagctgttgttcgagacaagcgaggtggtcgacgtggcaaagctaatgaaggcctatatctcaatgatcgtaaagaagcgttatagtacaacgcgcagcgcatcaagccaggggtcctcaagatag

SEQ ID NO: 174058 - DNA, 4194 bp, Artificial Sequence
  derived and/or modified sequence
atgctcgaaacggtgcggatccggaaagccggttatgcggtgcggcgacccttccaagatttctacaagcgttacaaggtgctaatgagaaacttagccttacccgaggatgtgagaggcaaatgtaccagtcttctgcagctctacgatgcaagcaactcggaatggcagcttgggaaaacaaaagtttttctaagagaatcattggagcaaaaactggagaaacgacgcgaagaggaggtgtctcacgcagccatggtcatccgagctcatgtgctgggttttctggccagaaagcagtacaggaaggtgctgtactgcgtagtcatcatacaaaagaactaccgagcttttttgctgcggagaagattcctgcacttgaagaaagctgccatcgtctttcaaaagcagttgcgcggccagatcgccagacgggtctacaggcaactgttggcagagaagagggaacaggaggaaaaaaagaagcaggaagaggaggaaaagaaaaagcgtgaagaggaagagcgggaacgtgagcgggaacgacgggaggctgagctgcgggcacaacaggaggaggagacaaggaaacagcaggagttggaggctctgcagaagtctcagaaggaggcggaacttacccgggagctcgagaaacagaaagagaacaaacaggttgaagaaatcctgcgactggagaaggagattgaagacctgcaacggatgaaagaacagcaggagctgtctctaactgaagcctccttgcagaaactgcaggagcgacgcgaccaagagctccggaggctcgaagaagaggcatgcagggccgctcaagagttcctcgaaagcctcaatttcgatgaaatcgatgagtgtgtgcgtaatatcgagcggtccctgagcgtgggcagcgagttctcaagcgagctcgccgagagcgcctgtgaagagaaacccaacttcaacttctcccagccctatcccgaggaggaggttgacgagggattcgaggccgatgacgatgccttcaaggacagtcctaaccctagtgagcacggacactccgaccagaggaccagtggcatcagaactagcgacgattcatccgaggaagatccctatatgaacgatacagttgttccaaccagcccctccgcagattctacagtcttgctcgcgccatctgtccaagattccggatcccttcataacagtagctccggagaaagtacttactgcatgccccagaacgccggcgatctgccttcgccagacggcgattacgactacgatcaggatgactacgaggacggcgcaatcacgtctgggtcgagcgtgaccttcagtaatagttacggctcccagtggagcccagattatcgatgctccgtcggaacttacaacagtagcggcgcctatagattttcctccgagggagcccagtcctcttttgaggactcagaggaagattttgacagcaggtttgataccgacgatgagctcagctaccgacgggattcagtgtacagttgcgtgaccctgccatatttccacagtttcctctatatgaagggaggcttaatgaattcctggaagcgacgctggtgtgtgctgaaggacgaaaccttcctatggtttcgctcaaaacaagaggcactaaagcaggggtggcttcacaagaaaggcgggggatcctcaacactttcacggcggaactggaaaaaacggtggttcgttttgcgccaatccaagctcatgtactttgagaacgatagtgaggaaaaacttaaagggaccgtggaggtgaggaccgccaaagagataatcgataacacaacaaaagagaatggtattgacatcatcatggccgatagaaccttccatctgattgctgagagccctgaagatgcatcccagtggttttcagtgctctcacaggtgcacgcgagtacagaccaagagattcaagagatgcatgacgagcaggccaatccacagaacgccgtcggcacactcgacgtggggcttatagactccgtttgcgcaagtgatagtccagataggcccaattcatttgtgatcatcacagcgaatcgggtcttacactgcaatgctgatacacccgaagagatgcaccactggataactttactgcagcgctcaaagggagacaccagagtggaagggcaggagtttatcgtgagggggtggcttcacaaagaagtgaagaattcgcctaaaatgtccagtttgaagctgaagaagaggtggttcgtcctgacccataatagtttggactattataaatcgagtgaaaagaatgctcttaaactcggcacactggtcttaaatagcctgtgttcggtcgtgcccccagacgagaagattttcaaagaaacgggctactggaacgtgaccgtgtacggaaggaagcattgctataggctgtatacaaagctcctgaatgaggcaactcgctggagttctgccattcagaatgtgacagacactaaggcacccatagatactcccacgcaacagctaattcaggatatcaaagagaactgcttgaactctgatgtggttgaacagatttataaacgaaatcccattctgcggtatacccatcatcccctgcattcccctctcctacctctgccctacggcgacatcaatttgaatctgctgaaggacaagggatatacgacactgcaggacgaggcgattaagattttcaactcactgcaacagctcgaaagcatgagcgatcccattcccatcattcagggcatcctgcagaccggccacgacctccgccccctgagagacgagctgtactgccagttaatcaagcaaactaacaaggtgcctcaccccggctctgtaggcaacctttactcttggcagattctgacctgcctgagctgtacatttcttccctcgcggggaatcctaaagtacctgaagttccacctgaaacgcattcgcgagcagtttccaggcagcgagatggaaaaatacgctctgtttacctatgagtctttgaagaaaactaaatgcagagaatttgtgccgtctcgcgacgagatagaagccctgattcacagacaggaaatgacctccaccgtttattgccatggcggcggatcttgcaagattacgatcaattcacataccacagccggcgaagtggtagagaaactgatacgcggtctggcaatggaggacagtcgtaacatgtttgctctcttcgaatataacggtcacgtggacaaggctatcgagagtagaactgttgtggccgacgtcctggctaaatttgaaaagctggccgctaccagtgaagttggcgatttgccgtggaagttttattttaaactttactgttttctggacacagataacgtgcctaaagatagcgttgagtttgcatttatgttcgagcaggcccatgaagccgttattcacggccaccatcccgcccccgaggagaacctgcaggtgcttgcagcacttcgccttcagtacctgcagggagattacacactgcatgccgcgatcccacctcttgaggaggtgtatagtttacagcggcttaaggctcggattagccagtcaactaaaacgtttaccccctgcgaaaggctggagaaacgaaggacaagttttctcgagggaaccctgaggcggagctttagaacagggtccgttgtacgtcagaaggtggaggaagagcagatgctggacatgtggatcaaagaggaagtctcatccgccagggcttcaattatcgacaagtggcggaagttccagggcatgaatcaggaacaggccatggccaagtatatggccttgatcaaggagtggcccggctatggttccactcttttcgacgtcgaatgcaaggagggaggattccctcaggagctttggctcggtgtgtctgccgatgcagtcagcgtttacaaaaggggtgagggacggcctctcgaggtgttccagtacgaacacattctttcgtttggcgcccctcttgccaatacatataaaattgtggttgacgagagggaactgctttttgagacctctgaggttgtggatgttgccaagcttatgaaagcctatataagtatgatagtaaagaagcgctactctaccacccggtcagcttctagccagggatcttctagatag

SEQ ID NO: 174059 - DNA, 6177 bp, Artificial Sequence
  derived and/or modified sequence
atggataacttttttacagaaggcacacgtgtatggctacgagagaatgggcagcacttcccatccacagtcaacagttgcgcggaaggaatcgtcgtcttccgtacagattatgggcaggtatttacatataagcagagcactatcactcatcaaaaagtcacggccatgcaccccaccaacgaagaaggagtggacgacatggcttcactcacagagttacacgggggctcaatcatgtacaatctctttcagaggtacaaacgcaatcagatctacacctatattggaagtatcctggcatctgtgaacccatatcaaccaatcgcgggcctttacgaacccgccacaatggaacaatactccaggcgacatcttggtgagctacccccacatatcttcgccatagccaatgaatgttacagatgtctgtggaaaagacacgacaaccaatgtatactgattagtggggagagcggtgccggcaagacagagtcaactaagctaattttgaagtttctgtccgttatctcccagcagtctcttgagctgtctttgaaagaaaaaacgagttgcgtcgagcgagctatcctcgaatcctcaccaatcatggaggcatttggcaatgctaaaacagtgtacaacaacaacagttctcggtttggaaaatttgttcagctcaatatttgccagaaaggaaatatccagggcggcaggatcgtggactatttactggagaagaatcgcgttgtacgacagaatcctggcgaacgaaactaccatatattttacgctcttctggccggcctggagcatgaggagcgcgaggagttttacttatctacccccgagaactatcactaccttaatcagagtggatgtgtggaggataagaccatctcagatcaggagtcctttagggaggtgatcacagccatggacgtaatgcagttttctaaggaggaggtgcgcgaagtatcccggttgctggcagggattctacatctcggcaacatcgaattcatcactgccggcggtgcgcaggtgagttttaagactgccctcggaagatccgcagagctccttgggctggaccccacccaattaacagacgccttaactcagcgctctatgttccttcggggtgaagaaatcctgacccctctgaacgtgcagcaagccgtcgatagccgggacagcttggcaatggccttgtacgcatgctgcttcgagtgggttataaaaaagataaattccaggatcaaagggaatgaagactttaagagcattgggatcctggacatctttggattcgagaactttgaggtaaatcacttcgagcagttcaatatcaattatgcaaacgaaaaactgcaggagtacttcaataagcatatctttagtctggaacagctggaatacagcagagagggccttgtctgggaggacatcgactggatagataatggagaatgtctggacttgattgagaagaagctgggcctactggctttgattaatgaggaatcccatttcccccaggcaacggattctacccttctggagaagctgcacagccaacatgcgaataatcatttttacgttaagccaagggtagctgttaataattttggagttaaacactacgccggggaagtgcaatatgacgtgaggggtatcctggaaaaaaatagggatacttttcgggacgacctgcttaatctgcttcgagagtcccgcttcgacttcatctacgacctctttgagcatgtgtctagtagaaataatcaggatacattaaagtgtggtagcaagcataggcgtccgactgtatccagccaattcaaagactccttgcatagcctaatggcgacattgtcatcctctaatcctttcttcgtaagatgtatcaaaccaaacatgcagaaaatgcccgaccagttcgaccaggctgtagtgctcaatcagctgagatatagcggaatgttagagactgttcggatcaggaaagctggatatgccgtcagacgccccttccaagacttttacaaacgctacaaagttctgatgagaaaccttgctctacctgaggatgtgagaggcaagtgtacttccttgctccagctctacgatgcatctaacagtgagtggcagcttggcaaaacaaaggtcttcctcagggagagtctggagcagaaacttgaaaagcggagagaagaagaagtatcgcacgcggctatggtgatccgggctcacgtgctaggattcctggcaaggaaacagtacaggaaggtactgtactgcgtggttataatccagaagaattatcgggcattcctgctgcgccggcgctttttgcatcttaaaaaggcagcaatcgtgtttcagaaacagctaagaggtcagatcgcccggagagtgtaccgacagctcctggccgagaagcgcgagcaggaggagaagaagaaacaggaggaggaggaaaaaaaaaagcgcgaggaagaagagcgtgaaagggaacgtgaacggagggaggcagaactgagagcccagcaggaagaggagactagaaaacagcaggagctggaggccctgcagaagagtcagaaggaagcagaacttactcgtgaactggaaaaacaaaaggagaataagcaggtggaggaaatattgcggctggaaaaggagattgaagacctgcaacggatgaaagaacagcaggagctgtccctgacggaggcctccttgcagaagctgcaggaacgaagggatcaggagcttaggcgtttagaagaggaagcctgcagagcagcccaggaattcctggaaagtctgaatttcgatgagatcgatgaatgcgttaggaatatcgaacgctccctaagcgttggatccgagttctcctccgagctggcagagagtgcttgcgaggagaagcctaattttaatttcagccagccatacccggaagaggaggttgatgaggggtttgaggcagacgacgacgcatttaaggattcacccaaccctagcgaacacggccactccgatcagcgcacctcaggaattcggacaagtgatgacagctcagaggaggatccctacatgaacgataccgtggtccctacctccccctcagccgactctaccgtgctgctggctcccagtgtgcaggactccgggtctctgcataactccagcagcggcgagagtacctactgtatgccgcaaaacgctggcgacttaccctcacccgacggagactatgactatgatcaagatgattacgaagacggagcaattacctcgggtagttctgtaacattctccaactcgtacggttcgcagtggagtcctgactatcgatgctcagttgggacctacaactcctccggggcttatcgcttcagcagtgaaggcgcacagagttcctttgaggattccgaagaggacttcgattcacgatttgacacagacgatgaattgtcgtacaggcgtgattctgtctattcttgtgtaaccctcccatacttccattcatttctttacatgaaagggggcttgatgaattcgtggaagcgaagatggtgcgtgttgaaggatgagactttcttatggttccggtccaagcaggaggcattgaaacaggggtggttacacaagaagggtggcggcagttcaaccctgagtagacggaattggaaaaaaagatggtttgttttgagacagtccaagcttatgtactttgagaacgactctgaggaaaagctgaaaggcactgttgaggtccgcacagcaaaggagataatcgacaatactacaaaagaaaacggcatcgatattataatggccgacaggacattccatctgatcgccgagtctcctgaagatgcctcacagtggttctcagtccttagtcaggtacatgcaagtaccgatcaggagatccaggaaatgcatgacgagcaggcgaatcctcagaacgctgtcgggaccctcgacgtgggtctgatcgacagcgtgtgcgctagcgatagccccgatagaccaaactcctttgttatcattactgccaatcgcgtgctgcactgtaatgccgatacccctgaagagatgcaccactggatcactctgcttcagaggagtaaaggagacacccgggtggagggtcaggagttcattgtgagaggctggctgcataaagaggtgaagaatagtcctaaaatgagctccctcaagctcaaaaagcgatggttcgttctcacccacaacagtcttgactactacaagtcaagcgagaaaaatgctctgaaactgggtactctggtcttaaacagcctgtgttccgtggtccctcccgacgagaagatcttcaaggagaccgggtattggaacgtgacagtgtatggccgaaaacattgttacaggctgtacacaaagctgctgaatgaggccaccaggtggagttccgcgattcagaacgtgactgatacaaaggcccccatagacaccccaacccagcaattaattcaagatataaaggagaactgtctgaattctgacgttgtggagcagatctacaagaggaacccaattctaagatacacccaccacccactgcactctcccctgttaccactgccctacggtgatataaacctaaatctcttgaaagacaaaggctatactaccctccaggatgaggctatcaaaattttcaatagcctgcaacagttagagtcaatgtctgaccctattccgatcatccagggaatcctacagacagggcatgatctccgcccgctgagggacgagctctactgtcagctgattaagcagactaacaaagtgccgcatccaggcagcgtgggaaatttgtactcctggcagatcctgacttgtctgtcttgtacctttctgccttcgcgtggcattctaaaatacttaaagttccacctgaagagaatccgcgagcaattccccgggagcgagatggagaaatacgccctgtttacatacgagagcttaaaaaaaacaaaatgccgagagttcgtgccttcacgcgacgagatcgaggccttaatccatcggcaggaaatgactagcaccgtgtattgtcacggtgggggctcctgcaagatcacaatcaactcccacaccacagctggggaagtggtggagaaattgatccgcgggctggctatggaggactcgcggaacatgtttgcgctgttcgagtataatggacatgtagataaggcaatcgagagcaggaccgtggttgcggacgtgttagctaagtttgagaaactggccgctacttctgaggttggtgacctgccatggaagttttacttcaagctttactgctttctggacactgataatgtgcctaaggacagtgtagagtttgccttcatgtttgagcaggcacacgaagcggtgattcatgggcatcacccagctcccgaagaaaacctccaggttctcgctgccctgaggttgcaatatcttcagggcgattatacccttcacgccgccattcctcccctcgaggaggtttattccctccaacggctcaaggctagaatctcccaaagtaccaaaacttttactccgtgcgagcgtctcgagaaaaggcggacctcttttctggaaggaacacttaggcgctccttccgaactgggtcagtcgtaaggcaaaaagtcgaagaggagcagatgttggatatgtggatcaaggaggaagtaagctctgctcgggccagcattattgacaaatggagaaagttccaaggcatgaaccaagagcaagccatggcaaaatacatggcactgattaaagaatggcccgggtacggaagcaccctgttcgatgtggaatgcaaggagggcggttttccacaggaactgtggctaggtgtgagcgcagacgccgtgagcgtatacaagcgcggtgaaggccgcccccttgaggttttccagtacgagcatatccttagtttcggggcccctctggcaaacacgtataagatcgttgtggacgaacgagagctgctgtttgagacaagtgaggtagtcgacgttgcaaaactgatgaaagcttacatttctatgattgtgaaaaaacgctatagcacgacccgcagtgccagtagtcaggggtccagccgttag

SEQ ID NO: 174060 - DNA, 4194 bp, Artificial Sequence
  derived and/or modified sequence
atgctcgaaacggtccgaataaggaaagctggctatgccgtgagaaggcctttccaagatttttataagcgctataaggtgcttatgcggaatttggcattgcccgaagacgtgcgtggaaagtgcacatccctattgcagctgtatgacgcctctaactctgaatggcagttgggtaagaccaaagtcttccttcgggaaagcttggaacagaagctggagaaaagacgggaagaagaggtctctcatgctgccatggtcattagagcccacgtgctcgggttcctagcacgtaagcagtacaggaaggtcctctattgtgtcgtgatcattcagaaaaattaccgcgcttttctcctcagaagaagattcctgcatctaaagaaagcagctattgtgttccagaaacagctgcggggacagatcgccagaagggtataccgtcagcttctcgcagagaagcgtgaacaggaggaaaagaaaaagcaagaggaagaagagaagaaaaagagggaggaggaggaacgagagcgcgagcgggagaggcgagaagctgaactgagggctcagcaggaagaggaaactaggaagcaacaggagttggaggcccttcagaagagccagaaggaggcggagttgactcgcgaacttgagaaacagaaagagaacaagcaagtggaggaaatactgaggctcgagaaggaaattgaagatttacagagaatgaaggagcagcaggagctctctctgacagaggctagtcttcagaagctgcaagagagacgggaccaggagctacgcagattggaggaggaagcgtgcagagccgcccaggaatttctggagtctttgaactttgacgagatcgacgagtgtgtcaggaacattgagaggagcttatcagtgggatccgaattctcaagcgaactggccgaaagcgcttgcgaagagaaaccaaatttcaatttttctcagccttaccctgaagaagaggtggacgaggggttcgaagctgatgatgacgcctttaaggatagccccaatcctagtgaacatggacattctgaccagagaacaagtgggattagaacctcggacgactcatcagaagaggatccatatatgaacgacaccgtggtgcccacctcaccaagcgctgacagtacagtgctactcgccccttctgtgcaggattccggatccttacataatagctcgtcaggcgagtcgacctattgtatgcctcaaaacgctggcgacctgcccagcccggacggagattatgactacgaccaggatgactatgaggacggcgccatcacaagcggttcttcggtgacattctcaaacagctacggctcccagtggtcgccagactataggtgcagcgtggggacctacaactcctccggagcatacaggttcagtagcgaaggcgctcagtcctccttcgaagatagcgaagaagacttcgacagcagattcgataccgacgacgagctctcataccgtcgggatagcgtgtactcatgtgtgactctgccttactttcactcttttctgtatatgaagggagggctcatgaacagttggaaaagaagatggtgcgtgctgaaagatgaaacttttctgtggtttcggtcaaaacaggaagccctcaaacaaggatggctccataagaagggcggtgggtcgtccactttgtccagacggaactggaaaaaaaggtggttcgtgctaaggcaatccaagttgatgtactttgagaatgattccgaagagaaactgaagggaacagtagaggtcaggacagccaaggaaatcattgacaacaccacaaaagagaatggcattgatataatcatggctgaccgaaccttccatctgatagcggagtcccctgaggacgcctctcagtggttctctgtgttgagtcaagtgcacgcttccaccgatcaggaaatccaagagatgcacgatgaacaggccaatccacaaaacgccgtaggcactctggacgtggggttaatagattccgtgtgcgcaagcgactcacccgaccgcccgaacagctttgtcataataacagcaaacagggttctacactgtaatgctgatacccccgaggaaatgcatcattggatcactctgctgcagcgaagcaaaggtgatactagagtagaaggacaggagtttatcgtacgtggttggctccataaggaggtcaaaaatagccccaaaatgtcctctctcaaactaaagaaaagatggtttgtcctgacccataatagtttagactactacaaaagttccgagaagaacgctctgaaactgggtacgcttgttctgaacagtctatgttcagttgtgccacctgatgaaaaaattttcaaagagaccggctactggaacgtgacggtgtatggccgcaagcactgctaccgcctctacaccaagctgttgaacgaagccacccggtggagtagcgcaatacagaacgtgaccgacactaaagcccccatagatacccctacccaacaattgatccaggacatcaaagagaactgtttaaactccgatgtagtggaacagatttacaagagaaaccctatcttgaggtacactcatcaccctcttcactcccccctgttgcccctgccttatggcgacattaatctgaacctgctgaaagacaaggggtacactactctgcaggatgaggccatcaagatctttaatagcctgcagcagctagaatcaatgtcagacccgatcccgatcatccagggcattttgcagaccgggcacgatctacgccctttacgagatgagctgtattgccagttaatcaaacaaacgaataaggtgccccatcccggttctgtgggtaatctgtacagttggcagatactcacttgtctctcctgtaccttcctaccgagccgcggaatccttaagtaccttaaatttcacctgaagcggattcgcgagcagttcccgggtagtgagatggaaaaatacgctcttttcacatatgaaagcttgaagaaaaccaaatgccgggaatttgtgccgtcccgcgacgagatagaggcactgattcataggcaagagatgacatctaccgtctactgccacggtgggggatcttgtaaaattactattaatagccacacaacagccggggaggtcgtcgagaagctgatccgcggactggcaatggaagattcccgtaatatgtttgccttgtttgaatataacgggcatgtcgacaaggctattgagtcccgcacagtcgttgcagatgtgctcgccaagtttgagaagctggccgccacttccgaggttggggatctgccctggaagttctacttcaaactgtattgtttcctcgatacagacaatgttcccaaagattctgtggaattcgctttcatgttcgagcaagcccatgaagctgtcattcatggacaccaccccgcccccgaggagaacttgcaggtcctggctgctctgcggctacagtatttgcaaggcgattatacactgcacgccgctataccaccactagaggaggtgtacagccttcagcgtctgaaggcacgtatttcacagtcaaccaaaacttttacaccatgtgaaagactggagaaacggcgcacctctttcttggagggcactttacgaagaagcttccggaccggctctgtggtgagacagaaagtggaggaggaacagatgctggatatgtggatcaaggaagaggtatccagcgccagagcctccatcatcgacaagtggcgaaagttccaaggaatgaaccaggagcaggctatggctaaatacatggcgctgataaaagagtggccagggtacggaagtaccctttttgatgtggagtgcaaagagggtggttttccacaggaactctggttgggggtgagtgccgacgccgtgtccgtctataaaaggggggagggtagaccactggaggtttttcagtacgagcatattctaagttttggcgctcctctggcaaacacctataagatcgtagtggacgagagagaattgctcttcgagacaagcgaagtggtagacgttgccaagctgatgaaagcctatatcagcatgatagtcaagaagcgctattctacgacaaggtcagcatcttcccaaggctcgtcacgttag

SEQ ID NO: 174061 - DNA, 4248 bp, Artificial Sequence
  derived and/or modified sequence
atgccagaccagtttgaccaggccgtggtgctgaaccagctgcgctacagcggcatgctggagaccgtgcgcatcaggaaggccggctatgctgtgagaagacccttccaggacttctacaagcgctacaaggtgctgatgaggaacctggccctgcctgaagatgtgcggggcaagtgcaccagcctgctgcagctgtatgatgccagcaacagcgagtggcagctgggcaagaccaaggtgttcctgcgggagagcctggagcagaagctggagaagaggcgggaggaggaggtgtcccatgctgccatggtgatccgggcccacgtgctgggcttcctggccaggaagcagtacaggaaggtgctgtactgtgtggtgatcatccagaagaactaccgggccttcctgctgcggcggcgcttcctgcacctgaagaaggccgccatcgtgttccagaagcagctgcggggccagatcgcccggcgggtgtaccggcagctgctggccgagaagcgggagcaggaggagaagaagaagcaggaggaggaggagaagaagaagcgggaggaggaggagcgggagcgggagcgggagcggcgggaggccgagctgcgggcccagcaggaggaggagaccaggaagcagcaggagctggaggccctgcagaagagccagaaggaggccgagctgacccgggagctggagaagcagaaggagaacaagcaggtggaggagatcctgcggctggagaaggagattgaggacctgcagaggatgaaggagcagcaggagctgagcctgacagaggccagcctgcagaagctgcaggagcggcgggaccaggagctgcggcggctggaggaggaggcctgccgggccgcccaggagttcctggagagcctgaactttgatgaaattgatgaatgtgtgaggaacatcgagaggagcctgtctgtgggcagcgagttcagcagcgagctggccgagagcgcctgtgaggagaagcccaacttcaacttcagccagccctacccagaggaggaggtggatgagggctttgaagcagatgatgatgccttcaaggacagccccaaccccagcgagcacggccacagcgaccagaggaccagcggcatccgcaccagtgatgacagcagcgaggaggacccctacatgaatgacacagtggtgcccaccagccccagcgctgacagcacagtgctgctggcccccagcgtgcaggacagcggcagcctgcacaacagcagcagtggagagagcacctactgcatgccccagaatgctggggacctgcccagcccagatggagactatgactatgaccaggatgattatgaagatggagccatcaccagcggcagctctgtgaccttcagcaacagctatggcagccagtggagcccagactaccgctgcagcgtgggcacctacaacagcagcggggcctaccgcttcagcagcgagggcgcccagagcagctttgaagattctgaagaagattttgacagcagatttgacacagatgatgagctgagctaccgccgggacagcgtgtacagctgtgtgaccctgccctacttccacagcttcctgtacatgaagggcggcctgatgaacagctggaagaggcgctggtgtgtgctgaaggatgagaccttcctgtggttccgcagcaagcaggaggccctgaagcagggctggctgcacaagaagggcggcggcagcagcaccctgagcagaagaaactggaagaagcgctggtttgtgctgcggcagagcaagctgatgtactttgaaaatgacagcgaggagaagctgaagggcaccgtggaggtgaggacagccaaggagatcatcgacaacaccaccaaggaaaatggcatcgacatcatcatggctgacaggaccttccacctgattgctgagagcccagaagatgccagccagtggttctctgtgctgagccaggtgcacgccagcacagaccaggagatccaggagatgcatgatgagcaggccaacccccagaatgctgtgggcaccctggatgtgggcctgattgattctgtgtgtgccagtgacagcccagaccggcccaacagctttgtgatcatcacagccaacagagtgctgcactgcaatgctgacaccccagaggagatgcaccactggatcaccctgctgcagaggagcaagggggacaccagggtggagggccaggagttcatcgtgcggggctggctgcacaaggaggtgaagaacagccccaagatgagcagcctgaagctgaagaagcgctggtttgtgctgacccacaacagcctggactactacaagagcagcgagaagaatgccctgaagctgggcaccctggtgctgaacagcctgtgcagcgtggtgcccccagatgagaagatcttcaaggagaccggctactggaatgtgacagtgtatggcaggaagcactgctaccgcctgtacaccaagctgctgaatgaggccacccgctggagcagcgccatccagaatgtgacagacaccaaggcccccatcgacacccccacccagcagctgatccaggacatcaaggagaactgcctgaacagtgatgtggtggagcagatctacaagaggaaccccatcctgcgctacacccaccaccccctgcacagccccctgctgcccctgccctacggggacatcaacctgaacctgctgaaggacaagggctacaccaccctgcaggatgaggccatcaagatcttcaacagcctgcagcagctggagagcatgtctgaccccatccccatcatccagggcatcctgcagacaggccatgacctgcggcccctgagagatgagctgtactgccagctgatcaagcagaccaacaaggtgccccaccctggctctgtgggcaacctgtacagctggcagatcctgacctgcctgagctgcaccttcctgcccagccggggcatcctgaagtacctgaagttccacctgaagaggatccgggagcagtttcctggcagcgagatggagaagtatgccctcttcacctatgagagcctgaagaagaccaagtgccgggagtttgtgcccagcagagatgaaattgaggccctgatccaccggcaggagatgaccagcacagtgtactgccacggcggcggcagctgcaagatcaccatcaacagccacaccacagctggggaggtggtggagaagctgatccggggcctggccatggaggacagcaggaacatgtttgccctgtttgagtacaatggacatgtggacaaggccatcgagagcaggacagtggtggctgatgtgctggccaagtttgagaagctggccgccaccagcgaggtgggggacctgccctggaagttctacttcaagctgtactgcttcctggacacagacaacgtgcccaaggacagcgtggagtttgccttcatgtttgagcaggcccatgaagctgtgatccacggccaccacccagcccctgaggagaacctgcaggtgctggccgccctgcggctgcagtacctgcagggcgactacaccctgcatgctgccatcccccccctggaggaggtgtacagcctgcagaggctgaaggcccgcatcagccagagcaccaagaccttcaccccctgtgagcggctggagaagaggaggaccagcttcctggagggcaccctgcggcgctccttcagaacaggctctgtggtgcggcagaaggtggaggaggagcagatgctggacatgtggatcaaggaggaggtgagcagcgcccgggccagcatcatcgacaagtggaggaagttccagggcatgaaccaggagcaggccatggccaagtacatggccctgatcaaggagtggccaggctacggcagcaccctgtttgatgtggagtgcaaggagggcggcttcccccaggagctgtggctgggcgtgtctgcagatgctgtgtctgtgtacaagagaggagagggccggcccctggaggtgttccagtatgagcacatcctgagctttggagcccccctggccaacacctacaagatcgtggtggatgagcgggagctgctgtttgagaccagcgaggtggtggatgtggccaagctgatgaaggcctacatctccatgattgtgaagaagcgctacagcaccaccaggtctgccagcagccagggcagcagcaggtag

SEQ ID NO: 174062 - DNA, 4194 bp, Artificial Sequence
  derived and/or modified sequence
atgctggagaccgtgcgcatcaggaaggccggctatgctgtgagaagacccttccaggacttctacaagcgctacaaggtgctgatgaggaacctggccctgcctgaagatgtgcggggcaagtgcaccagcctgctgcagctgtatgatgccagcaacagcgagtggcagctgggcaagaccaaggtgttcctgcgggagagcctggagcagaagctggagaagaggcgggaggaggaggtgtcccatgctgccatggtgatccgggcccacgtgctgggcttcctggccaggaagcagtacaggaaggtgctgtactgtgtggtgatcatccagaagaactaccgggccttcctgctgcggcggcgcttcctgcacctgaagaaggccgccatcgtgttccagaagcagctgcggggccagatcgcccggcgggtgtaccggcagctgctggccgagaagcgggagcaggaggagaagaagaagcaggaggaggaggagaagaagaagcgggaggaggaggagcgggagcgggagcgggagcggcgggaggccgagctgcgggcccagcaggaggaggagaccaggaagcagcaggagctggaggccctgcagaagagccagaaggaggccgagctgacccgggagctggagaagcagaaggagaacaagcaggtggaggagatcctgcggctggagaaggagattgaggacctgcagaggatgaaggagcagcaggagctgagcctgacagaggccagcctgcagaagctgcaggagcggcgggaccaggagctgcggcggctggaggaggaggcctgccgggccgcccaggagttcctggagagcctgaactttgatgaaattgatgaatgtgtgaggaacatcgagaggagcctgtctgtgggcagcgagttcagcagcgagctggccgagagcgcctgtgaggagaagcccaacttcaacttcagccagccctacccagaggaggaggtggatgagggctttgaagcagatgatgatgccttcaaggacagccccaaccccagcgagcacggccacagcgaccagaggaccagcggcatccgcaccagtgatgacagcagcgaggaggacccctacatgaatgacacagtggtgcccaccagccccagcgctgacagcacagtgctgctggcccccagcgtgcaggacagcggcagcctgcacaacagcagcagtggagagagcacctactgcatgccccagaatgctggggacctgcccagcccagatggagactatgactatgaccaggatgattatgaagatggagccatcaccagcggcagctctgtgaccttcagcaacagctatggcagccagtggagcccagactaccgctgcagcgtgggcacctacaacagcagcggggcctaccgcttcagcagcgagggcgcccagagcagctttgaagattctgaagaagattttgacagcagatttgacacagatgatgagctgagctaccgccgggacagcgtgtacagctgtgtgaccctgccctacttccacagcttcctgtacatgaagggcggcctgatgaacagctggaagaggcgctggtgtgtgctgaaggatgagaccttcctgtggttccgcagcaagcaggaggccctgaagcagggctggctgcacaagaagggcggcggcagcagcaccctgagcagaagaaactggaagaagcgctggtttgtgctgcggcagagcaagctgatgtactttgaaaatgacagcgaggagaagctgaagggcaccgtggaggtgaggacagccaaggagatcatcgacaacaccaccaaggaaaatggcatcgacatcatcatggctgacaggaccttccacctgattgctgagagcccagaagatgccagccagtggttctctgtgctgagccaggtgcacgccagcacagaccaggagatccaggagatgcatgatgagcaggccaacccccagaatgctgtgggcaccctggatgtgggcctgattgattctgtgtgtgccagtgacagcccagaccggcccaacagctttgtgatcatcacagccaacagagtgctgcactgcaatgctgacaccccagaggagatgcaccactggatcaccctgctgcagaggagcaagggggacaccagggtggagggccaggagttcatcgtgcggggctggctgcacaaggaggtgaagaacagccccaagatgagcagcctgaagctgaagaagcgctggtttgtgctgacccacaacagcctggactactacaagagcagcgagaagaatgccctgaagctgggcaccctggtgctgaacagcctgtgcagcgtggtgcccccagatgagaagatcttcaaggagaccggctactggaatgtgacagtgtatggcaggaagcactgctaccgcctgtacaccaagctgctgaatgaggccacccgctggagcagcgccatccagaatgtgacagacaccaaggcccccatcgacacccccacccagcagctgatccaggacatcaaggagaactgcctgaacagtgatgtggtggagcagatctacaagaggaaccccatcctgcgctacacccaccaccccctgcacagccccctgctgcccctgccctacggggacatcaacctgaacctgctgaaggacaagggctacaccaccctgcaggatgaggccatcaagatcttcaacagcctgcagcagctggagagcatgtctgaccccatccccatcatccagggcatcctgcagacaggccatgacctgcggcccctgagagatgagctgtactgccagctgatcaagcagaccaacaaggtgccccaccctggctctgtgggcaacctgtacagctggcagatcctgacctgcctgagctgcaccttcctgcccagccggggcatcctgaagtacctgaagttccacctgaagaggatccgggagcagtttcctggcagcgagatggagaagtatgccctcttcacctatgagagcctgaagaagaccaagtgccgggagtttgtgcccagcagagatgaaattgaggccctgatccaccggcaggagatgaccagcacagtgtactgccacggcggcggcagctgcaagatcaccatcaacagccacaccacagctggggaggtggtggagaagctgatccggggcctggccatggaggacagcaggaacatgtttgccctgtttgagtacaatggacatgtggacaaggccatcgagagcaggacagtggtggctgatgtgctggccaagtttgagaagctggccgccaccagcgaggtgggggacctgccctggaagttctacttcaagctgtactgcttcctggacacagacaacgtgcccaaggacagcgtggagtttgccttcatgtttgagcaggcccatgaagctgtgatccacggccaccacccagcccctgaggagaacctgcaggtgctggccgccctgcggctgcagtacctgcagggcgactacaccctgcatgctgccatcccccccctggaggaggtgtacagcctgcagaggctgaaggcccgcatcagccagagcaccaagaccttcaccccctgtgagcggctggagaagaggaggaccagcttcctggagggcaccctgcggcgctccttcagaacaggctctgtggtgcggcagaaggtggaggaggagcagatgctggacatgtggatcaaggaggaggtgagcagcgcccgggccagcatcatcgacaagtggaggaagttccagggcatgaaccaggagcaggccatggccaagtacatggccctgatcaaggagtggccaggctacggcagcaccctgtttgatgtggagtgcaaggagggcggcttcccccaggagctgtggctgggcgtgtctgcagatgctgtgtctgtgtacaagagaggagagggccggcccctggaggtgttccagtatgagcacatcctgagctttggagcccccctggccaacacctacaagatcgtggtggatgagcgggagctgctgtttgagaccagcgaggtggtggatgtggccaagctgatgaaggcctacatctccatgattgtgaagaagcgctacagcaccaccaggtctgccagcagccagggcagcagcaggtag

SEQ ID NO: 174063 - DNA, 6177 bp, Artificial Sequence
  derived and/or modified sequence
atggacaacttcttcacagagggcaccagggtgtggctgagagaaaatggccagcacttccccagcacagtgaacagctgtgccgagggcatcgtggtgttcagaacagattatggccaggtgttcacctacaagcagagcaccatcacccaccagaaggtgacagccatgcaccccaccaatgaggagggcgtggatgacatggccagcctgacagagctgcatggaggcagcatcatgtacaacctcttccagcgctacaagaggaaccagatctacacctacatcggcagcatcctggcctctgtgaacccctaccagcccatcgccggcctgtatgagcccgccaccatggagcagtacagcagaagacacctgggggagctgcccccccacatctttgccatcgccaatgaatgctaccgctgcctgtggaagagacatgacaaccagtgcatcctgatcagcggggagagcggggccggcaagacagagagcaccaagctgatcctgaagttcctgagcgtcatcagccagcagagcctggagctgagcctgaaggagaagaccagctgtgtggagcgggccatcctggagagcagccccatcatggaggcctttggaaatgccaagacagtgtacaacaacaacagcagcagatttgggaagtttgtgcagctgaacatctgccagaagggcaacatccagggcggccgcatcgtggactacctgctggagaagaacagagtggtgcggcagaaccctggagagaggaactaccacatcttctacgccctgctggccggcctggagcacgaggagcgggaggagttctacctgagcaccccagagaactaccactacctgaaccagagcggctgtgtggaggacaagaccatcagtgaccaggagagcttccgggaggtgatcacagccatggatgtgatgcagttcagcaaggaggaggtgcgggaggtgtcccggctgctggccggcatcctgcacctgggcaacatcgagttcatcacagctgggggcgcccaggtgtccttcaagacagccctgggccgctctgctgagctgctgggcctggaccccacccagctgacagatgccctgacccagaggtccatgttcctgcggggggaggagatcctgacccccctgaatgtgcagcaggccgtggacagccgggacagcctggccatggccctgtatgcctgctgctttgagtgggtgatcaagaagatcaacagccgcatcaagggaaatgaagacttcaagagcatcggcatcctggacatcttcggctttgaaaattttgaggtgaaccactttgagcagttcaacatcaactatgccaatgagaagctgcaggagtacttcaacaagcacatcttcagcctggagcagctggagtacagccgggagggcctggtgtgggaggacatcgactggattgacaatggagaatgtctggacctgattgagaagaagctgggcctgctggccctgatcaatgaggagagccacttcccccaggccacagacagcaccctgctggagaagctgcacagccagcacgccaacaaccacttctacgtgaagccccgggtggccgtgaacaactttggagtgaagcactacgccggggaggtgcagtatgatgtgcggggcatcctggagaagaacagagacaccttcagagatgacctgctgaacctgctgcgggagagcagatttgacttcatctatgacctgtttgagcacgtgagcagcaggaacaaccaggacaccctgaagtgtggcagcaagcacagaagacccaccgtgagcagccagttcaaggacagcctgcacagcctgatggccaccctgagcagcagcaaccccttctttgtgcgctgcatcaagcccaacatgcagaagatgccagaccagtttgaccaggccgtggtgctgaaccagctgcgctacagcggcatgctggagaccgtgcgcatcaggaaggccggctatgctgtgcggcggcccttccaggacttctacaagcgctacaaggtgctgatgaggaacctggccctgcctgaagatgtgcggggcaagtgcaccagcctgctgcagctgtatgatgccagcaacagcgagtggcagctgggcaagaccaaggtgttcctgcgggagagcctggagcagaagctggagaagagaagagaggaggaggtgtcccatgctgccatggtgatccgggcccacgtgctgggcttcctggccaggaagcagtacaggaaggtgctgtactgtgtggtgatcatccagaagaactaccgggccttcctgctgcggcggcgcttcctgcacctgaagaaggccgccatcgtgttccagaagcagctgcggggccagatcgccaggagagtgtaccggcagctgctggccgagaagcgggagcaggaggagaagaagaagcaggaggaggaggagaagaagaagcgggaggaggaggagcgggagcgggagcgggagcggcgggaggccgagctgcgggcccagcaggaggaggagaccaggaagcagcaggagctggaggccctgcagaagagccagaaggaggccgagctgacccgggagctggagaagcagaaggagaacaagcaggtggaggagatcctgcggctggagaaggagattgaggacctgcagaggatgaaggagcagcaggagctgagcctgacagaggccagcctgcagaagctgcaggagcggcgggaccaggagctgcggcggctggaggaggaggcctgcagagctgcccaggagttcctggagagcctgaactttgatgaaattgatgaatgtgtgagaaatattgaaagaagcctgtctgtgggcagcgagttcagcagcgagctggccgagagcgcctgtgaggagaagcccaacttcaacttcagccagccctacccagaggaggaggtggatgagggctttgaagcagatgatgatgccttcaaggacagccccaaccccagcgagcacggccacagcgaccagaggaccagcggcatccgcaccagtgatgacagcagcgaggaggacccctacatgaatgacacagtggtgcccaccagccccagcgctgacagcacagtgctgctggcccccagcgtgcaggacagcggcagcctgcacaacagcagcagcggggagagcacctactgcatgccccagaatgctggggacctgcccagcccagatggagactatgactatgaccaggatgattatgaagatggagccatcaccagcggcagctctgtgaccttcagcaacagctatggcagccagtggagcccagactaccgctgcagcgtgggcacctacaacagcagcggggcctaccgcttcagcagcgagggcgcccagagcagctttgaggacagcgaggaggactttgacagcagatttgacacagatgatgagctgagctacagaagagacagcgtgtacagctgtgtgaccctgccctacttccacagcttcctgtacatgaagggcggcctgatgaacagctggaagaggcgctggtgtgtgctgaaggatgagaccttcctgtggttccgcagcaagcaggaggccctgaagcagggctggctgcacaagaagggcggcggcagcagcaccctgagcagaagaaactggaagaagcgctggtttgtgctgcggcagagcaagctgatgtactttgaaaatgattctgaggagaagctgaagggcaccgtggaggtgaggacagccaaggagatcatcgacaacaccaccaaggaaaatggaattgacatcatcatggctgacaggaccttccacctgattgctgagagcccagaagatgccagccagtggttctctgtgctgagccaggtgcacgccagcacagaccaggagatccaggagatgcatgatgagcaggccaacccccagaatgctgtgggcaccctggatgtgggcctgattgacagcgtgtgtgccagtgacagcccagaccggcccaacagctttgtgatcatcacagccaacagagtgctgcactgcaatgctgacaccccagaggagatgcaccactggatcaccctgctgcagaggagcaaaggagacaccagggtggagggccaggagttcatcgtgcggggctggctgcacaaggaggtgaagaacagccccaagatgagcagcctgaagctgaagaagcgctggtttgtgctgacccacaacagcctggactactacaagagcagcgagaagaatgccctgaagctgggcaccctggtgctgaacagcctgtgcagcgtggtgcccccagatgagaagatcttcaaggagaccggctactggaatgtgacagtgtatggcaggaagcactgctaccgcctgtacaccaagctgctgaatgaggccacccgctggagcagcgccatccagaatgtgacagacaccaaggcccccatcgacacccccacccagcagctgatccaggacatcaaggagaactgcctgaacagtgatgtggtggagcagatctacaagaggaaccccatcctgcgctacacccaccaccccctgcacagccccctgctgcccctgccctatggagacatcaacctgaacctgctgaaggacaagggctacaccaccctgcaggatgaggccatcaagatcttcaacagcctgcagcagctggagagcatgtctgaccccatccccatcatccagggcatcctgcagacaggccatgacctgcggcccctgagagatgagctgtactgccagctgatcaagcagaccaacaaggtgccccaccctggctctgtgggcaacctgtacagctggcagatcctgacctgcctgagctgcaccttcctgcccagccggggcatcctgaagtacctgaagttccacctgaagaggatccgggagcagtttcctggcagcgagatggagaagtatgccctcttcacctatgagagcctgaagaagaccaagtgccgggagtttgtgcccagcagagatgaaattgaggccctgatccaccggcaggagatgaccagcacagtgtactgccacggcggcggcagctgcaagatcaccatcaacagccacaccacagctggggaggtggtggagaagctgatccggggcctggccatggaggacagcaggaacatgtttgccctgtttgagtacaacggccacgtggacaaggccatcgagagcaggacagtggtggctgatgtgctggccaagtttgagaagctggccgccaccagcgaggtgggggacctgccctggaagttctacttcaagctgtactgcttcctggacacagacaacgtgcccaaggacagcgtggagtttgccttcatgtttgagcaggcccacgaggccgtcatccacggccaccacccagcccctgaggagaacctgcaggtgctggccgccctgcggctgcagtacctgcagggcgactacaccctgcacgccgccatcccccccctggaggaggtgtacagcctgcagaggctgaaggcccgcatcagccagagcaccaagaccttcaccccctgtgagcggctggagaagaggaggaccagcttcctggagggcaccctgcggcgctccttcagaactggatctgtggtgcggcagaaggtggaggaggagcagatgctggacatgtggatcaaggaggaggtgtcctctgcccgggccagcatcatcgacaagtggaggaagttccagggcatgaaccaggagcaggccatggccaagtacatggccctgatcaaggagtggccaggctacggcagcaccctgtttgatgtggagtgcaaggagggcggcttcccccaggagctgtggctgggcgtgtctgcagatgctgtgtctgtgtacaagagaggagagggccggcccctggaggtgttccagtatgagcacatcctgagctttggagcccccctggccaacacctacaagatcgtggtggatgagcgggagctgctgtttgagaccagcgaggtggtggatgtggccaagctgatgaaggcctacatctccatgattgtgaagaagcgctacagcaccaccaggtctgccagcagccagggcagcagcaggtag

SEQ ID NO: 174064 - DNA, 4812 bp, Artificial Sequence
  derived and/or modified sequence
tgcacttgctacccttctgcaggaagcttcccagccagcacagtttctctctgccctgcctcttaatccccacccctgctcccaggcctgggacactgctaaccacccctccttcctgacacctctctgaccacccctcctcctcttgactggttcctctggaggtaggcatggcctcgggttctgcccccagtttctcactcgctgggctccaaaagaaacactggcttctctccttcagctccaggctagatgccagaccagtttgaccaggcggttgtgctgaaccagctgcggtactcagggatgctggagactgtgagaatccgcaaagctgggtatgcggtccgaagaccctttcaggacttttacaaaaggtataaagtgctgatgaggaatctggctctgcctgaggacgtccgagggaagtgcacgagcctgctgcagctctatgatgcctccaacagcgagtggcagctggggaagaccaaggtctttcttcgagaatccttggaacagaaactggagaagcggagggaagaggaagtgagccacgcggccatggtgattcgggcccatgtcttgggcttcttagcacgaaaacaatacagaaaggtcctttattgtgtggtgataatacagaagaattacagagcattccttctgaggaggagatttttgcacctgaaaaaggcagccatagttttccagaagcaactcagaggtcagattgctcggagagtttacagacaattgctggcagagaaaagggagcaagaagaaaagaagaaacaggaagaggaagaaaagaagaaacgggaggaagaagaaagagaaagagagagagagcgaagagaagccgagctccgcgcccagcaggaagaagaaacgaggaagcagcaagaactcgaagccttgcagaagagccagaaggaagctgaactgacccgtgaactggagaaacagaaggaaaataagcaggtggaagagatcctccgtctggagaaagaaatcgaggacctgcagcgcatgaaggagcagcaggagctgtcgctgaccgaggcttccctgcagaagctgcaggagcggcgggaccaggagctccgcaggctggaggaggaagcgtgcagggcggcccaggagttcctcgagtccctcaatttcgacgagatcgacgagtgtgtccggaatatcgagcggtccctgtcggtgggaagcgaattttccagcgagctggctgagagcgcatgcgaggagaagcccaacttcaacttcagccagccctacccagaggaggaggtcgatgagggcttcgaagccgacgacgacgccttcaaggactcccccaaccccagcgagcacggccactcagaccagcgaacaagtggcatccggaccagcgatgactcttcagaggaggacccatacatgaacgacacggtggtgcccaccagccccagtgcggacagcacggtgctgctcgccccatcagtgcaggactccgggagcctacacaactcctccagcggcgagtccacctactgcatgccccagaacgctggggacttgccctccccagacggcgactacgactacgaccaggatgactatgaggacggtgccatcacttccggcagcagcgtgaccttctccaactcctacggcagccagtggtcccccgactaccgctgctctgtggggacctacaacagctcgggtgcctaccggttcagctctgagggggcgcagtcctcgtttgaagatagtgaagaggactttgattccaggtttgatacagatgatgagctttcataccggcgtgactctgtgtacagctgtgtcactctgccgtatttccacagctttctgtacatgaaaggtggcctgatgaactcttggaaacgccgctggtgcgtcctcaaggatgaaaccttcttgtggttccgctccaagcaggaggccctcaagcaaggctggctccacaaaaaaggggggggctcctccacgctgtccaggagaaattggaagaagcgctggtttgtcctccgccagtccaagctgatgtactttgaaaacgacagcgaggagaagctcaagggcaccgtagaagtgcgaacggcaaaagagatcatagataacaccaccaaggagaatgggatcgacatcattatggccgataggactttccacctgattgcagagtccccagaagatgccagccagtggttcagcgtgctgagtcaggtccacgcgtccacggaccaggagatccaggagatgcatgatgagcaggcaaacccacagaatgctgtgggcaccttggatgtggggctgattgattctgtgtgtgcctctgacagccctgatagacccaactcgtttgtgatcatcacggccaaccgggtgctgcactgcaacgccgacacgccggaggagatgcaccactggataaccctgctgcagaggtccaaaggggacaccagagtggagggccaggaattcatcgtgagaggatggttgcacaaagaggtgaagaacagtccaaagatgtcttcactgaaactgaagaaacggtggtttgtactcacccacaattccctggattactacaagagttcagagaagaacgcgctcaaactggggaccctggtcctcaacagcctctgctctgtcgtccccccagatgagaagatattcaaagagacaggctactggaacgtcaccgtgtacgggcgcaagcactgttaccggctctacaccaagctgctcaacgaggccacccggtggtccagtgccattcaaaacgtgactgacaccaaggccccgatcgacacccccacccagcagctgattcaagatatcaaggagaactgcctgaactcggatgtggtggaacagatttacaagcggaacccgatccttcgatacacccatcaccccttgcactccccgctcctgccccttccgtatggggacataaatctcaacttgctcaaagacaaaggctataccacccttcaggatgaggccatcaagatattcaattccctgcagcaactggagtccatgtctgacccaattccaataatccagggcatcctacagacagggcatgacctgcgacctctgcgggacgagctgtactgccagcttatcaaacagaccaacaaagtgccccaccccggcagtgtgggcaacctgtacagctggcagatcctgacatgcctgagctgcaccttcctgccgagtcgagggattctcaagtatctcaagttccatctgaaaaggatacgggaacagtttccaggaagcgagatggaaaaatacgctctcttcacttacgaatctcttaagaaaaccaaatgccgagagtttgtgccttcccgagatgaaatagaagctctgatccacaggcaggaaatgacatccacggtctattgccatggcggcggctcctgcaagatcaccatcaactcccacaccaccgctggggaggtggtggagaagctgatccgaggcctggccatggaggacagcaggaacatgtttgctttgtttgaatacaacggccacgtcgacaaagccattgaaagtcgaaccgtcgtagctgatgtcttagccaagtttgaaaagctggctgccacatccgaggttggggacctgccatggaaattctacttcaaactttactgcttcctggacacagacaacgtgccaaaagacagtgtggagtttgcatttatgtttgaacaggcccacgaagcggttatccatggccaccatccagccccggaagaaaacctccaggttcttgctgccctgcgactccagtatctgcagggggattatactctgcacgctgccatcccacctctcgaagaggtttattccctgcagagactcaaggcccgcatcagccagtcaaccaaaaccttcaccccttgtgaacggctggagaagaggcggacgagcttcctagaggggaccctgaggcggagcttccggacaggatccgtggtccggcagaaggtcgaggaggagcagatgctggacatgtggattaaggaagaagtctcctctgctcgagccagtatcattgacaagtggaggaaatttcagggaatgaaccaggaacaggccatggccaagtacatggccttgatcaaggagtggcctggctatggctcgacgctgtttgatgtggagtgcaaggaaggtggcttccctcaggaactctggttgggtgtcagcgcggacgccgtctccgtctacaagcgtggagagggaagaccactggaagtcttccagtatgaacacatcctctcttttggggcacccctggcgaatacgtataagatcgtggtcgatgagagggagctgctctttgaaaccagtgaggtggtggatgtggccaagctcatgaaagcctacatcagcatgatcgtgaagaagcgctacagcacgacacgctccgccagcagccagggcagctccaggtgaaggcgggacagagcccacctgtctttgctacctgaacgcaccaccctctggcctaggctggctccagtgtgccatgcccagccaaaacaaacacagagctgcccaggctttctggaagcttctggtctgagggaggtgtctccgaggatccttttgcctgccgccttcattgatcctgtattaagctgtcaactttaacagtctgcacagtttccaaagctttactactcttagaggacacatgccttaaaaaaggaggggaggaaccacgctgccaccaaagcagccggaagtgccttaacttgtggaacc
